United States Patent Application Publication US 2024/0327476 A1 - sequence listing, part 122

SEQ ID NO: 232319 - DNA, 8840 bp, synthetic construct
  misc_feature 1..8840: note = Description of Artificial Sequence: Synthetic coding sequence
  source 1..8840: mol_type = other DNA
atggcctctgagaaacccggacccggacccggactggagcctcagccagttggcctgattgccgtcggagctgcaggtggcggtggcggtggcagtgggggaggtgggacgggcggttctggaatgggagaacttcgcggtgcctctggatctgggtccgtaatgctccccgcaggcatgatcaacccaagtgtgcccatccggaatatccgcatgaaattcgctgtgctgatcggtctgatccaggtcggggaagtgtccaacagggacattgttgaaacagtgctgaacctgctcgtggggggagaatttgacctggaaatgaattttatcatccaagacgcggagtccataacgtgcatgactgagttgttggagcactgtgatgtaacgtgccaggcggaaatttggagcatgtttacagccatcctgcgcaaatctgtgaggaacctccaaacctcaacagaggtgggcctcattgaacaagtccttctgaagatgtcagcggtagacgatatgattgcagacctcttagtagacatgttgggggtactggcaagctactctatcacagtgaaagaactgaagttgctgtttagcatgctgcgcggtgaatccgggatatggcctcgtcacgctgtaaagctcctgagcgtactgaatcagatgccccagcggcacgggcctgacactttctttaattttcccggttgcagtgccgcagctatagctctccccccaatagccaaatggccctatcaaaacggtttcactctcaatacctggttcagaatggaccctttaaacaacataaacgtagacaaggacaaaccctatttatactgttttaggacttctaagggggttggatacagcgcccatttcgtcggtaactgtttaatcgtaacatctctcaaaagtaagggtaagggattccagcattgtgtgaaatacgactttcagcctcgcaagtggtacatgatctccatcgtacacatctacaatcggtggcgcaattctgaaatcaggtgctacgtgaacggacaactggtgtcatacggcgacatggcctggcacgttaacaccaatgatagctatgacaaatgtttcctggggtctagcgagacggcagatgccaatcgcgtcttttgcggacagctcggtgcggtatacgtgtttagcgaggctttgaaccccgctcagatcttcgctatccaccagctggggccaggctacaagtccactttcaagttcaaaagtgaatccgacatccatctggccgagcatcacaagcaggtcttatacgacggcaagctggcatcaagtatcgcttttacgtacaacgcaaaggcgacagatgcccagctgtgcctggagagcagcccaaaggaaaacgcatctatcttcgtgcactctccccatgcactcatgctccaggacgtgaaagctattgtaactcatagtatccattctgccattcactcaatcgggggaattcaggtgctgtttccactgtttgcccagttagacaaccgacagctgaacgattcacaggtggagacgacagtgtgcgccactctcttggctttcctggtcgaactcctgaagagtagcgtggcaatgcaagaacaaatgctcgggggtaaaggctttctggtcattggataccttctggagaagtctagtagagtacacattactcgcgctgtgctggaacagttcctgtccttcgctaagtatttggacggtctaagccatggtgcacctctcttgaaacagctttgtgaccacatcctctttaacccagccatttggatccatacccccgcaaaggtgcagttatccctgtatacatacctgtccgccgaatttatcggcacagccactatctatacaactatccgaagagtggggacagtgctacagctgatgcatacgttgaagtattactactgggtgattaaccctgccgactcctccgggattaccccaaagggcctcgatggccctcgtcctagccaaaaagagattatttctctgcgggcattcatgctgctttttctgaaacagctgatcctgaaggatcggggagtgaaagaggacgagctgcagtctattttaaattatctgcttacgatgcacgaggacgagaatatccacgatgtattgcagttgctcgtggctttaatgagcgaacacccagcttctatgatacctgccttcgaccagcgcaatggcatccgagtgatctacaaactgcttgccagcaaaagcgagtcaatctgggttcaggccctgaaggtgctaggttatttcctcaaacatttgggacataagagaaaggttgagatcatgcacacccactctctgttcaccctgcttggcgagcggctgatgttgcatacaaacactgtaacagttaccacatacaacaccttgtatgaaatcctgactgagcaggtatgcacacaggttgtccacaagccacaccccgagccagactccactgtgaagatccagaatccaatgatcctcaaggtagtagcaacactgctcaagaactccactccctccgctgaactaatggaagtgcggagactgttcttatcagatatgattaagttgttctcaaatagccgggaaaataggcgctgtctgctccagtgcagcgtgtggcaggattggatgttctccctcggctacatcaatcccaagaacagtgaagagcaaaaaattactgagatggtctacaatatctttcgaatcctgttatatcatgctatcaagtacgagtggggaggctggcgggtgtgggtggacaccttaagcatcgcgcattcgaaagtcacatacgaggctcataaggaatacctggcgaaaatgtacgaggaataccagcgtcaggaagaagaaaatatcaagaaaggaaaaaaagggaatgtaagcacaatcagcgggctgtcttcccagacaaccggggcaaaagggggaatggaaatcagggaaatcgaagatttgagccaatcgcagagccctgagtccgagacggattaccctgttagcactgacaccagagacctgcttatgtctacgaaagtcagcgacgatatccttggaaattccgaccgtccaggctccggagtccacgtggaagtgcacgatctgcttgtggatattaaggcagaaaaagttgaggccactgaggtcaaactggacgacatggatcttagtccagagaccttggtcggcggtgaaaatggcgctctggtggaggtggagtccctgcttgacaatgtttactctgccgctgtggagaagctgcagaacaatgtccacggatctgtgggcataataaagaaaaatgaagaaaaagacaacgggccactcattacactagcggacgagaaagaggacctgccgaactcctccacctctttcctgttcgacaagattcctaagcaggaggagaaactgctgccagagctctcctcgaatcacataatcccaaacatacaggatacgcaggtgcatctgggtgtttcagacgatctagggcttctggcccacatgactggcagcgttgacctgacgtgtactagctcaattattgaagaaaaagagttcaaaattcataccactagcgacggcatgagtagtatttccgagcgggatctggcctcaagcacaaagggactggagtatgcagaaatgaccgcaaccactttagagacagaaagctcctcatccaagatcgtgcctaacattgatgccggtagcattatatctgacactgagcgtagtgacgacggaaaggaatctgggaaggagattcggaaaatccagaccaccactactacccaggcagtgcaggggagatccatcacccagcaggaccgcgacctgagggtggatcttgggttccggggaatgcccatgaccgaggagcagaggcgccagttctcgcccggtcccaggacgacaatgtttcgtatccccgagttcaaatggtccccaatgcaccagaggcttctcacagacttactgttcgctttagaaacagatgtgcacgtgtggagaagccattcaaccaagagtgttatggacttcgtgaattccaacgagaacattatctttgtgcataacactattcacctaatttctcagatggtggataacataataattgcctgcggagggatcctacccctcctttccgctgccacaagccctacagtgagtaagacggaattggaaaacatcgaggtcacacaaggaatgagcgcagaaaccgcggtcacgttcctctctaggctaatggccatggtagatgttctagtctttgctagctctcttaacttcagtgaaatcgaagccgaaaagaatatgtcgagcggcggactgatgcgccagtgcctgcggttagtgtgctgcgtggccgtccgcaattgtttagagtgtcgccagcggcagcgtgatcggggaaataagtcaagtcatggatcctctaaaccacaggaggttccgcagagcgttaccgcaaccgctgcctccaaaactccactggaaaacgttcccggtaatctgtctcccatcaaagatccggacaggcttttgcaggacgtggacattaaccggctgcgggcagtcgtctttcgcgacgttgacgacagtaagcaggctcagttcctagctttggccgtggtctacttcatctcagtactgatggtaagcaagtaccgagacatcctggagccacagagagaaactacccgtacaggtagccagcccggaagaaatattagacaggaaatcaactctccaacgagcactgtggttgtgataccctccatacctcacccttctcttaatcatggattcctggcaaaactgatccccgagcagtcttttggccattccttctataaggaaacccctgcagccttcccagacaccattaaggaaaaagaaaccccaacccctggggaggacattcaagttgagtcttccattccgcacactgattccggaatcggtgaagaacaagtggcgagtatactcaacggcgctgaattggagaccagcaccggacctgatgcaatgagtgaattgctgtctactctgtctagtgaagtgaaaaaatctcaggagtcgctgacagaaaacccgtccgaaactcttaaaccagccacttccatatccagtatttctcagacaaagggaattaatgtgaaggaaatcctgaaatcattggtcgcggcaccagtggaaattgccgagtgcgggcctgaaccaattccttacccagaccctgctctgaagcgcgagacccaggctattctcccaatgcaattccacagcttcgatagaagtgtcgtcgtgcccgtcaaaaaaccccctccaggctcactagcagtgaccactgtgggtgcaacgacagccggatctgggctgcccaccgggtccacctccaatatcttcgccgcaaccggggcaactcctaaatcaatgatcaacacaaccggagcagtggattccggctcgtcatctagttcatcatcatcctcatttgttaacggcgcaaccagcaaaaaccttcccgctgtgcagactgtggcccctatgccagaagacagcgcggagaatatgagtatcacagccaaactagagagggccctggagaaggtggctcccctgctcagggagatatttgttgattttgccccattcctcagtaggaccctcctgggcagccatggacaagaactactgattgaggggttagtgtgcatgaagagttccacatcagtcgtggaactggttatgctcttgtgtagccaggagtggcagaatagcatccaaaaaaatgcaggcctggcttttatcgagctcattaacgaaggcaggcttctgtgccacgccatgaaggaccatattgtgcgcgtggccaacgaggcagagtttatactgaaccgacagagagccgaggacgtccataagcacgccgaattcgagtctcagtgtgcacagtatgccgctgacagacgggaagaggagaaaatgtgcgaccatctgatcagcgccgcaaagcatcgcgaccacgtcacagctaaccagctgaaacagaaaattctaaacattcttacaaacaaacacggggcatggggggctgtgtcacactcacagctgcatgacttctggcgtttagactactgggaggatgatcttcggaggaggcgaagattcgttcgaaacgccttcggatcaacacatgctgaggctcttttaaaggccgcaatcgagtatggcacagaagaggatgtggttaagagtaaaaagacttttaggtctcaggccattgtgaatcaaaacgcagagaccgaattaatgctggaaggtgacgacgatgcagtcagcctcctccaggagaaggagatcgacaatcttgccggtccagtggtgttaagcaccccagcccagcttattgctccagttgtggtagccaagggaactctcagcattactaccacagagatttattttgaagtggatgaggatgactccgcattcaaaaaaatcgacactaaagtgctcgcatacactgagggactccatggcaaatggatgttcagcgaaatacgtgcggtattcagcagaaggtacctgctgcaaaacacagccctggaggtgtttatggcaaatcgcaccagtgtcatgtttaattttccagaccaggccacagtgaaaaaggtcgtctatagcttgccgagagtgggagtgggaacctcgtatggactccctcaggccaggcgaatttctttggcgaccccgaggcagctctataaatcaagcaatatgacccagcggtggcagaggcgcgaaatatcaaactttgaatacctgatgttcctcaatacgatcgccggacgcacatataacgatctgaatcagtacccagtattcccttgggtcctgacaaactatgagtctgaggaactggatctcacactgccaggcaactttagggatttgtctaagccaatcggtgcattgaatcccaaacgtgccgtgttctatgcagagagatatgaaacttgggaggatgaccaaagcccaccatatcattacaatactcactactccaccgccacgagcacactatcctggctcgtcaggatcgaaccattcactacattcttcctgaacgccaacgacggtaagtttgaccatcccgatcggacattctccagcgtcgcacgatcttggcgtacttcacagcgcgatacatctgatgtaaaagagcttattcccgagttctactatctgcccgagatgttcgtcaatagtaatggatacaaccttggagtgagggaagacgaggtggtagtgaatgacgtggatctccccccttgggcgaaaaaacctgaggatttcgtgcgcataaacagaatggccctggagtccgaatttgtgagctgccagctgcaccagtggattgacctgattttcggttataaacagagagggcctgaggcagttagagccttgaacgtttttcattacctgacctatgaaggctccgtcaacctcgactctatcaccgatccagtgctgcgcgaagctatggaggctcagattcagaatttcggccagactccatcccaattgctcattgagccccatccccctcggtcctcggccatgcacctgtgcttcctgcctcagagtcctctcatgttcaaggatcagatgcagcaagacgtgattatggtcctcaagttcccgtcaaattctccagtcacacacgtggcggctaacaccctgccccatctaaccatccctgccgtcgtgacagtgacttgcagcagacttttcgccgtcaatcggtggcacaatacggtggggctgcgcggtgcaccagggtactctctcgatcaagcccatcatctgccaatcgaaatggatcccctaatcgcaaacaactcaggtgtgaacaagcggcagattactgatctcgtggatcagagtattcagataaacgcccactgctttgtggtcacagcagacaatcgctacattctcatttgtggtttttgggacaagtcatttcgagtgtacagtactgaaacgggcaagctgacccaaattgttttcggtcattgggatgtagtgacctgcctcgccagaagtgagagctacatcggcggagattgttacattgtgtcaggcagcagggacgctacactgcttctttggtactggtcgggaagacatcatataataggcgacaaccccaacagctccgattatccggcacccagagcggttcttaccggacacgatcacgaggtggtctgcgtgtctgtatgtgcagagctcggcctggtgataagtggtgctaaagagggcccatgtttggttcataccattacaggggatctcttgcgggctttggaagggccagagaactgcctatttcccagattgatatcagtgtccagcgaaggccactgcatcatttattatgagaggggccgtttcagtaactttagcatcaacgggaaacttttggcccagatggaaattaacgattctactagggccatcttactatctagtgacggtcagaacctcgtcacaggcggagataacggcgtagtggaggtctggcaggcttgtgacttcaagcaactgtatatctaccctggctgcgatgctgggattcgcgctatggatctgtcccatgatcagcgcacactgatcaccggcatggcaagtggcagcatcgtggcgttcaatatcgatttcaacaggtggcattacgagcatcaaaatagatacta

SEQ ID NO: 232320 - DNA, 834 bp, synthetic construct
  misc_feature 1..834: note = Description of Artificial Sequence: Synthetic coding sequence
  source 1..834: mol_type = other DNA
atgttttccgaaattcgagccgttttttctcgccgttatctacttcagaacacggccctggaagtttttatggctaacaggacaagtgtcatgtttaacttcccagatcaggctacagtgaaaaaagtggtctacagcctgccacgagttggggtcggcacaagctacggactgcctcaggcaaggcgcatatctttagcaacaccacggcaactctataaatcctctaacatgactcagcggtggcagaggagggagatttctaacttcgagtatcttatgttcctgaacactatcgccggtcggacttacaacgacctgaatcagtatcccgtgttcccttgggtgcttaccaactatgagagcgaggagcttgatttgacgctccctgggaactttcgcgacttaagcaaacctattggtgctctgaacccaaaaagagccgtcttctatgctgagcggtatgagacctgggaagacgatcaatctcctccttaccactacaacacacactacagcactgcgactagcacactctcgtggctggtgcgcatcgagccgtttactacctttttcctgaatgcaaacgatgggaaatttgaccacccagacagaacattcagtagcgtggctcgctcctggcggacttcccagcgcgatacgtccgatgtgaaggaattgatccctgagttttattatcttcccgagatgtttgtcaactccaatgggtataatctgggagtgagagaggacgaggtcgtggtaaacgatgtagacttgcctccatgggccaaaaacctcaaaactctctgtggcagcacaggttggccatag

SEQ ID NO: 232321 - DNA, 7814 bp, synthetic construct
  misc_feature 1..7814: note = Description of Artificial Sequence: Synthetic coding sequence
  source 1..7814: mol_type = other DNA
atggcctcccgcgaacgactattcgagctttggatgctatactgcactaagaaggatcctgactatcttaaattgtggcttgacacttttgtgtcctcctacgagcagttcctggacgtcgactttgaaaaactccccacaagggtggacgacatgccacctgggattagtctgttaccagataatattttacaggtgcttcggatccagctgctgcagtgcgtgcagaaaatggccgatgggcttgaggaacagcagcaggccctgtctattctgttggtgaaattctttatcatcttgtgcaggaacttgagtaacgtggaggagatcggaacttgttcttatatcaattacgtcattactatgactaccctgtacatccaacaactcaagtccaagaaaaaagaaaaagagatggccgaccagacatgtattgaggagtttgtgatccatgcactcgcattttgtgagtctctgtatgatccgtatcgcaattggcgtcataggatttccggcaggattctgagtaccgtggagaaaagccgccagaagtataaacctgccagcctcacagtagaattcgtgcctttcttttatcagtgctttcaggagagcgagcacctcaaggaaagcctaaaatgctgtttgctgcaccttttcggagctattgtggcaggcggacaacggaatgcccttcaggcgatcagcccagcaaccatggaagtcttaatgagggtccttgccgattgtgattcctgggaagacggggacccagaagaggtgggccgtaaggccgagctcacgctgaagtgcctcacagaagttgtccacattcttctgtcatccaatagcgatcagaggcaggtcgagacctcaaccattctagagaattatttcaagctgctaaactctgatcactcagccttgcccaaccagcggaggtctagacagtgggagaacagattcattgcgctgcagatcaagatgctgaacacaataaccgctatgctggactgtacagatcggccagttctgcaggcgattttcctgaacagcaattgttttgagcacttaattcgcctgctgcagaactgcaaagtgttccaggggcagctggattgcttggctatctccacaattcaagctctgactgccgtcatgaataaaagccccgctgctaaagaggtgtttaaagagagaatcggatacacacacatgctcgaagtcttgaagagcctgggccagccgcctcttgaactcttgaaagagctgatgaacatggcagtggagggtgatcacacctccgtgggaatcttggggatcagtaatgtacaacctctgctcctgctgatccagtggctgccagagctgcagtctcacgacctgcagatctttatcagcgattggctaaagcgaatctgctgtattaaccgacaatcccgtacaacctgtgtaaatgccaacatgggcatcagaatcatcgaaacattggacctgcattcttctctccaccaaacttgtgccgagaacctcatagctatccacgggtctctaggctctcagagtgtgagctcagaagagatccgcagactgctgcgattgttaagagtagacgaatcagaaagtgtgcacccatacgttacgcccgttacacgcgctatcctaactatggctcggaaactgtcacttgaatctgctctccaatatttcaacctgtcgcatagtatggcgggaatctccgttccaccaatccagaaatggcccggatccgcttttagctttagcgcatggttttgtttagaccaagaccaactaacattgggcatagccaataagggcggaaagcgcaagcagctttattctttcttcaccggaagtggcatggggttcgaagctttcatcacacatagcggtatgttggtggtggcagtgtgtacgaagcgtgagtatgccacggtgatgctccccgatcatagtttctgcgattctctttggcacaacattactgtcgtgcacatgcccggtaaacgaccgtttggacagtcattcgtctatatttacgacaacggtcagcagaaggtgtctgcccctctgaggtttcctgccatgaacgagcccttcacatcatgctgtattggctccgctgggcagaggactacgacccccccacctagccagatacccgaccctccatttagtagtcctatcaccccccaccggaccagctttggaggtattctgtcatctgcatcctggggcggaactatagagaagtcaaaactgatcacgaagcttatctcggccggaactcaggactctgaatggggatgtcctacatcccttgaaggtcagctgggttctgtgatcatcttttatgaacctttacagcccccacaagtgaaggcgctttatctggctgggcctaactgtttatcaccttggaagtgccaggagagtgacatggccgatttacctggaaacattctcctgtactacaccgcgaaagcctgtaagaacagcatctgcctggacctcagcaccaactgcctgcatggaaggctgactggcaacaaggttgtgaattgggacattaaggacattattaattgtattggaggtctcaacgtgctgttcccactcttagagcagatctcacacttcagcgaaggccagatccccgaagagaagaatgagagtaccgttcccgagtctgtgacccccgtggaaggagactggctggtgtggacatccactaaagcctccgagagtagactagaacggaatctggtggcaactttcattctgatcgtgaaacattttatccagagacatcctatcaatcagggaaacctcatccacagccatggcgtggcgaccctcggagctcttttgcaaaaagttcctagcacattaatggacgtgaatgtgctaatggcagtccaattactcattgagcaggtaagcttggaaaaaaatatgcagctgctccaacagatgtaccagtatcttttgttcgactttcggatatggaaccggggagatttcccgtttcggatcggccatattcagtacctgagcaccatcatcaaggactcaaggcgcgtgtttcggaaaaaatacggggttcagtttttgcttgatactctaaggatatattacgggaatggatgcaaatataacgagctgtctttggatgacattaggaccattcggaccagcctgtacggcctcattaagtatttcttgtgtaagggcggtagtcatgaagaaatccagtctatcatgggctacattgccgctacaaatgaagaggaacaattatttggaatacttgatgtgctcttcagcctgctacggaccagcccaacgaggggccagctcttcctcctgctattcgaaccaggaaacgctgacatcctctacgccctactgctgaaccagaagtactccgatagactgcgggagattatctttaagatcatggagcagatgttgaaatgtactaacgtgtatgagcgatcaaagcagcacatacgcttgagggaggttggctatagcggcctgggactattactgaatgaggccctcgtgaatacctccctgatcaagaatttgactcatcaaatcatcaacactgaccccgtgattaattttaaggacctgttatctgttgtctatataagccatagggctcacatcaacgtgagagtggcaatatgccggaaggtactgcaaatcttgcaattccagccagatgctgcccatcaaatctctcagcaggttggctggcaggacactctggttaggctgtttctgaaagcaaagtttgaaaatggtaacaccctgcataagcacagtagggccgtgttgatgaaggacaacgataaaaatatgagcacagaggatacaaaaaagaattccgatgaaaagacggacgaagaaaaaatcacatcttttgcgtccgccaacgtgtcttctgaccagtggagccttgaagatagacattcactggattctaatacgccactgtttcccgaagactccagcgtgggggaacttagcttcaagtcggaaaaccaggaggaattctggcatagtaatccctctcacctgtcccttgatctaagcggaattgactcctgcgagatgagcgattctgggtctcaagttccagatagccttcctagtaccccaagtccggtggaatccacaaagagctttagcgtccactccgacagggaatcctcaatcacaaacgacatgggttttagtgacgacttctcgctactggaatcccaggagaggtgtgaggaagaactcctgcagctcttgacccacatacttaattatgtgatgtgcaaagggctggaaaaatcagatgacgacacatggatcgaacgaggacaggttttctcagccctgtctaaaccgggaatctctagtgaactactgcgccctagcgatgagattaagctcacattgctgcagaaaatgctagagtgggccattagcgaaaaccgggaggccaagaccaaccccgtgaccgctgagaacgcatttcggctcgtgctgattatccaggattttctacagagcgagggtctagtgaacagcaatatgtggactgaaaagctcctggaagacatgatgctcctgttcgactgtctgtctgtctgctattctgaatcccccgtctgggtgaaactgagtcaaatccagattcagctgctcctgggcttcatcggcagaggtaacctgcaggtatgcgccatggccagcgcgaagctgaacaccttgctccagacaaaggtcattgagaatcaggatgaggcctgctatatcctcggcaaactggaacatgtcctgtcacagtcaattaaggagcagacagaaatttacagcttcttaatacccctggtgcgcacactggtatctaaaatctatgagcttctgttcatgaatctccatctgccttccttgcctttcacaaacggaagttcaagcttctttgaagacttccaggagtattgcaattccaacgaatggcaagtctacatcgagaaatacattgtcccttatatgaaacagtatgaggcccacactttttacgatggccacgagaacatggctctttactggaaagattgctatgaggccctgatggttaacatgcataaacgggatagagagggaggggagagcaaactcaaatttcaagagctgttcgtagagcctttcaatcgaaaagctagacaagagaatcttcgatacaacaatatgcttaagcaactatccagccaacagctcgctaccttgagacgctggaaagctattcagctctacctcacctgcgaaaggggtccctgggccaagcgaaaacaaaaccccattcactggaagttggccaacgtggagaactattcaagaatgagattaaagcttgtgcctaactacaacttcaagacacatgaagaggcaagcgctctccgggacaatcttggcattcagcattcccagccgtcttcggatacattgctgttggaagttgtaaagcaggtaaaggtgtcagatatggtggaggataaactggatcttcctgaagaagacattaccgccagggttaacgttgatgaaaaagaagagcaggaccagaaggagaaactggtgcttatggaggattgcgagctgatcacgataatcgacgtcatcccagggaggttggaaattaccactcagcacatctacttctacgatgggtccattgaaaaagaagatggcgtgggatttgacttcaaatggcctcacagtcagatccgagagatccacctgcgaaggtataatctgaggcgaagtgcgcttgaaatctttcatgtagaccaatcaaactattttctgaatttcaagaaggaggttaggaataaaatatactcaaggctgttgagcctgcacagtcccaactcctattacggcagccgcagtccccaagagctttttaaggcctccggcttgacccagaagtgggtgaatcgagagatttccaattttgactaccttattcaaattaacactatggccggtcgaacatataacgatctggcccagtatccagtgttcccctggatcctgcaggactacaccagcgaggagctggatcttaataaccccgcagtgttccgggatttgtctaagccaattggggtggtcaacgagaaaaatgctaaagcaatgagggagaagtatgagaactttgaggatccaatgggaacaatcgataaatttcattatggcactcactattccaatagcgcaggtgtgatgcattacctcatcagggtggagccttttaccaccttgcatatccagctgcagagcgggaggtttgattgcgccgaccgtcagtttcactccatccccgcaacctggcaggcgcttatggataacccctatgacgtcaaggaattgattcctgaattcttttattttcctgagttcctcgagaatcagaatcagttcaacctgggaaggcttcaaatatccaaagaacttgttaatgatgttattctgccgaaatgggccaagtcagccgaggactttatctataagcataggaaagctctggaatccgagtacgtgtctgcccacttgcatgaatggatagacctcatcttcggatataagcaacgtggccctgctgccgtcgaggcactgaatgttttttactactgctcttatgagggtgcagtggacttagatgcactgacagacgaaaaggagcgtaaggctctcgagggaatgatcaacaatttcggccagaccccctgccagctcctgaaaataacaatttccatgaactatgttatcgggactcacggctggctcccctatgacagaaacatttctaactattttacttttataaaagatcagaccgttactaatcctaaaactcagcggtccattaatgggagtttcgctccaggactggagattacaagcaagctctttgtggtgtcacacgatgcaaaattactgttttccgccggttattgggacaatagcatccaggtcatgtccttgacaaagggaaagattatttctcatataatccgtcacatggacatcgttacctgcctcgccacagattactgcggcattcacttaattagcggtagtcgggacaccacttgtatgatctggcagattacccagcaaggcggtgttcccgtgggcctagccagcaagcctttccaaatcctgtatgggcacactaacgaagtgctgagcgtggggatttccacagagcttgatatggctgtgtccgggtctagggatgggactgtaattattcacacgatacccaatctggcaatttcttgggagggccatatcgtggtttattcctcgacagaggagaagactacgctcaaagacaaaaacgcgctccacctgttctcgatcaatggaaagtatctgggttcccagattctcaaagagcaggtaagcgacatatgtatcataggcgagcatattgttacaggatcaatccagggttttctatctatacgcgatctacattctctgaacctttcaataaaccctttggctatgcgcttacctatccattgtgtatgcgtgacaaaagaatacagtcatattctggtggggctggaagacgggaaacttattgttgtgggcgtgggcaagccagcggagatgcgatcagggcaactgtctcggaaattctggggcagcagcaaacggctgagccaaatctccgccggagaaacggagtacaacactcaggactcgaaata

SEQ ID NO: 232322 - DNA, 8084 bp, synthetic construct
  misc_feature 1..8084: note = Description of Artificial Sequence: Synthetic coding sequence
  source 1..8084: mol_type = other DNA
atggcttcaagagaacggctctttgagttgtggatgctgtactgcaccaagaaggatcccgattatctcaagctgtggctggacacattcgtgtcgtcatacgaacagtttttggatgtggacttcgagaaactgccaacacgtgttgacgatatgccacctggtatctcactgctccccgacaatatcctgcaagtactccgcatccagctgctgcagtgcgtgcaaaaaatggcagacgggctagaagagcagcagcaagcgctgtccatcctcttagtcaagttttttatcattctctgtcgtaacctctcaaacgtggaagaaatcggtacttgcagttatattaactatgtcatcactatgaccaccctgtatatccagcagctcaaatccaagaagaaggaaaaagaaatggctgatcagacatgcattgaggaattcgttatccacgcactggctttttgtgagagcctttatgacccctataggaattggagacatcgcatcagcggacgcatcctgtcaactgtggagaagtcacggcaaaagtataagccagcatctctgaccgtggagtttgtgccgttcttctaccagtgttttcaagagagtgagcacctgaaggaatccctgaagtgctgtcttctccatctgttcggggcaatcgtcgccggaggccagcggaacgcattgcaggctatctcaccggcaactatggaggtcctaatgcgggtgctggccgactgcgatagttgggaagatggggacccagaggaggtgggacggaaagctgaactgaccttaaagtgtctcacggaggtggtgcacattttgctgtcctccaactccgaccagaggcaagtcgaaacttccactatcctagagaactactttaagttgctgaacagtgaccattccgcactgccaaatcagcggcgttcccggcaatgggagaatagattcattgctctacagatcaagatgctgaacaccattaccgcaatgctcgattgtactgatcggccagtactgcaggccatctttctgaactcaaactgttttgaacacctcatcaggttgctgcagaactgtaaggtgtttcagggtcagctggattgcctagccatcagcacgatacaggcgcttactgcggtcatgaacaagtcccccgcagccaaagaagtcttcaaagagcgcatcggatacacccatatgctagaggtcctaaaaagcctgggccaaccacctctggagctgctgaaggagttgatgaatatggctgttgagggggaccatacaagtgtcggaatcctgggcattagcaatgtccaacctttattactcctgattcagtggctaccggaactccaaagccacgatttgcagatctttatctcggactggctgaaacgcatttgctgcattaacagacagtcaagaaccacctgcgtgaatgcaaacatgggtatcaggatcattgaaacattagacctccattccagtttgcaccagacctgcgcggagaacctgatcgccattcatggttccctcggctcgcaatccgtctcctcggaagagatcagaaggctgcttcgccttctgcgggtggacgagagtgaaagcgtgcacccctatgtgacacccgtaacgagggcaatcctgactatggcccgaaagctcagccttgaatcagccctgcagtattttaacctttcccactccatggccggaatctccgtgccgccaatacagaagtggccaggttccgcctttagctttagtgcttggttttgtttggaccaggaccaactaacacttggtatagctaacaagggtggtaagaggaaacagctgtattcattcttcacagggagtgggatgggcttcgaagccttcattacgcatagtggcatgttagtcgtcgcagtctgcacgaagagagaatacgcaaccgtgatgctgcctgatcatagcttctgcgactcactatggcacaacatcacagtggtacacatgcccggaaaacgcccttttgggcaatccttcgtgtatatctatgataacggtcagcagaaagtttccgcccctctaaggttcccagccatgaacgaaccatttaccagctgctgtattggatcggccggacagcggaccacaacacctccaccctctcagattcccgacccaccgttttcatcacccatcactccacacaggacttcatttggcggaatcctgagttccgcatcttggggagggacgatcgaaaagtctaaacttattacaaagctgattagcgccggtacccaggacagtgagtgggggtgtccaaccagcctggaaggtcagttgggctcagtgatcattttttacgagcccttgcagccaccacaggtcaaagctctgtacctagctggtccaaattgcctctctccgtggaaatgccaggaatccgacatggctgatctgccaggcaatattctactatattacacggctaaggcttgcaagaattctatttgtctggacctctcaaccaattgtctgcacggaagactgactggtaataaggtggtgaattgggatatcaaggacataatcaattgcatcggaggcctgaacgttctattccccctgctggagcagatcagtcacttctccgaaggccagatccctgaagaaaagaacgagagtaccgttccggagtcagtaactcccgtggagggggactggctggtttggaccagtacaaaagcctcagagtcgagactcgaacggaatctcgttgcaacttttattctgattgttaaacattttattcaacggcatcccatcaaccaaggcaatttgatacactcccacggggtcgcaaccttgggagctttgctgcagaaggttccctcaacacttatggacgtgaatgtgttaatggccgtgcagttgttgatcgaacaggtctcactcgagaagaatatgcagctgttgcagcaaatgtaccagtatcttctcttcgactttaggatctggaacaggggtgactttccattcaggatcgggcacatccaatacttgtccactattatcaaagactcaagacgggtgttcagaaaaaaatacggtgtccaattcctccttgacacacttagaatttattatggcaacggctgcaaatataacgagctgtctctggacgacataaggacgataagaacgagcttgtacggtctcattaagtacttcttgtgtaagggcggttcccatgaggaaatccaatcaattatgggctacattgcagccactaacgaggaggagcaactgtttggcatactagacgtgctgttctcactcctcagaactagccctactcgcggacagctctttttgctcttgtttgagccaggcaatgcagacatcctgtatgcacttctgcttaatcaaaagtactcagatcggttgcgggagatcatttttaagatcatggaacagatgctcaagtgcacaaatgtgtacgaaagatctaagcaacatatccggctgagagaggttggctactctgggcttggcttacttctgaatgaagcgctggtgaacacaagtctgatcaaaaaccttactcatcagatcatcaacaccgaccccgtgataaacttcaaggacctactgtctgtcgtctacatcagtcatcgcgcacacataaatgtgcgcgtggcaatttgcaggaaagtgttacagatccttcagtttcagccagatgccgctcatcagatttctcagcaagtgggatggcaggacacgttagttagacttttcttgaaggcgaagttcgaaaatggcaacaccctccacaagcatagcagggcagtgctgatgaaagataacgacaaaaatatgtccacagaagatacgaaaaaaaactccgacgaaaaaaccgacgaggaaaagattacctcatttgcctctgctaacgtgagttctgatcaatggtcactggaagataggcatagcctggattctaatacaccgctcttcccggaagatagcagcgtcggagagttatctttcaagtcagaaaaccaagaggaattttggcactccaatccatctcatctgtccctcgatctgtcaggcatcgacagctgcgagatgtcagactcaggcagccaggttcctgactctttgccgtcgacccccagtcccgtggagtccactaagagcttctccgttcacagtgatagagagtcctctatcacaaatgatatgggctttagtgatgatttttccctgcttgagtcacaggaacgatgcgaggaggagctactgcagctgctaacccacatcctgaactatgtgatgtgtaagggactggagaagtcagatgatgatacatggattgagaggggacaggtgttcagcgctctgtctaagcccggaatttcatccgaattgctgcggccatccgacgagatcaagctgaccctgttgcagaagatgctcgaatgggccatttctgaaaatagggaggcaaagaccaaccccgttacggctgaaaatgcctttaggctcgtcttgataatacaagattttctccagagcgagggcctggtaaatagcaacatgtggacggagaaactgctcgaggatatgatgctactgtttgattgcctgagcgtttgctatagtgagtcccctgtttgggtcaagttgtctcagattcagattcagctgcttctgggctttatcggcagaggcaacctgcaagtctgcgcgatggcctccgctaaattaaacacactgctgcagacaaaagttattgaaaaccaggatgaggcctgttatattcttgggaagctggagcatgtcctcagccagagcattaaagaacaaacagaaatttactccttcctcattcctctcgtgaggacattggtgtccaagatatacgaattgctgttcatgaatctgcacctgccttctctcccatttaccaatggcagcagctccttttttgaggatttccaggagtactgcaacagcaatgagtggcaggtctacatcgagaaatacatcgtcccatatatgaagcaatacgaggctcacacgttttatgacggacacgagaatatggccctttattggaaagattgctacgaagccttgatggttaacatgcataagagagatagggaaggcggagaatcaaagctcaaattccaggagctcttcgtggagcccttcaatcgcaaagcgagacaggagaatcttagatacaataatatgctgaagcagctgtcctctcagcagctcgcgacccttaggcgctggaaggctatccaactgtacctgacctgcgagcgtgggccatgggccaaacggaaacaaaaccccattcattggaagcttgccaacgtagaaaactacagccggatgcggctcaaacttgtgcccaattataattttaagacccatgaagaggcctccgcactgcgagacaatctcggtattcagcatagtcagccatcctcggatacactgcttctggaagtcgtgaagcaggtgaaagtcagcgatatggtggaagataagctagacctgcctgaagaggacatcacagctcgagtgaatgtggatgagaaagaggaacaggaccagaaggaaaagctggtgctgatggaggactgtgagctgattaccatcatcgatgtgattcccggacggttggagattacaactcagcatatctatttttacgacggctcgattgagaaggaggatggagtcgggttcgacttcaagtggccacattctcagattagggagatccacctgcgacggtacaaccttaggcggtcagcgctagagatcttccacgttgaccagagtaactactttctgaactttaaaaaggaggtccgaaataagatttatagccgcttgcttagcttgcacagtcctaacagctattatgggtctagatctccacaggagctgttcaaggcatcaggcctaacacagaaatgggtgaatcgggaaatttccaatttcgattatcttatccagattaatactatggccggtcggacttacaacgatctagcacagtaccccgttttcccgtggattctgcaggactacacctctgaagagctcgacctgaataatcctgcagtattcagagatctcagtaagccaattggggtcgttaacgaaaagaatgcaaaggctatgagggaaaagtacgaaaacttcgaagacccgatggggaccattgacaagtttcactatggtactcattatagtaattccgcaggggtaatgcactatctcatcagagtggagccctttaccacacttcatatccagcttcagtcagggagatttgattgtgccgatcggcagttccacagcattcctgctacctggcaggcactgatggataatccctatgatgtgaaggaactaatacccgagtttttttattttccagaatttttagagaatcagaaccaatttaatcttgggcgactgcaaatttccaaagagctagtgaatgacgtgatcctgcctaagtgggccaaaagcgctgaggactttatttataagcatagaaaggcactggaatccgaatatgttagtgcccacctgcacgaatggatagatctcatcttcggctacaagcaaaggggccctgctgccgtggaagcactgaacgtcttctactactgctcttatgagggcgctgtggacctggacgcactcacagacgagaaagagagaaaagccctcgaaggcatgatcaataatttcggccagaccccctgtcagttattaaaggaacctcatccaccccgactttctgcggaggaagcagtccagaaacctaccaaaatcgatacttccacgctgaatttgtttcagcatctccccgagttgaaatcctttttcatagagggcatctcagatggcattccacttctgaaggctacaatcccaaaaaaccagtatcgcagtttcatgtcacagggatcccctgagcttcttatcacgatatcgatgaactacgtaattggaacccacggttggttaccctacgacaggaatattagtaactactttacctttatcaaagaccagacagtgacaaatcccaagacccagcgatccatcaacgggagtttcgctcccggactggagatcacatctaagctcttcgttgtgagccacgacgcgaagctcctgtttagtgctggatactgggacaactcaattcaagtgatgtctctgaccaagggcaagattatctctcacattattaggcacatggacatagttacttgtctggccaccgattactgcggaatccacctgattagtgggagccgtgacaccacctgtatgatttggcagatcactcagcagggtggtgtgcctgtgggcctggcctcaaagccctttcaaatcttgtatggccacacgaacgaagtcttatctgtgggtatttcaaccgaactggatatggcggtgagcgggagtcgagatggtacagttatcattcacaccattcagaagggacagtacatgagaaccttgcgtcccccttgcgagagcagtttattcctcacaatccctaacctcgctataagttgggaagggcacattgtggtgtattcaagcacggaggagaaaactactttgaaagacaaaaatgccttgcatctgttcagtataaacggaaaatatctggggtctcagatcttgaaggaacaagtgtcagatatatgtatcatcggcgagcatatcgtcacaggatctatccaaggattcctgtctatacgtgacctccatagtctgaacctcagcatcaacccattagccatgcggttgccaatccattgcgtatgcgtgacaaaggagtattctcacatactcgtaggcctggaagacgggaagctcattgttgttggcgtaggcaaacccgcagagatgcggtcgggacaactatctagaaagttctgggggagcagtaaacgtctttcccagatttcagctggagaaactgagtacaacacccaggatagtaaata

SEQ ID NO: 232323 - DNA, 7713 bp, synthetic construct
  misc_feature 1..7713: note = Description of Artificial Sequence: Synthetic coding sequence
  source 1..7713: mol_type = other DNA
atggccgctagtgaacggctctacgagctctggctcctgtactacgctcaaaaggacttaggctatttacagcagtggctgaaggcgttcgtgggggctttcaagaaatctatttcactgagttccttggaacctaggagacctgaggaggccggagctgaagttcctctgctcccactcgacgaactccacgttctcgcagagcaactccaccaagcggatctggagcaggctctactattactcaaactgtttatcatcctatgcaggaatctagaaaacattgaagcgggtagagggcaagtacttgtgccacgagtgcttgctctccttaccaaactggtagccgagttgaaggggtgtccacccccacagggtaggggcacacagctagagaatgtggctctccatgctcttctactgtgtgaggggctgttcgatccataccagacttggcggcgacagagatccggcgaggtgatcagctctaaagaaaagtcaaagtacaagtttcccccagcagcgttacctcaagagttctctgccttcttccaggaatctcttcaaaatgctgatcacctgccgccaatcctgctgttaaggctgatccaccttttctgtgcagttctcgccggtggcaaagagaacggccaaatggctgtttctgacggttcagtcaaaggtctcctgtctgtagtgagggggtggagtaggggcccagcacccgacccatgcctcgtgcccctggctctcgaagccctggtcggggctgttcacgtactgcatgcatcccgcgctcctcctcggggtcccgagcttcgagccctgctcgaatcttatttccacgtactgaatgccgactggccagcaggtctaagttctgggccagaggaagccctcgttacacttcgcgtcagtatgctagatgccatccccatgatgctcgcgtgtgaggatagacccgtgctacaagcaacgtttctgtcgaacaattgcttcgaacacctcacaagactaatacagaattccaagctgtatcttcagtcccgagctccacctgagggcgactcagatctggccacgaggctgttgacggaacctgacgtccagaaagtgctggatcaagacactgatgccatcgccgtacacgtggttcgggtcctcacttgcattatgtccgatagtccttcagctaaggaggtgttcaaagaaagaatcggctaccctcatctccaagaggtgctccagtctcacgggcctcccactcaccgcttgctccaagagctgctcaatatggctgtggagggtgatcacagcatgtgtccaccacctcccatccgcaacgagcagccagttttggttctcgctcagtggctgccctctcttccaaccgctgaacttcgattgttcctggctcaacgcctcagatggctctgcgacagctgtccggcatccagagctacgtgcgtgcaggccggattggtaggctgcttattggaaaccctctctaccgggctggctttagaagccaggtgccaggagcagttactcgcccttttacaggcacttggacgagtttctattcggccaatggagctgcgccacttgctccgaccaaggcctggtctggattccgaacccggaggcgctgaggcaggcaaagcgagacacgctggggcagtcattaggacactctctggcatggctcggcatcaaggtcccgcacgggcactgcgctatttcgacctgactcccagcatggctggcatcatggtgccaccagtgcaacgctggccgggacccggttttacgttccatgcatggctttgcctgcacccaatggatacagccccaacgcccgcacccacacgcccactgcagaggaagcagctttacagcttcttcactagttcagggtccgggtttgaggccttttttactgcagccggtactctggtcgtagccgtgtgcactcgcaaagagtatctcactatgtcactgcctgaagtgtcgtttgctgattcagcttggcactgcgtcgctattgtccacgttcccggacggcgacccttttctcaaaatctagtccatgtgtacaaggacggacacctcgtcaaaacagctcctctgcgctgcccgagcctaagtgaaccttttagtagctgttgcatcggctccgcaggatatcggacaaccacaacaactacagggctcccaacaccccctgttcccgctacattggcctatactcatccagcccttacgagatctcagtcggtacctgccagcactggattgggatgggggtccggtttagtagctcctcttcaggaggggagcatcgattccacactagccggaacgcaggatactcgctggggtagcccaacaagtctagagggcgagctgggcgcagtggcgatatttcatgaggcactgcaggcgaccgcactgcgcaccctgtgcactctgggccctaacgagaccgccccatttaagcccgagggcgaacttcatgaactgtcaacccgtcttttgttgcattattccccacaggcgtgtaagaataatatctgtctcgacctgtccccaagtcatgggttagacgggagattgaccgggcacagggtggaaacctgggacgtgaaggacgttgtgaattgcgtaggcggaatgggagctctcctgccactcttggagcgggtggctgcccagcctaaggaagctgaggctgggcctgctgagacccatgatctggtgggcccagagttgacttctggacataatacccaaggcctggtattaccactcggcaagtcgtctgaggaacgcatggaacgtaatgccgttgccgctttccttcttatgctgaggaatttcctgcaggggcacatggtgaatcaggagtctctggttcagtgccagggacctgcaatcataggcgctttactgagaaaggtccccagttgggcaatggatatgaacgtgcttatgtctgctcagcttctcatggaacaagtggccgctgaaggctctggaccactcctttacctcctctaccaacatctccttttcaattttcacctctggaccctgagcgactttgccgtgagactggggcacatacaatacatgtccagtatagtgcgagagcataggcagaaattgcggaaaaagtacggagtgcagtttattctggacgcactcagaacccattactcaccacaaagagagcggcctctggccgcagacgatctcaggaccgtgcagactagtctgctcggtcttgcaagagaatttctggtacggtctttgtctgccgatgacgtgcaagttacacagaccatgttaagcttcctagccgcaaccggagatgatgggcaaatactacgtagactgcaacaaaacgaaaggctgcctgagagaagtcggcaaaggctcagactcagggaatgtggactacaggggctcgttgcatgcttacctgagggaacggtgtcaccgcagttgtgtcaaggactttacaagctgtttttaggcgctgggtccggaaacacggccggtgggggagggtccagcggaactctgacccctgcctctcagccgggaaccccgtcgcctcttgacggccctcgtccattcccagccgctcctggcagacactctagttctctgtccaatgtgctggaggatggttctctgcccgagcctacaatttccggagatgacacatccaacacatccaatccccagcagacaagcgaggaagagctttgtaacctgttaaccaatgtgctgttctctgtgacatggaggggcgtggagggaagcgacgaggccgcttggcgggagcggggacaagtcttctctgttttgacacagctgggtgcatcagccacacttgtccgcccacccgactgtatcaagcgaagtttgctggagatgatgctggagagcgccctcacagacatcaaggaagcgccagtgggggtattggccagtttaacacagcaagccctgtggctgcttcggttacttcaagacttcctgtgcgcagaaggtcatggtaaccaagagctgtggagtgagaagttatttgagggagtatgctccttgctggacagactcggagcgtggccacacttggctaatgggaccgcggacttgagagagatggcacagataggtctgcgacttgtgctgggctacatcctactcgaagatccacagctgcacgcacaggcctacgtgcggttgcatatgctgctgcaaacagccgtgccagcccgtcgtgaggaagcttgctatgtgctgagcaagctggaggcagccctggggagggtcctgaacacaagttctctggagagcgccaccgacgaggctggcagtcccttggctgccgcagctgccgctgccgcagccgaaagatgttcttggttggtgcctcttgtaagaactttgctggatagagcctacgaacccttgggcctgcagtgggggctgcctagcctgccgcctacgaacggaagtcccacttttttcgaggatttccaggcgttctgcgctacgccagagtggcgccatttcatcgataagcaagtgcagcccacgatgtcacaattcgagatggacacttacgcgaaatcgcacgacctaatgagcggcttttggaacgcctgctacgacatgctgatgagctctggacagagacgccaatgggagagggctcagtctcgaagggcattccaggagcttgtcttggaaccagcccagaggcgcgctcgattggagggcctcagatacacagcagtgctgaagcagcaggccacccagcacagtatggctttgctccactggggggctctttggaggcagctggcgagtccttgtggggcatgggcactgcgcgacacccctatcccacggtggaaacttagcagcgcagagacctactcccggatgcggcttaaactcgtcccgaatcaccacttcgacccgcaccttgaagcctcagcactgcgggacaatctgggagaagtccccttgacaccgactgaggaggcctcactcccgctcgccgttacgaaggaagctaaagtgtccacaccccctgagctcctgcaagaggaccaacttggcgaagacgaactggccgagcttgaaacgcctatggaagcagccgaactggatgaacagagggagaaacttgtgttgagtgcagagtgtcaactggtgacagtggtggcagtggtgccagggctgcttgaggtcactacgcaaaacgtatatttttatgacggatctaccgagcgggtggagacagaagagggaatcgggtacgatttccgtcgccctctagcccagctcagggaggtgcacttaaggagatttaatctgcgacgctccgctttggagctcttttttatagaccaggcaaattacttcctgaatttcccttgtaaggtgggcactacaccagtcagttcgccgtctcaaacacctagaccccagcctggccctatcccgcctcatacccaggtgcgtaatcaggtgtattcctggttgctgcggttacgacctccaagtcagggctacctgagtagtcgaagtccacaggagatgctgcgcgcttccggtctgacccagaagtgggttcagagggagatctcgaatttcgaatacctgatgcagctgaacaccattgccggaagaacgtacaacgacctgtcccagtacccggtcttcccatgggtactgcaggactatgtgtcacctacgctggatctgagtaatcctgccgtgttccgggatcttagcaaacccataggcgttgtaaacccaaagcatgcccagctggtccgggaaaaatacgagagcttcgaagatcctgcaggcaccatcgataaatttcattatggaacccattacagtaacgccgctggcgtgatgcactatctgatcagagtagagccattcaccagcttgcacgtacagttgcaaagcggcaggttcgattgctccgaccggcaattccatagcgtcgccgctgcatggcaggcccgactggagagcccagctgatgtcaaggagctcatcccagaattcttttatttccctgacttcctagaaaaccagaatggtttcgacctggggtgtcttcagttgacgaacgagaaggtcggagatgtagtcctgccaccttgggcctcctctcccgaggacttcattcagcaacatcgccaagccctggaatctgaatatgtgagtgctcacctacacgagtggatcgacctcatcttcggatataagcagcgcggacctgctgctgaggaggccctaaacgtcttctactactgcacttacgaaggagccgtggatttggatcacgttacagacgaaagagagcgaaaggcattagaagggatcatttccaatttcgggcagacaccctgccagctccttaaagaaccacacccaactcgactgagcgcggaggaggccgcacatcgtctggcaaggctggacacgaatagtcccagcattttccagcacctggacgagctcaaggcgtttttcgcggaagtggtgagcgacggggtacccctggttcttgctctcgtccctcatcgccaacctcactccttcattacacagggtagtcccgacctgctggtgaccgtctcggcttctggtctgcttgggacacactcatggctcccatatgaccggaacataagcaattacttctcattttccaaggaccccactatggggagccacaaaacccagcggttgctatccgggccttgggtgcctggcagcggtgttagcgggcaggcgctggcagtcgcccctgatggcaaactgctgttttctggcggtcattgggacggttctttgagagtgaccgcacttccccgagggaagctgctgtcacagctaagttgtcaccttgatgtagtaacatgcctggcccttgatacctgcggaatataccttatcagcgggtccagggatacaacgtgcatggtgtggcgactgctgcatcaggggggactgtctgtggggctcgcccctaagcccgttcaagtgttatacggtcatggggctgctgtgtcatgtgtggcaatttccaccgaactggatatggccgtgtcaggtagtgaggacggaacagtcatcatccacacagtgaggcggggacagttcgtcgccgcactgcgtcccctcggggctacgtttccaggtcccatcttccaccttgccctcggatccgagggtcagatcgtggtgcaatcaagtgcttgggagcgccctggcgctcaggtcacctactcgctccatctttattctgtgaacggcaagttaagggcaagcctacccctggccgagcaacccactgcactgaccgtcaccgaggacttcgtcctgctgggaaccgcacagtgcgccctgcatatcttacagctcaatacattgttacctgcagccccacccctacctatgaaggttgccattaggtccgttgctgttacgaaagagcgctcccacgtactggtaggcctggaggacggcaagctgatcgtcgtagttgcagggcagccttcagaggttaggagctcccaattcgcacgcaaactttggcgctcctctagacgcatctcccaggtgtcaagcggggagactgaatataatccaactgaggccagatag

SEQ ID NO: 232324 - DNA, 1848 bp, synthetic construct
  misc_feature 1..1848: note = Description of Artificial Sequence: Synthetic coding sequence
  source 1..1848: mol_type = other DNA
atggagcccgcactcggaccaggggttcagaaggatttggggtatctacagcaatggctgaaggccttcgtgggcgcttttaagaaatcaattagcttgagtagcctggaaccacgtagaccagaggaggccggagctgaagtgcccctgctccccctcgacgagttgcatgtgctggcagaacagctacaccaggccgatctggagcaagctctgctgttactgaaactgtttatcatactctgtagaaacctcgaaaatatcgaagcaggtaggggccaggtgttagtgccgagagtccttgccctcctgactaagcttgtggcggagttaaaagggtgcccccctccccagggcagggggactcagctggagaacgtagccctccacgcccttctgttgtgtgagggcctgttcgacccttatcaaacttggaggcgtcagcgtagcggtgaagtgatctcatccaaggagaagtcgaaatataaattccccccagccgctctgccccaagaatttagcgcgtttttccaggaatccctccagaatgcagaccacctcccacctattctgttgctaaggctaatccaccttttctgcgcagttctggccggtgggaaggaaaacggccagatggcggtttccgatggctccgtgaaaggcctgctctctgttgtcagaggctggtctcggggaccggctcccgatccctgccttgttcctttagcattagaagctctggtgggtgcagtgcatgtgctccacgctagtagggcccctccccgagggccagagctcagggccttattggaatcctacttccatgtgctgaatgcggactggccagcaggactgtcatctggcccagaggaggccctggtcactctccgcgttagtatgctggatgctattcctatgatgctggcctgtgaagatcgccctgtgcttcaagcaaccttcctgtctaataactgttttgagcacctcacccggttaatccagaactccaaggttctggatcaagacacggatgcgattgcggtacacgtggtgagggtgttaacctgcattatgagcgactctcccagtgctaaagaggtgtttaaagagagaatcggctacccgcatttgcaggaagttctccagagccacggacccccaactcacagattgctacaggagctgctgaatatggctgtggagggagaccatagcatgtgcccaccacctcccattcgtaatgaacagccggtcctggtgcttgcacaatggctgccatccttgcccaccgccgagctgcggctttttctcgcacaaagactgaggtggctctgtgatagttgccccgcatcaagagctacatgtgtccaggccggtctggtcggctgtctgctggaaacactctctacagggctggccttggaggctcgatgccaggaacagctgctggcgctgctgcaggccctcgggcgagtgtccatcaggccgatggagctaagacatctgctcagacccagaccaggccttgactcagagcccggaggggcagaggcaggcaaggcaaggcacgccggtgccgtgatccgcaccctttcaggaatggccagacatcagggtcccgctcgagccttgaggtacttcgacctgacaccctccatggccggtattatggtacctcccgtccagaggtggcctggacctggatttacatttcacgcctggctctgcctgcaccccatggatactgcccctacgccagccccacctactctcccgtccagcggtataggaggtcgatgttaccccctccgggactggagggctgaagttccgccattagcaggttag

SEQ ID NO: 232325 - DNA, 3012 bp, synthetic construct
  misc_feature 1..3012: note = Description of Artificial Sequence: Synthetic coding sequence
  source 1..3012: mol_type = other DNA
atgagccagttcgaaatggatacgtacgccaaaagtcacgacctgatgagcggtttttggaacgcctgttacgatatgcttatgtcatctggtcaacggcgacagtgggaacgggcacagtccagacgtgcttttcaggagctggtcctagagccggctcagcgccgagccagactcgaaggcctgcggtacacagccgtcctaaagcagcaggcaacccagcactccatggctttgcttcactggggcgctctctggcggcagcttgcatccccctgcggcgcttgggcattgagggacactccgatccccagatggaaattgtcctccgccgaaacatatagcagaatgagactcaaactggtgcctaaccaccacttcgatccacatctcgaggccagcgccctgagggataatctgggcgaagtgcccttgacacccaccgaggaggcttcactccctcttgcggtcacaaaggaggctaaggtgagcactccgcctgaactgctgcaggaggatcaattgggagaagatgagctggcggaattggagaccccgatggaggcagccgaactggacgagcaacgagagaagctggttctctccgccgaatgccagctcgttacagtcgtagccgtggtacctgggttattggaggtcacaacccagaatgtttacttctatgacggatctactgaacgtgtcgaaacagaggagggtatcggttatgactttcggagacccctggcacaactgcgggaagtacacctgcgcagattcaacctgcggagatcagctctcgaactctttttcattgatcaagccaactattttctcaatttcccctgtaaagtcggcacaacacctgtgagcagcccctctcagacccctcgtccccagcccggacccatccctccacatacacaagtgaggaatcaggtgtattcgtggttgttaagactgcgtcccccatctcaaggttatctgagctctcggtccccccaggagatgttacgtgcttcaggcctcacccagaagtgggtacagcgagagatatccaacttcgaatatctgatgcagctcaatactatcgccggacgaacctacaacgacctttctcagtatcccgtgtttccctgggtccttcaagattatgtgtctccaacacttgacctcagcaacccagctgtgtttcgcgatttgagcaagcctatcggagtggttaatcccaagcacgcccaactagtgagggaaaaatatgagtcttttgaggaccctgcagggaccattgataaatttcactatggaactcactattcgaatgccgcaggagtcatgcattacctgataagagtcgagcctttcacgtccctgcatgtgcagttgcagtccggcagatttgactgttctgatcggcagtttcacagtgtggccgctgcttggcaggcccgactggagtcacctgcagacgttaaagagctgattcccgagttcttttatttccccgatttcttagaaaaccagaacgggtttgacctgggatgtttacagttgaccaatgagaaggtgggcgatgtggtgctgccaccttgggcatcctcgccggaggactttatccagcagcacagacaggctcttgagagcgaatacgtgtcagcccacttacatgaatggatcgaccttatatttgggtacaagcagcgaggaccggcagctgaggaggctttgaacgttttctactattgcacgtacgagggcgctgtagatctggaccacgtgacagacgagcgcgaaagaaaagcgttagaggggattatcagtaactttggtcagacgccatgccagcttctgaaggagccacacccaaccagactctcagcagaggaagcagctcaccgcctcgctcgcctggatacgaattcaccaagtattttccagcatttagacgaactgaaagcattttttgcagaggtgacagtctctgcctctgggctgctgggaacccacagctggcttccgtatgatcggaacatctctaattacttctctttctctaaagaccctactatgggttcacacaaaacgcagagattgttgtcaggcccatgggtccctggctccggggtctccggacaggccctcgccgtggctcccgacggcaagctgctttttagcggcggacactgggatgggtcgctgcgagtgaccgccttgcctagaggtaaactgctaagccagctcagctgccatctggacgtggtcacctgtctcgcattggatacttgcggtatctacctgatctcggggagcagggatactacatgtatggtttggaggttgttacaccaagggggacttagcgtgggtctcgctcctaagccagttcaggtactgtatgggcacggggctgctgtatcttgcgtagcaatcagcactgagctagacatggctgtttctgggtctgaagatggcacggtcatcattcacacagttagaagggggcagtttgtggccgctcttcgaccactgggcgctacgttccccggtcctatcttccaccttgcgcttggctctgaaggacaaatcgtggtccaatcttccgcatgggagagacccggagctcaggttacttacagcctccacctttattcggttaacggcaaactgcgcgcaagtctacccctggccgagcagcccacagcactgacagtcacagaagactttgtgctgctgggcaccgcccagtgcgcactccatatattgcagctgaataccttgctacccgctgctcctccactgcccatgaaggtggctatacggtccgtggcggtaacaaaggaaaggagtcacgttctggtaggactcgaagatggaaaactcatagtcgtggtggctggacaaccttctgaagtgaggagttcacaattcgcaagaaagctgtggcgatcaagcagacgcatctctcaggtgtcctctggcgagacagaatacaaccctaccgaggcgagatag

SEQ ID NO: 232326 - DNA, 2094 bp, synthetic construct
  misc_feature 1..2094: note = Description of Artificial Sequence: Synthetic coding sequence
  source 1..2094: mol_type = other DNA
atgttaagggctagcggtttgactcagaagtgggtgcagagagaaatttccaacttcgagtacctgatgcagctgaataccatcgcaggtcgaacctataatgacctgagccagtaccccgtttttccatgggtcttgcaggattacgtgtctcccaccctagacctgtcaaaccccgcagtctttcgcgacttgagcaagcccataggagtggtaaatccgaagcacgcccagctcgtcagggagaagtacgagtccttcgaagaccctgccggtacaatcgacaaattccactacgggactcattactccaacgcagcaggtgtcatgcattacctcatccgggtggaacctttcacatctcttcatgtgcagctccaatccgggcgattcgactgttcagacagacagttccatagcgtagctgcagcctggcaggcacgattggaatctcccgcagacgtaaaggagttgattccagagttcttctattttcctgattttctagaaaatcagaatggcttcgacctgggctgcctgcagctcacaaacgaaaaagtaggggatgtcgtgctccccccatgggcctcgagtccagaggacttcatacaacagcaccgccaggccttagaaagtgaatacgtgtcagcccacttgcatgagtggatcgaccttatcttcggatacaaacagcggggacctgctgctgaggaagccctgaatgtgttttattactgtacttacgagggcgctgtggatctcgaccatgtcaccgacgagcgggaaaggaaggccttggagggaattatttccaatttcggacagacgccatgccaattgctaaaagagccacacccaaccagactttcagccgaagaagccgcacaccggctggccagactcgatactaactcacctagtatcttccagcatctggatgaacttaaagcctttttcgctgaggttgtctcagacggcgtgcctttagtgctcgcgttggtgcctcatcgccagcctcactcgttcatcacccagggctctcccgatctgttagtgacagtgtccgccagcggtctactaggcacacactcttggctcccttatgatcgcaacatctcgaactatttctccttttctaaagatccgaccatgggatctcataagacacagcgcctgttatccgggccttgggtgcccggtagcggagtctctggtcaggcgctggcagtggccccagatggcaagttgctttttagcgggggacactgggacgggagcctccgcgtgacagccctccccagaggaaaacttctcagccagctgagttgtcatttagacgtcgttacgtgtctggctctcgacacctgcggaatatacctcatctccggcagtcgtgataccacatgtatggtttggaggctgcttcatcagggcggactgagcgttggcctggccccaaagcccgttcaggttctctatggacacggggctgcagtcagctgtgtagcaattagcacagagctggacatggctgttagtggcagcgaggacgggacagtcatcatacacacagtcagacgcggtcagttcgtggccgcacttagacctctcggggcaacatttcccggtccaatctttcacctggcattgggttcagaggggcagattgttgttcaatcaagtgcctgggaacggccaggtgcacaggtgacttatagtttacatctctattccgttaatggcaagcttcgggcttccttgcccctcgcagaacagccaacagctctaaccgtgacagaggactttgtcctgttgggaaccgcccagtgcgccctgcatattctccagctgaataccttgcttccggcagcgccaccactccccatgaaagttgctataagaagcgtcgctgtcactaaggaacgtagccatgtgctcgtagggctcgaggatggcaaactcatcgtagtcgtggctggacaaccatcggaggtacgatcgtcccagtttgcacggaaactttggagaagttcaaggcggatctcacaggtgtcaagtggcgagactgagtacaacccaactgaagcgagatag

SEQ ID NO: 232327 - DNA, 8264 bp, synthetic construct
  misc_feature 1..8264: note = Description of Artificial Sequence: Synthetic coding sequence
  source 1..8264: mol_type = other DNA
atggcagcgtcagaaagactgtacgagctttggctgctttactacgcccaaaaggacttgggatacctccaacagtggctcaaagcatttgtaggcgcttttaaaaaaagtatttccctgtccagcctggagcccagaagaccagaggaggccggagccgaggtccctctcttgcccctggatgaactgcacgtactggcagaacaactgcaccaggccgatctcgagcaggccctgctgcttctgaaactcttcatcattctttgccgcaacctggagaacatcgaggcgggtcgaggacaggtgttggtgcctcgggtgctcgcacttctaacaaagcttgtcgccgagctcaagggttgcccccctccccaggggaggggcacacagctggaaaatgtggctttgcatgccttgctgctctgcgagggcctgttcgatccctatcagacttggcgaagacaacgcagcggcgaagtcatcagctctaaagagaaatccaaatataaatttccccctgctgctctgccccaagagttttccgcgttttttcaggagtccctgcagaatgcggatcacctgcccccaattttgttacttcggctgatacatttattctgcgctgtacttgcgggaggtaaggagaacggtcagatggccgtaagcgatggttccgtcaaagggctgttgtcagttgtcaggggctggtcacgcggacccgctcctgacccttgtctggtgcctttggccttggaggcgctggtcggcgctgtgcacgttttgcacgcctcgcgcgcaccaccgaggggtccagagctgcgcgctctgctggaatcgtatttccacgtgctaaatgctgattggcccgcaggcctcagcagtgggccagaggaagctctggtgacactgcgagtttccatgctggacgccatccccatgatgctggcctgtgaggacagacccgtgttgcaggcaaccttcctctccaataactgctttgagcacctcacccgcttgatacagaattccaagctataccttcaatccagggcgcctcccgagggcgactcagatctggccactcgcctgctcacagagcctgacgtacagaaagtgctcgatcaggatactgatgccattgctgtgcatgttgtaagggtgctgacgtgtataatgagtgactccccctcagcaaaagaggtgttcaaggagcggataggctatccacatctacaagaagtgcttcagtcccacggccctcccacccaccggctgctacaggaactcctgaatatggccgtcgagggggaccatagcatgtgtcctccccctccgatccggaacgaacagcctgttttagtactggctcagtggctgccatctctcccgactgccgagctcaggctgttcctggctcagaggcttcgatggctgtgcgactcgtgtcccgcttcgagagcgacatgcgtccaagcgggactcgttggctgcctgcttgagacactgtccacaggactggcccttgaggctaggtgtcaggagcagctgctcgcgctgctacaggcgcttgggcgtgtgtcgatacggccaatggaacttaggcacctacttaggcccagacctggactggattcagagccagggggtgctgaagccggtaaggcacggcacgcaggagcagtgatcagaacactgtcagggatggccagacaccaaggaccggcacgcgctttaaggtatttcgaccttaccccttctatggccggaattatggtccccccagtacagcgatggccaggaccaggattcacattccacgcttggctgtgtctgcatcccatggacacggcccctaccccggcacccacccgtcccctccagcgcaagcagctctattccttttttaccagcagtggcagcggttttgaagccttcttcacggccgctggcactttagttgtcgctgtctgcactcggaaggaatatctcaccatgagtctgccagaggtatccttcgcggacagcgcctggcactgcgttgcaattgtccacgtcccaggacgcagaccattctcgcagaacctagttcacgtgtataaggacggacacctagtgaaaaccgcgcctctgcggtgcccttctttatctgagcccttctcgagctgctgcattggaagcgccggatataggacgaccaccacaaccaccggcctgcccacgcctccggtccctgccacactggcgtacacgcaccctgctctcactcgcagccagtccgtccctgcaagcactggccttggttgggggagtgggttggtcgcccctctgcaggagggttcaatcgattctaccttagccggaacacaggacaccaggtggggaagccccacctcgttggagggcgagctcggtgccgtagccatttttcacgaagccttgcaggccaccgccctccggacactgtgtacactgggccctaacgaaaccgctccgttcaagcccgagggggagctccacgagctttctacaaggctcctgttacactacagcccccaagcttgcaagaataatatatgcctagacctgtcgccgagccatggcctagatggtagattgactggccaccgggttgagacatgggatgtgaaggacgtggtcaattgtgtgggcggtatgggtgcactgcttcccttgcttgaacgcgttgccgcacagcctaaggaagccgaggcgggtccggcagagactcacgacttggtgggtccggagttgactagtggtcacaatacccagggcctggtgcttcccttggggaagagttccgaggaaagaatggagagaaacgcagtcgccgcattccttctaatgctgaggaacttccttcagggccacatggtgaaccaagagtcactggtgcagtgccaggggcctgcaattattggggcacttctaagaaaggtgccatcctgggccatggacatgaacgtactgatgagcgcccagttgcttatggagcaggtcgcagcagagggaagtgggcctctgctctatcttctctatcaacacttgctctttaactttcatttgtggaccttatctgattttgccgtcaggctcggacatatccagtacatgtccagcatcgtgcgggagcaccggcagaaactcagaaagaagtatggcgtgcagttcatcctggacgctctacgcacccattacagcccacagcgcgaaagacccctggccgcagacgatcttcggaccgtacagacatctctcctggggcttgctcgagaattcttggtgcgctccttatctgccgacgacgtacaagtgacacagactatgttgtctttcttggccgctaccggcgacgacggacaagcagttggggctctggacctgctccttgcccttctgcatgggtccttggtgcaagaatcgctggctgtcttcctcctggagcccggtaaccttgaggtcctgctggcactgctggtgaggcccggatccctgcccttactaccagacagagtatgcaaaatcctgcggagactgcagcagaatgaacgtcttcccgaacggagcagacagcggctgaggctgcgggagtgcggcctacaaggactggtggcctgtctgccggagggcacagtttcccctcagctttgtcagggcttgtacaagttgttcttaggggctgattgtctgaacctttccgacttactagcggtggtgcaactatccctgcaagcagatctgagtgtcagattagatatatgtagacagctgttccatctcatctacggacagcccgatgttgtaagactcttggctcgacaggcgggatggcaggatgtcttgacaaggctgtacgttcttgaggccgcaacggcaggctccccccctccctcatccccagagtcgccaacctctcctaaaccagcccctcccaagccaccaacagaaagcccagcagaaccttccgatgtgtttctgccatccgaggccccttgtcccgacccggatggtttctaccacgctttgtcccctttttgtacaccattcgacttgggattggagcgatcctccgtaggctctgggaatacggccggtggtgggggtagcagtggtacactaactccagctagtcaaccagggacaccgtctcccctcgacggtcctaggcccttccccgcagccccagggaggcactcgtcatctttgagcaacgtgttagaagacgggagccttccagaacccacgatctctggagacgatacatccaacacatcaaatccacagcagacgtccgaagaagagctttgtaacctgcttaccaacgtcctgttttctgttacttggaggggcgtggagggctccgacgaggcagcatggagggaacggggtcaggtgttttctgtgctgacccagctgggcgcttcagccacattggttagaccgccagactgcatcaaaaggtcgctcctggagatgatgttagaaagtgcactgacagacattaaggaagctccagtaggggtcctcgctagcctcactcaacaggccctctggctgctgaggctgctgcaagacttcttgtgcgcggaagggcacggtaaccaggaactgtggtctgagaagctcttcgagggggtgtgctccctgctcgacaggctgggcgcatggcctcacctcgctaatggcactgctgacctgagagagatggcccaaattggcttgaggttagtgctgggttacattctccttgaagatccccaactgcacgcccaggcctatgttaggctccacatgctgctgcagaccgcagtccctgccagaagagaagaggcatgctatgtgctgtcaaaacttgaggccgctttgggcagagtgctcaatacctcgtccttagaatcagccacagacgaggctgggtcccctctcgctgccgcagccgcagcagctgcagcagagcgctgcagctggctagtgcccctagtgcggacactcctggatcgggcatatgaacccctcgggcttcagtggggtctgcctagtctgccgcctacaaacggcagcccaacttttttcgaggattttcaggctttctgtgcgactccggagtggcgtcacttcattgacaagcaagtccagccaaccatgtcccaattcgaaatggacacatatgccaaaagtcatgacctgatgtcagggttttggaatgcctgctatgatatgctgatgagctctgggcagcgcaggcagtgggagcgagcacagtcacggagagcgttccaggagttggtgttggagccagcacaaaggcgcgcacgcttggagggactgcgctacactgcggtattgaagcagcaggcaacccagcacagcatggcgctcctccactggggcgctctttggagacagttagcctccccgtgcggcgcttgggccctccgagataccccgataccacggtggaaactgtccagcgccgaaacctactccaggatgaggctgaagttggtgcctaatcaccacttcgacccccatctcgaagcctcagcgctcagggacaatctgggggaagtgccacttacgccaacggaggaggctagtctccccctagctgtcactaaagaggccaaggtttccaccccccctgagttgctgcaggaagaccaactcggagaagatgaattggccgaactggaaaccccaatggaggcagctgagctggacgagcagagggagaaattggtgctgtccgccgagtgccagcttgtgaccgtcgtcgctgtggttcctggccttctggaagtgactacccaaaatgtttatttttacgatgggagtacagaacgcgtagaaacagaggaggggatcggatacgattttcggaggcccctggcccagctgcgtgaggttcacctgaggcgcttcaacctgcgtaggtccgcgctggagctcttttttatcgatcaggcaaattattttctgaacttcccctgcaaagtcggcaccacgcccgtgtccagcccctcacagactcccaggccacaacctggaccgatccccccacacacccaagtgagaaatcaggtgtacagttggcttcttaggttgagacctcccagtcagggctacctttctagtagatctccccaggagatgctccgcgcttctggacttactcaaaaatgggtgcagcgcgagatctcgaactttgagtacctaatgcagttaaacactatagccggtaggacatacaacgacctgagtcaataccccgtgttcccctgggtcctgcaagactatgtgagcccgacactggatctttccaatcccgcagtgttcagagatctctccaaacccattggcgtcgtcaaccccaaacacgcccaactcgtacgagagaagtatgaatcttttgaggacccggcaggcacaattgataagttccactatggtactcactatagtaacgccgcaggcgtgatgcattacctaatcagagtcgagccctttacttccttgcacgtgcagctgcagagtggtcggttcgactgtagcgataggcagttccacagcgtggcagcagcctggcaggccagactggagtctcccgcagacgtgaaggaactgatccctgaatttttctacttcccagattttctggaaaaccagaatggatttgatttaggatgtctccagctgaccaacgagaaggtaggagacgttgtcctgccaccatgggcttcgtcccccgaggatttcatccaacagcatcgacaggctctggagtccgaatatgtcagtgctcaccttcatgaatggatagatttaatttttggttataaacagaggggtccagccgcagaagaggcgcttaacgtgttttactattgcacttatgagggtgcagttgatcttgatcatgtcacagatgaaagggaacggaaggccctggagggcattatctctaacttcggtcagaccccctgccaattactaaaagaacctcaccccacccgtttgagcgcagaggaggctgcacacaggctggcaagactggatactaatagcccttcaatcttccagcacctggatgagctaaaggcctttttcgccgaggttgtgagcgacggagtccctctggtgttggcactggtcccgcacaggcagccccattcatttataacccagggaagccctgacctcctcgtcaccgtcagcgccagtggactgctcggcactcacagttggttaccctacgatagaaacattagtaattactttagtttctcaaaagatcctaccatgggatctcacaagacacaaagactgctatctggcccttgggtacctggcagtggggtgagtggccaggcactggccgtagcgccagacggaaaactcctcttcagcggaggtcactgggacggatctctgagggtcaccgctttgccgcgaggcaaactactgtctcagcttagctgccatctggacgttgtgacctgtctagccctggatacatgcgggatttacctaatctctggatcccgcgatacaacctgcatggtttggagattattgcaccagggagggcttagcgtggggctggcccctaagcccgttcaggtcctgtatgggcacggcgcagccgtgtcgtgcgtggccattagtactgagctggacatggccgtctcaggctcagaggatggcaccgtgatcatccataccgtccgaaggggccaattcgtagccgcactgcgccctctcggggcaactttccctggtccgatctttcacctggcccttggaagcgagggacagatcgtggtgcaatcaagtgcatgggaaagacccggtgctcaggttacatatagccttcacttgtactctgtgaacgggaagctgcgcgcttctcttcccctggccgagcagccaaccgcgttaaccgtgaccgaagacttcgtgttgcttgggaccgcccaatgcgccctgcatattttgcagctgaatacactacttcctgcggcaccaccactgcccatgaaagtggcgatcagatcagttgctgtcacgaaggagaggtcccatgtgctagtaggtctcgaagatggcaaactcatcgtagtagtcgccggacaaccctcagaggtgcggagcagtcagttcgctaggaaattatggaggtccagtaggaggatatcccaggtcagcagtggtgagactgagtacaatcccactgaggcgaggta

SEQ ID NO: 232328 - DNA, 7116 bp, synthetic construct
  misc_feature 1..7116: note = Description of Artificial Sequence: Synthetic coding sequence
  source 1..7116: mol_type = other DNA
atggccgcaccagagagtggcccagccctgagtcctggcacggccgagggagaagaagagaccatcctatatgatctcctcgttaatactgagtggccccctgagactgaggtacagccgcgaggtaatcagaaacacggggcaagttttataattacgaaagccattagagatagacttctctttctgaggcaatacatttggtatagtcctgctcctttcctgctgccagatggcctggtgaggctggttaataaacaaatcaattggcacctggtgctcgcgtcaaacggcaaactgctggcagccgtacaagaccagtgtgtggagatccgttctgccaaggacgacttcacgtctatcataggaaagtgccaggtaccaaaggacccaaaaccccagtggcgacgagtggcatggtcttatgattgcaccctcctggcatacgcagaatccactggaactgtgcgcgtcttcgatctaatgggctctgagctttttgttatctcacccgcatcctcctttatcggcgacctctcctatgcgatagcagggctgatcttcctcgaatacaaggcctcagcgcagtggtccgcagagctacttgttattaactatcgaggagagctgcgaagttatcttgtttctgtcggcaccaaccagtcttatcaggaatcgcactgtttttccttttcctctcattaccctcacgggatcaacaccgccatttatcacccaggacaccgcctgctgttggttggaggttgtgagaccgcggaggtggggatgtcaaaggcaagtagctgtgggctgtctgcatggagagttctatcaggctccccctattacaaacaagtgactaacgggggagatggagtcactgccgttcctaaaaccctcggattactgcggatgctttccgtgaagttctacagccgacagggtcaggagcaggacgggatcttcaaaatgtctttaagccctgatggcatgctgctggcggctatccacttcagtggaaagctatctatctgggcaattccatcccttaaacagcagggtgagtggggccagaatgagcaacctggctatgacgatctgaaccccgactggaggttgtccaccgagaagcggaaaaaaattaaggacaaagagagtttctatccactaatcgacgtaaattggtgggccgactcagcggtaactttggcccgatgctctggcgctttgactgtgagcagtgtgaaaacgctaaagaacctcctgggcaaaagctgtgaatggttcgaacccagcccccaggtgactgccacacacgatggcggattcttgtcgcttgagtgtgagatcaagctagctccaaagcggtcgaggctcgaaaccagggctggggaggaggacgaaggggaagaggatagcgattctgattacgaaatctcagccaaggcccgatattttggatatattaaacagggcctgtatctggtcaccgagatggagcgttttgctcctccacgtaaacgccctagaaccattacaaagaattacagattggtctccctgcgctccacaacaccagaagagctgtatcagcgaaagatcgagagcgaagagtatgaggaggccctctctctggcgcatacatatggtctcgataccgacctggtgtaccaacgacagtggcggaaatccgctgtgaatgtggcctcaatccagaattaccttagcaaaatcaaaaaaagatcttgggtcctgcacgagtgcctggagcgtgtgccagagaacgtggacgctgccaaagagctgttacagtatgggctcaagggaacagacttggaggcactcctggccatcggcaagggtgccgacgatggacggttcaccctgcctggcgagattgatatcgattcaattagttacgaagagttgtctccgcctgatgaagaaccagccaagaataagaaggaaaaagaattaaagaagaggcaggagctgctgaaacttgttaacttttcaaaacttactttggagcagaaagagctttgcagatgccgtcgcaagttgctgacctacttggaccgcctcgctacttacgaggagattctgggggtacctcatgcatcggaacagagatatgacgcagagttctttaaaaagttcagaaaccagaacatcgtactgtcggccagaacatacgcgcaagagagtaacgtgcaagccctggagatcctgttcacataccatggcagtgatcttcttccacacaggcttgctatactttctaacttccctgagaccacctcaccccatgagtactcagtgctcttgccagaggcttgtttcaacggggattcccttatgattatcccttggcacgaacataagcacagagccaaagactggtgcgaggagctggcttgccggatggtagtcgagcccaatctgcaggacgagagcgagtttctttacgcagcccaacctgagttacttcggttccgaatgactcaactgaccgtcgagaaggtgatggattggtatcaaactcgggctgaagagattgagcactatgcacggcaagtggactgtgctctcagtctcatcagactcgggatggagcggaacatccctggtttgctggtactgtgtgataatttagtgacactggagactctggtgtacgaagcacgctgcgatgtgaccttgaccctcaaagagctgcagcagatgaaggatatcgagaagttgagactcctaatgaattcctgttcagaggataagtacgtgacctctgcgtatcaatggatggtgcctttcctgcatagatgtgaaaagcaatctcccggtgtggctaatgaattactgaaggagtacctggttactctggccaagggggacctcaaatttccactgaagatcttccagcactccaagcccgatctgcagcagaaaatcataccagaccaagaccaactgatggctatcgccctggagtgtatatacacctgtgagcgcaacgatcagctctgcttatgctatgacctgcttgagtgcctacctgaacgcggttatggggacaagaccgaggccacaactaaactccacgatatggtggatcagctcgagcagatcctcagcgtgtctgagctgcttgagaagcacggtctcgagaagcccatcagcttcgtgaagaatacacagtcatcctccgaagaagcccgaaaactgatggtgcgacttacccggcacaccggcagaaaacaacccccagtgtctgagagccactggaggacactgttacaagacatgctgaccatgcagcagaatgtctatacttgcctggattctgatgcgtgctatgagatcttcacggaaagcctactctgttcttctcgtctggagaacattcatctcgctggtcagatgatgcattgttccgcctgtagtgaaaatccacccgctggcattgcccacaagggtaaaccacactaccgcgtctcctacgaaaagagcatcgacctggttctcgcagccagtcgcgaatactttaacagcagcactaacttgactgactcatgcatggatctggctagatgctgtttgcaactaattaccgatcgaccgcctgctattcaggaggaactggacctgattcaggccgtgggttgtctggaggagtttggagtcaaaatcctgcctctgcaggtgaggctttgccccgacagaatctctctaattaaagagtgcatctctcagagccctacatgttacaaacaatcgacaaagctcctgggcctggcggaattgctgcgggttgccggagagaatcccgaagagcggagaggccaggtgctgatcctcttggtggaacaggcccttcgcttccacgactataaagctgcctccatgcattgccaagagctcatggcgactgggtatcccaaaagctgggatgtgtgttcccaactgggacagtcggagggataccaggacctagccacaaggcaggaactcatggcattcgcactgacacattgccccccatcttctatcgaacttctgctcgccgcaagctcgagcctccagaccgagatcctgtatcagagagtgaattttcagatacaccacgaaggaggggagaatatttccgcctctccactcacgtcaaaagccgtccaggaggatgaggttggggtcccaggctccaactctgcggatcttctaaggtggaccaccgccactactatgaaggtgttgtctaataccactacaacaaccaaggctgtgctgcaggccgtatccgatggccagtggtggaagaagtcccttacttacctgcggccactccagggtcagaagtgcggtggtgcctatcaaatcgggactaccgctaacgaggatctagagaaacaggggtgtcatcctttttatgaatctgttatttcaaatccttttgtggctgagtctgagggcacctatgatacatatcagcacgtcccagtggagtcctttgctgaggtacttctgcggacgggcaaattagcagaggcaaagaacaagggagaggtttttcccacaactgaggtactgctgcaattggcctcggaggccctgccgaatgatatgaccctggcattggcttatcttctggcgttaccccaggtgttagatgccaataggtgttttgagaagcaaagcccttccgccctgtcactccagttggctgcctactactattccttgcagatttatgcccgacttgcaccgtgttttcgggataagtgccaccccctttacagagctgacccaaaggaattgatcaaaatggtgaccaggcatgtaacaaggcatgaacatgaggcttggccagaggatctgatctccctcacaaaacagctccattgttataacgagagacttctggacttcactcaggcccagattctgcaggggctcaggaaaggtgtggacgttcagcgattcaccgccgacgaccagtataagagggagacaattctcgggcttgctgagacccttgaagagtctgtatacagcattgccatctctctcgctcaaagatactcagtgagccggtgggaggtcttcatgacgcacctagagtttctattcacagatagcggcctgtcaacgctggagatagagaatcgcgcacaggacctacatctgtttgagacattaaaaacggaccctgaagcctttcaccagcacatggtcaagtatatctaccctactattggcggatttgaccacgagcgtctgcagtactactttactttacttgagaactgcggttgcgccgacctgggtaattgcgccatcaagccagagacacatatcagactactgaaaaaattcaaggttgtggccagcggtcttaactataagaaacttactgacgagaacatgagccccttagaagcattggaacctgttctgagttcacagaacatacttagtataagtaagctggttccgaagattcccgaaaaagatggccaaatgcttagcccgtcctcgctttacacgatctggctgcagaagctcttttggacgggggatcctcacctgatcaagcaagtcccgggatcatcccccgagtggcttcacgcctatgacgtatgtatgaagtactttgacagactgcacccaggcgacctgattaccgtggtcgatgccgtgacattcagccccaaagccgtaaccaaactgtcagtggaagccagaaaagagatgacaagaaaggcaatcaagaccgtcaagcactttattgagaagcccagaaaaaggaatagtgaagatgaagcccaggaggcaaaggactctaaggttacctacgctgatacactcaaccacctcgaaaaatctcttgcccacttggagacactctcccactcctttattttatcactcaagaactcagaacaagaaaccctacagaagtattcccacttgtatgatctgtcacggtctgagaaggaaaagctgcatgatgaggccgtcgccatctgtctggacgggcaacccctcgccatgatccagcaactcctcgaggtcgccgtgggccctttagacattagccctaaagacatagtccagagtgcgatcatgaagattatcagcgccttgtcaggtggcagcgctgacttggggggaccaagggatcccctgaaggtcctcgagggcgtggtggccgcagtccatgcctcagtggataaaggagaggaactcgttagccctgaggacttgcttgaatggttgcgtccattttgtgccgacgatgcttggccggtgcggcctagaatccacgtattgcaaattctggggcaaagttttcatctgaccgaagaggatagtaagcttctagtatttttcaggaccgaggccattctaaaggccagttggccacagaggcaggtagatattgccgatatcgagaatgaagaaaatcgctattgtctgttcatggagttgctggaaagcagccatcatgaggcagagttccaacaccttgttctgttgcttcaggcttggcctcccatgaaatctgaatacgtcattactaataatccctgggtgcgattagcgacagttatgctgactaggtgtacaatggagaataaagaaggtcttggaaacgaggtgctgaagatgtgcaggagtctctacaatactaaacagatgctccccgcagagggcgtgaaggaattatgcctcctcctattgaaccagtcactccttctccctagccttaagctcctcctggagtcacgcgatgagcatctgcacgagatggcgctcgagcaaattaccgccgtaacgactgtgaatgattctaattgcgatcaggagctccttagcctgcttctggatgctaaacttctggtgaaatgcgtgtcaacccccttctatccacgcatagtggatcatttgctggcaagcctgcagcaaggtagatgggatgcagaggagttgggacgccatctacgggaggctggacacgaggcagaagcaggaagtctactgctcgcagttcgcggtacccatcaggcctttagaaccttctctacagctctgcgggctgcacaacattgggtctag

SEQ ID NO: 232329 - DNA, 6755 bp, synthetic construct
  misc_feature 1..6755: note = Description of Artificial Sequence: Synthetic coding sequence
  source 1..6755: mol_type = other DNA
atggctgcacccgagagtggcccagccttgtccccagggacggccgaaggcgaagaagagaccatcctgtatgatctgctcgtaaacaccgaatggcccccagagaccgaagtccagcccagggggaaccaaaagcacggagcgtccttcattatcaccaaagcaatccgggataggctgttatttctcagacagtatatctggtactctccagcgccattcctgcttcccgatgggttggtgcgccttgttaataaacagatcaactggcatttggtgctcgcctccaacggaaaattgttggctgccgttcaagaccaatgcgtggaaattagaagcgccaaggacgactttacctcaattataggcaaatgtcaggtacccaaggaccccaaaccacagtggagaagggttgcttggagctatgattgcacgctgttggcttacgctgaaagcactgggaccgttcgtgtttttgatctaatgggctccgaattgttcgtcatctctcccgctagcagcttcattggagacttgagttacgccatcgcaggcctcatctttctcgaatacaaagccagcgctcagtggtccgcagaactgctcgtgataaactatcgtggcgagttgagatcttacctagtgagtgtcggtaccaatcagagttatcaggagagtcactgtttttccttcagttcccactatccgcatggcatcaatacagccatttaccatcccggacatcgccttctcctggtcggtggctgcgaaaccgcagaagtgggcatgagcaaagcttcatcctgtggtctatccgcatggcgggtgctctcaggttccccctactataagcaggtgaccaatgggggtgacggggtcactgctgtgccaaaaacactgggcctactcaggatgctgtcggtaaagttttactcccgccagggacaagaacaggatggaatctttaagatgtccctgtctccagacggcatgctgcttgcggctatacattttagcggaaaactgtcaatctgggctattccctctctgaagcagcagggggagtggggtcagaatgaacagccgggatacgatgacctcaacccagactggaggttatccactgaaaaaaggaaaaaaataaaggataaggagtccttctatccgctaattgatgttaactggtgggcggattccgctgtgaccctggctagatgttccggagctctgacagtctcaagcgtgaaaaccctgaaaaatctgctgggcaagtcttgtgaatggttcgaaccctccccccaggtgaccgccactcatgacgggggtttcctgtccctcgaatgtgagattaaattggctcccaagcgatcacggctggagactagggctggggaagaggacgagggtgaggaagatagcgactctgactatgagatatccgccaaggcacgctacttcggatatattaaacaggggttgtacttagtaactgagatggaaaggttcgctccaccgaggaaacgcccacggaccattacgaaaaactacagattggtgtccttgcggtccacgacacccgaagaactgtatcagaggaagattgagagcgaagagtatgaagaggcattgagtctcgctcacacctacggcctcgatacagacctggtataccaacggcaatggcgtaagtctgccgtcaatgtcgcgagcattcagaactacctttcaaagatcaaaaagcgtagttgggttttgcacgagtgcctggaacgcgtgccagagaacgttgacgcggcaaaggaactgctacagtacggcctaaaggggaccgacttggaggccctgttagccattggaaagggcgcagacgatggacggttcacactccccggtgaaatagacattgatagtatctcttatgaagagctctcaccgcctgatgaagagcctgccaagaataaaaaagagaaagagttaaaaaaaaggcaggagctattgaagctcgtgaacttctcaaagctgacattggaacaaaaagagttgtgccgctgtcgacggaaactgctcacttacctggaccgactggcgacctacgaggagattctgggagtcccacacgccagcgagcagcggtatgacgccgagttcttcaaaaagtttaggaaccagaacatcgtcctgtctgcaagaacttatgcccaggagtcaaacgtgcaggccctcgagattctgttcacataccacggatccgacctactgccccacagacttgccatccttagtaatttcccagaaactactagtcctcatgagtatagtgtcctgctgcccgaggcctgcttcaacggcgacagcttgatgattatcccttggcatgaacacaaacacagggcaaaggattggtgtgaggagctggcttgtagaatggtagtagaacccaatttacaggacgaatctgagttcctgtacgctgcccagcctgagctgctacggttccgaatgacgcagctgaccgtcgagaaggtaatggattggtatcagacacgagcagaagaaattgaacattacgctagacagctgcagcagaaaatcattccagaccaggatcagcttatggccatcgccctagagtgtatatacacgtgcgagagaaacgatcagctgtgcttgtgctatgatctgctcgaatgtctgccagaaagagggtacggcgacaaaaccgaggctaccaccaagctccacgatatggtggatcagctggaacagatactgtctgtcagcgaactgctagagaaacacggcctcgagaagccaatttccttcgtcaagaacacacaaagttcatccgaagaagcgcgaaagctaatggtccgcctgactagacacactggaaggaagcagccaccagtttccgaatctcattggaggacactgttgcaggatatgctgactatgcagcagaacgtctatacttgccttgatagtgatgcgtgttatgagatattcacggagtcactgctctgttcatcccggttggagaatattcatcttgccggacagatgatgcattgttccgcctgttcagagaatcctccagcaggcatcgcgcacaaggggaaacctcattatagggtgtcctacgaaaagtccatcgacctagttttagctgcatcccgggaatatttcaactcctccactaatttgacggattcttgcatggacctggcacgttgctgcctgcagttgatcacggatcgaccccctgctatccaggaggaattggatctgattcaagctgtagggtgtctggaagaatttggagttaagattctgcccttacaagttcgcttatgtccagatagaatctctctcattaaagagtgcatcagccagagtcccacctgctacaagcagtccaccaagcttttgggactcgcggaattgctgcgggtggccggtgagaatcccgaggagcgacggggtcaagtgctgatattactggttgagcaggctcttcggtttcacgattataaggccgcttcgatgcattgtcaggagcttatggccaccggttaccctaaatcgtgggacgtttgctctcaactgggccaatccgagggttaccaggatctcgccactcgtcaggagctcatggccttcgctctcacccattgtccaccaagcagcattgaattgctcctggctgcatctagcagcctccagactgaaatcctctaccagagggtcaactttcagatacaccacgaaggcggtgagaatatatctgcaagtccccttacttccaaagcagtgcaggaagatgaggtgggagtacccggttcaaacagcgccgacctccttagatggaccacagctacgactatgaaggtgctgagcaataccactacaacgacaaaggccgtcctgcaggcagtttcggatggacaatggtggaagaagtcgctgacatacctcagaccactgcagggccaaaagtgtggcggtgcctaccagatcggaactaccgccaatgaagaccttgagaaacagggatgccacccattttacgagtctgtcatcagcaatcctttcgttgccgagagcgaggggacatatgatacttatcaacacgtgccagttgaatctttcgccgaggttttgcttcggactgggaaactggctgaggcaaaaaataagggcgaagtgtttcccactacagaggtgctcctacaattggcgtccgaggctcttcccaacgacatgaccctggcactagcttacctcctggctctcccacaagtccttgacgctaatcgatgcttcgagaagcagtccccctcagccctgagcctgcagctggccgcttattactacagtctacagatttacgctcgcttagctccctgtttccgtgacaagtgccacccactctatcgggcagatcctaaagagctgattaagatggttaccaggcatgtgacccgtcacgaacatgaggcttggcctgaggatctcatctcattgactaaacagctgcactgctataatgaaaggctgcttgacttcactcaggcgcagatactgcagggactgagaaagggggtggacgtccaaagattcacagcagacgatcagtacaaacgagagactatcctcggcttggccgagaccctggaggaaagcgtatactccattgccattagcctcgcgcaaagatattcagtgtccagatgggaggtattcatgacgcacctagagtttttgtttaccgattcaggcctctctactttagagatagagaaccgggctcaggatctgcatctgtttgaaacactcaagaccgaccccgaagcatttcatcaacacatggtgaagtatatttacccaaccataggaggcttcgatcacgaaagacttcagtattacttcacactcctggagaattgcggctgtgccgacctgggaaactgtgccatcaagcctgaaacccacatcaggttgctgaaaaagttcaaagttgtggcctccggactgaattacaagaaacttacagatgaaaatatgtcacctctggaagcattggagccagtgctgtcttcacagaacatactctcaattagcaaactcgtacctaaaatccctgagaaggacggacagatgctgtcaccatccagcctgtatacaatctggctgcaaaaactgttctggacaggcgacccccaccttatcaagcaagtcccaggctcctccccagaatggcttcacgcttacgacgtgtgtatgaagtacttcgatcgattacatcccggagacctgatcacagtagttgatgccgtgacatttagtcccaaggctgtgacaaaattgagtgtggaagccaggaaggaaatgaccaggaaggcaatcaagacggttaagcacttcatcgaaaaaccaagaaaacggaattctgaggacgaggcccaagaggccaaggacagtaaggtgacatatgctgatactctgaaccacttggagaaatctttggctcatctggagaccttaagccacagttttattctgagtctgaagaattctgaacaggaaaccctgcaaaagtattcccatctgtacgacctgagccgcagcgagaaggagaaactgcatgacgaggctgtggccatttgtctggatggccagcccctcgcgatgatccagcaactactggaggtggctgtgggtcctctggacattagcccaaaagacatcgtccaatcagccatcatgaagattatatcggctttgtctgggggtagtgccgacctgggagggcctcgggatccactgaaagttcttgagggcgtggtggccgcagtgcatgcctcagtggataagggggaggagctggtcagccccgaagatctcctggaatggctccggccattttgtgccgacgatgcatggcctgttcggcctagaattcacgtgttgcagattcttggccagtcattccacctaaccgaggaggactccaaactgctggtgtttttcagaacagaagcgatactcaaagctagttggccacagaggcaggtggacattgctgacatcgaaaatgaagaaaatagatattgcctgttcatggaactgctcgagtcttctcatcatgaggccgaatttcagcacctggtactcctgcttcaagcctggccccctatgaaatcagagtacgtgatcactaataacccatgggtacggctagccactgtgatgttgacccgctgcactatggaaaataaggaaggacttgggaacgaagtgttgaagatgtgtagaagtctctataacactaaacagatgttgcccgctgaaggggtaaaggagttgtgtctgcttctgctcaatcagagcctgttgcttccctccctcaaattgctcttggagagccgtgacgaacacttgcatgaaatggccttggaacagattactgcagtgacgaccgtcaatgactcaaattgcgaccaggaactcctctccttactcctagacgcaaagttactggtgaaatgcgtgtctactcctttctaccctaggatcgtcgaccatctgttggcatctcttcagcaaggaagatgggatgccgaagagttgggccgacatctccgcgaagccggtcatgaggcagaggctggctccctgttgctggccgtccgcggaacccatcaggcctttcgtactttttccaccgctctccgtgcagcccagcactgggttta

SEQ ID NO: 232330 - DNA, 10662 bp, synthetic construct
  misc_feature 1..10662: note = Description of Artificial Sequence: Synthetic coding sequence
  source 1..10662: mol_type = other DNA
atggtcgtaagtgcaggcccttggagctctgaaaaggctgagatgaacattcttgagatcaatgagacccttcgaccccagctcgccgagaagaagcagcaattccggaaccttaaggagaaatgtttcctcacgcagcttgcgggatttctggcaaataggcagaagaagtacaagtacgaagaatgtaaggacttaattaagtttatgttaaggaatgaaagacaattcaaggaagagaaactcgccgaacaactaaaacaggccgaggagttgcgtcagtacaaagtcctggtccacagccaggaacgtgaactcacccaattacgagaaaagctacgcgaaggtcgcgatgccagccggtcactatatgagcatctgcaggcattgctgacccctgacgagcctgataagtcccaaggccaagatctgcaagaacaattagcagaggggtgtcgtctggcgcaacatcttgtgcagaagctctcaccggagaatgacgaagacgaagacgaggacgtgcaggttgaggaagccgagaaagtcctggaatcctctgctccaagggaggtgcagaaagccgaagagagtaaagttcctgaagattccctcgaggagtgtgctatcacctgtagtaatagccacggtccttgcgatagcaatcagcctcataagaacattaagatcacctttgaggaggacgaagtaaattctacacttgtagtggatcgcgagagctcacacgatgaatgtcaagacgcgctaaacatcctgcctgtgcctggcccaaccagttccgctactaatgtgtctatggtggtctcagcgggtcccctcagcagcgagaaggcggagatgaatatcctcgaaataaacgagaaactacggcctcagttggcagaaaagaagcagcagttcagaaatctgaaggagaaatgttttctaacccagctgtccggatttttggctaaccagcagaagaagtataagtatgaggagtgcaaagaccttattaagtttatgctaagaaatgagaggcaatttaaggaggagaaattggctgagcagctcaaacaggctgaggaactgcgtcagtataaggtcctggtgcacgcacaagaacgggagcttactcaactgaaggagaagctgcgcgaagggagagatgcaagtcgaagtctgaacgagcacctccaggcgctgctcacaccttatgagcccgacaagtctcagggccaggacctgcaagagcaactggccgaggggtgcaggttggcccagcaccttgtgcagaaactttcccccgaaaacgataatgacgacgacgaggatgtacaggtcgaggttgcagagaaagtgcaaaagtcatctgcaccgagggaaatgcagaaagctgaggagaaggaggtcccagaggattctttggaggaatgtgctatcacatactccaacagccatggttcatatgatagtaaccaaccacacagaaagactaagattaccttcgaagaagataaagtggatagcactttgatcggctcatcatctcacgtagagtgggaagatgctgtgcacattatcccagaaaatgaatctgacgacgaagaggaggaagagaaaggccctgtgtctcctagaaacctgcaggaaagcgaggaggaagaagtgccacaggaatcttgggatgaaggttactccaccctgagcatacccccagagatgttagcaagctatcagagctatagcagtaccttccattcactggaggagcagcaggtctgcatggctgttgacattggcaggcacagatgggatcaggtgaaaaaggaagatcaagaggccacggggccaaggctatcgcgggagcttcttgacgagaaagaacctgaggtgctccaggactcactggacagatgctatagcactccttctggatatctggagttgcctgaccttgggcagccttactccagtgcggtctattctctagaggagcaatatttggggctcgcattggacgttgataggataaagaaagatcaggaagaggaggaggatcaaggcccaccgtgccctcgcttgtcaagggagctgctggaagtggtagaaccggaggttctccaggatagtctggatagatgctattctactccaagcagctgtctggagcagcccgactcctgtcagccgtatggtagttctttttacgcgctcgaggagaaacacgtggggttctctttagatgtcggtgagatcgagaagaaaggtaaaggcaagaaacgaagggggaggcgctccaagaaagaacgtcgtcgtggtaggaaggaaggcgaggaggaccagaacccaccatgtccccgtctgagcagggaactgttggacgaaaaaggcccagaggtactgcaggatagtttagataggtgctattcgacaccttctgggtgcttagaactgacggatagctgccagccatataggagtgctttttacgtactggaacaacagagggtaggttttgccgtggatatggatgaaatcgaaaagtaccaagaagtggaggaggaccaggatccctcttgccctcgtctatcacgggagttattagacgagaaggaaccagaggttctgcaggacagcctggataggtgttactccacaccttccgggtacctggagcttccagatcttgggcaaccatattctagcgctgtgtattccctagaggagcagtatctcggccttgcactcgacgtggatcggattaagaaggaccaagaggaggaggaggatcagggcccaccttgtcccaggctcagccgtgagctcctggaagttgtggagcctgaggtcctccaggattccctggatagatgctactccactccctcatcctgtctggaacagcccgattcctgccagccctatggctcttctttttatgccctggaggagaagcacgtggggttctcgctcgacgtgggagaaattgagaagaagggcaagggaaagaaacgtagggggaggagaagtaaaaaggagcgccgtcggggtcggaaggaaggggaagaggatcaaaaccctccttgtcctagactctctcgagaacttttggacgagaaaggacccgaagtgctgcaggatagcctggaccgatgttacagtacaccatccggctgcctcgaactgaccgacagctgtcagccctatcgaagcgcgttttatgtgctggagcagcagcgagttggcttcgccgtggacatggatgaaattgagaagtaccaggaggtagaggaggatcaagacccttcttgtccaagactgagcagagagctcctggatgaaaaagaacccgaggtcctgcaggattccctggatcggtgctattccaccccatccgggtacttggagctacccgacttgggacagccgtattcctcagccgtgtattctcttgaagagcagtatctggggctggccctggatgtggatcgtattaagaaggatgaggaagaggaggaggatcaggatccgccatgtcctcggctgtctagggagcttttggaggtggtggcaccagaggtgctgcaagactcactggataggtgctatagcaccccatcttcttgcctggaacagcccgatagctgtcagccatatggcagcagcttctatgccttagaggaaaaacacgtcgggttcagcttagacgtgggcgagatcgagaagaagggtaagggaaagaagagacgcggtcgcaggtcaaaaaaagagaggaggaggggcaggaaggagggggaggaggaccaaaaccctccatgtcctaggctgagtcgtgagctactggatgagaaggggccagaagtgctgcaggacagtttggaccgttgctattcaaccccgagtggctgtctggaattgaccgattcttgccagccgtaccgatctgccttctacgtcttggaacaacagcgagtggggatggcggtcgacatggacgaaattgagaaatatcaagaagtggaagaggaccaggaccctagctgtcctaggctatcaagggaactgctcgacgaaaaagaacccgaggtgttgcaggacagcctcaacagatgttattcaaccccgtctggctacttggagctgcctgatctgggacagccctattcctctgcagtttattcattagaggagcaatatctaggtctagcgctcgatgtcgaccggatcaaaaaggatcaggaagaggaagaggatgaagaccaggaccctccctgtcctagactgagccgcgagctactggaagtcgtggagcccgaagtgctgcaggattccctggatcgctgttactctactccttcgtcctgtctagagcaacctgatagctgtcagccttacggttcatccttttacgcactggaggagaatcatgtgggtttctcgctcgacgtaggagagatcgagaagaagggtaaggggaagaagcgtaggggcaggaggagcaaaaaagaaagaagacgaggacggaaggagggcgaagaggatcagaatcctccttgtcccagactgtccagggaactactggatgaaaagggcccagaagtgcttcaggatagcctggatcggtgctatagcaccccatccgggtgtctggagttgacagactcctgccagccttatcgctccgccttctacgtactcgaacagcagcatgtgggccttgctgtggacatggatgagatagagaagtatcaggaggtcgaggaagaccaggatccaagctgccctcgtctaagcagggaactgttggatgagaaagagcccgaagtcctccaggattcactggatcggtgttactccaccccatctggctatttggagttacccgacctgggccagccctattcatctgctgtgtactcactcgaagaacagtatcttggactcgccttagacgtggaccggatcaagaaggatcaagaggaagaggaagaccaaggacctccatgtcctaggctctctcgagagctgctcgaggtagtggaacccgaagtccttcaggactccctggatcggtgttactcgactccaagctcctgccttgaacagcccgactcctgccagccatacggctcttcattctatgccctcgaagaaaaccacgtgggctttagtctggacgtgggcgagatcgaaaaaaaaggaaaagggaagaagaggaggggccgtcggtcaaaaaaggagcgacgacgaggtcgcaaggagggggaggaggatcaaaaccccccttgccccaggctctccagggagctgctggatgagaagggtccagaagtgctgcaggatagtttggaccgttgctatagcacaccttctggttgcctggagctaactgattcctgtcaaccttaccgtagcgccttctacgtgcttgaacaacagcatgtcgggctcgcggttgacatggatgagatcgagaaatatcaggaagtggaggaggaccaggacccaagctgcccaaggctttcacgcgagttgcttgatgaaaaggaacccgaggtgctgcaggattccctcgatcggtgctattccaccccctccgggtacctagaactgccggacctgggccagccatattctagcgctgtctattctcttgaggagcaatacctgggccttgccctggacgtggatcggattaaaaaagatcaagaggaggaggaggatcaagggccaccatgcccacggctatcgagggagctgttggaggtcgttgaacctgaagttctgcaggacagccttgaccggtgttactcaacaccgagttcctgtttggagcaacccgactcttgtcagccttacgggtctagcttctatgcgctagaggagaaccacgtgggattcagtttagatgtgggagaaatcgaaaagaagggcaaagggaagaagcgaaggggacgtaggagcaagaaagagaggcgacggggtcggaaggagggagaggaggaccaaaaccccccttgcccacggctgtcaagggagctactcgatgaaaagggcccagaggtgctccaggattctctggatagatgttacagtacgccaagcggctgtctggaactgactgactcctgccagccctaccgatccgcattctacgtgctagagcagcaacacgtcggcctcgctgtggacatggatgagatcgagaagtaccaggaggttgaggaggatcaggaccccagttgccctaggctttcaagagaactgttggatgaaaaggaacccgaagtgctgcaggacagtctggacagatgttatagcaccccctcagggtatttggagctgccagacctgggtcaaccctatagttcagcagtatatagtcttgaagaacagtatctcgggctggctctggatgtggatcgcatcaagaaggatcaggaagaggaagaggatcagggaccaccatgtcctcgactttcaagagaactcttggaggtcgtggagccggaggtgctgcaggactccctagaccgttgttattctactccgagttcgtgtcttgaacagccagacagttgccaaccctacggatcatctttctacgccctggaagagaatcatgtgggatttagtctggatgtgggcgagatcgagaagaaaggcaagggcaaaaagagaagagggcgaagatcaaaaaaggagcgacgcaggggtaggaaggaaggcgaggaggaccagaaccccccttgtccaagactaagcagggagctcctcgacgagaaaggccctgaagttctccaagattcactggacaggtgttattctactccatctggatgccttgagttgactgatagctgtcagccctacagaagcgcattctatgttctagagcagcaacatgtcggactcgcggtggacatggacgaaatagagaagtaccaggaggtcgaggaggatcaggatcctagttgtccgaggctttcccgggagttacttgatgaaaaagagcctgaggtgttgcaggattctcttgatcgatgctatagtacaccgtcaggatacctcgaactccccgatctgggtcaaccatatagcagtgccgtgtatagtctggaggaacagtatctggggctggcactggacgtagatcgtataaagaaggatcaggaagaggaggaagaccaagggccaccatgcccaagactgagtagggagctgctggaggtagttgaacctgaggtgcttcaggattccctagaccgctgctacagcacccctagcagttgtctggagcaacccgattcatgtcagccctacgggtcttccttttatgccctggaggagaaccacgtcggcttctcactggacgtcggcgagattgagaagaaggggaaaggaaagaaacgaagaggacgcaggtctaaaaaggaacgccgtcgcggacggaaggaaggagaagaagatcaaaatccaccatgccctagattgagcagagagttacttgacgaaaagggcccagaggtgttgcaggacagcctggataggtgctattctactccaagcggatgtctggaattaactgacagttgtcagccctaccgttcagcgttttacgttctcgagcagcagcatgtcggtctcgccgttgatatggacgagatcgagaaataccaagaagtggaggaggaccaggacccctcatgcccacgcctgagcagggagctactcgatgagaaagagcccgaggttttacaggactctctagatcggtgctactcaactccgtctgggtatttagaattgcccgatctcggtcagccgtattcgtctgctgtgtattccctggaggagcagtatcttggcctggccctggacgtggatcgcattaagaaagatcaggaagaagaggaagatcaggggccaccatgcccgcgactctccagagagctactagaagtggtggagccagaagtgctgcaggactccctcgacaggtgctactcaaccccatcttcctgtctcgaacagccagacagttgccagccatacggctcaagcttctatgctctcgaggaaaaacacgtgggcttttctttggatgtaggcgagattgagaagaagggtaagggaaagaagaggcgcggtaggcgctcaaaaaaggaaagaagacgcggaagaaaagagggcgaggaggatcagaacccaccctgtcctcggctgtctcgcgaacttctggacgagaaaggccctgaggttcttcaagatagtctggacagatgttatagcacaccctcaggatgcctcgagctgacagactcttgtcagccttacagatctgcgttttatgtcctggagcagcagcatgtgggcctggccgttgacatggacgagatcgagaagtaccaggaagtggaagaagaccaggatcccagctgccctcgcctcagcagggaactgctggatgagaaggagcctgaagtccttcaggactcactcgatcggtgttatagcacacccagcggctacctggagctgccagacttgggccagccatactcctccgcagtctattcattagaggaacagtatctgggactagcactagatgtcgacaggattaaaaaggatcaggaagaggaagaggatcaggggcctccatgtcctcgcctgagcagagaactgctcgaggtggtagaacctgaggtccttcaagacagtctcgacagatgctattctaccccaagcagctgcctggagcagcctgactcttgccagccatacggatccagcttctacgcgcttgaagaaaagcacgtagggttttccctggacgtaggagaaatcgagaagaagggcaaaggtaaaaagcgcaggggcagacggtcaaagaaggagcgccgtcggggacggaaagaaggggaagaagaccaaaatcccccttgccccaggttgtccagagagctgctggatgagaaggggccaaaggttctacaggactctctggacagatgctatagcacaccaagcggatgcctggaactttgcgattcatgtcagccgtatcggtctgctttctacgtcttagagcagcagcgcgtagggctggctgttgatatggacgagatcgagaagtaccaggaggttgaggaggatcaggatccttcctgcccacgcctgagcagggagctgctcgacgagaagggcccagaggtgctccaggacagcctggatagatgttacagcacaccgagtggatgtcttgaactttgcgactcctgtcagccatacagatctgcattttacattctggaacagcagagagttggtctcgctgtggatatggacgaaatcgagaagtaccaagaagtggaggaggatcaagatccttcttgtcccagactgtcccgggagctcctggacgaaaaggagcctgaagtactgcaggactcactggataggtgctatagtaccccttccggttacctcgagctacccgatctgggacaaccatactcctccgctgtttactccctcgaggaacagtacctggggcttgccttagatgttgacagaatcaaaaaggatcaggaagaggaagaagatcaagggcctccgtgtcccagactaagcagggagctgctcgaagtggtggagccagaggtgttgcaggactctctggaccgttgttactctaccccgagctcttgcttggagcaacccgactcttgccagccttatggctcctccttttatgcactcgaggagaaacacgtgggattctcattggatgtgggcgagatcgagaaaaaaggaaagggcaaaaagcgccgtggacggagatcaaaaaaggagaggcggagaggaagaaaggagggcgaagaggatcaaaaccccccttgtccccgtctgtctcgagagctcctggacgagaaggggccagaggttctgcaagacagtcttgaccggtgctactctacaccaagtgggtgcctcgagctctgcgacagctgtcagccttatagatctgctttttacgtgctggagcagcagcatgtgggtctggctgtggatatggacgaaatcgaaaagtatcaagaggtggaagaggaccaagacccttcttgtccccgattatcacgtgaacttctggacgagaaagagcccgaggtgcttcaggactcactggataggtgctattcaaccccctccgggtatctggagctacccgatcttgggcaaccatactcgagcgcagtgtacagcttagaagagcaataccttgggttggcactcgatgtggataaaattgagaagaagggaaagggtaagaagagacggggaaggcggagtaaaaaggaacggagacgcggacggaaggagggcgaggaggaccagaatcccccttgccctcgcctcaacggtgtgctcatggaggtcgaggaaagggaggtgttacaggactctctggaccgttgctacagtactccgtctatgtattttgagctgccagacagttttcagcactacagaagtgtgttttatagcttcgaggaacagcatatcagcttcgctctgtacgtggacaaccgtttctttacactgacagtaacttcgttgcatctggtcttccagatgggtgttatatttcctcagtag

SEQ ID NO: 232331 - DNA, 900 bp, synthetic construct
  misc_feature 1..900: note = Description of Artificial Sequence: Synthetic coding sequence
  source 1..900: mol_type = other DNA
atggtggtatccgctggacctctctcaagcgagaaagccgagatgaacattctcgagattaacgagaagctcaggccacagcttgctgagaaaaagcagcaattcaggaatcttaaagagaaatgcttcctcacccagctcagcggctttctcgccaatcagcagaagaaatacaaatatgaggagtgcaaggacctcattaagtttatgctgcgaaatgaacgacagtttaaggaagagaaactggctgagcaacttaagcaggcagaggaacttcgtcagtacaaggtgctggtgcacgcccaggagagggaactgacacagttgaaggagaaactccgggaaggcagagacgcttccagatcgctgaatgagcacctccaggcactcctcaccccctacgaacctgataaatctcagggccaagacctgcaggagcaattagccgaagggtgccgtttggcccaacatctggtacagaaactgtcgccagagaacgacaatgacgatgacgaggatgtccaggtcgaggttgccgaaaaagtgcagaagtcatctgccccacgagaaatgcagaaagccgaggagaaagaggtgccggaggatagcctggaagaatgtgcaataacatactctaattcacacggctcctacgattctaatcagcctcaccgtaagaccaaaattacctttgaggaagataaggtggactcaactttgatcgggagctcatcccacgtggagtgggaggatgcggtccacataatcccagaaaacgaaagtgacgatgaagaggaagaggagaaaggaccagtgagtcccagaaccagtgtagggagttctgagaaaggtggaccccgtggcaaccggagccaggctcagcagggagctgcgggttag

SEQ ID NO: 232332 - DNA, 2010 bp, synthetic construct
  misc_feature 1..2010: note = Description of Artificial Sequence: Synthetic coding sequence
  source 1..2010: mol_type = other DNA
atggtggtgtcagccggacctctgtcctccgagaaggcagagatgaatatcctggaaatcaatgagaagctaaggccgcaactcgccgagaaaaagcagcagttccgcaacttgaaggaaaaatgctttctgacccagctgtctggtttccttgccaatcaacaaaaaaagtacaagtatgaggagtgtaaggacctgattaaatttatgcttagaaatgaaaggcaatttaaggaagagaaactggcagaacagctaaaacaagccgaggaactaaggcagtataaggtgctcgtgcatgcccaggagagagaacttacacagctaaaggaaaaactcagggaggggagagacgcatcccggtcactgaatgagcatctgcaggccctgctgacgccctacgagcccgacaaatcccaaggccaggacctgcaggagcagctggccgaaggttgtcgtctcgcccagcatctggtgcagaaactgtcacccgaaaacgacaatgacgatgatgaggacgttcaggtggaagttgcagaaaaagtgcagaagagttcagccccaagggagatgcagaaggccgaggagaaggaggtgcccgaagattccctcgaggaatgtgccataacgtactccaattcgcacggctcttatgacagcaatcagcctcacagaaagacaaagataacgttcgaggaggataaagtcgactctacactgataggaagttcctcccatgtggagtgggaggacgcagttcacataatccccgagaacgaaagcgacgatgaagaggaagaggaaaagggcccagtttctccacgaaaccttcaggaatctgaagaggaggaagtgccacaggagagctgggatgaagggtattcgacactgtccatcccacctgagatgctcgcttcctatcaaagctatagtagcacctttcatagtttggaggaacagcaggtctgcatggccgttgacatcggcaggcaccggtgggaccaggtaaagaaagaagatcaagaggcgacaggcccttcacgggagttgctcgatgaaaaagggccagaagtgttccaggatagtcaggatcgctgttactccaccccttctgggtgcttggagctcactgattcatgccagccttataggtctgctttttacatacttgaacaacagcgcgtaggccttgctatcgacatggacgagatcgagaagtaccaggaggtggaagaagaccaggatccatcgtgtccgcgactgtccagagaactcctggatgagaaggagcccgaggtgcttcaggactcacttgatcggtgctatagtaccccatcaggctacttggaacttcccgatctcggccagccttactcttcagcggtgtacagtctggaagagcaatacctgggcctggctctcgacgtggacagaatcaagaaagatcaggaggaggaggaggaccaggggcctccttgtcctaggctgtctcgagaacttctggatgaaaaagggcctgaggtattgcaggattctctggatagatgctattccactcctagcggatgcctcgaactgacagactcctgtcagccgtaccgatccgccttttatgttctcgagcaacagcatgtgggtttggctgtcgacatggatgagattgagaagaaagggaagggcaagaagaggcgtggtagaagatccaagaaagaaagaaggcgtgggagaaaagaaggggaagaggatcagaaccccccttgtcctcgtttaaatggcgtccttatggaagtggaagagcgggaggtcctgcaagactccctggataggtgttattccactcctagcatgtacttcgagctccccgactcctttcaacactataggtccgttttctattcttttgaagaacagcacatcagctttgccctctatgtcgataaccggtttttcactttgacagtgacaagtcttcatctggtgtttcagatgggcgtgattttcccccagtag

SEQ ID NO: 232333 - DNA, 2022 bp, synthetic construct
  misc_feature 1..2022: note = Description of Artificial Sequence: Synthetic coding sequence
  source 1..2022: mol_type = other DNA
atggtcgtttcagccggtccctggtccagcgagaaggctgaaatgaatatcctggaaattaatgaaacactcaggccacagctggctgagaagaagcagcagttcaggaatctaaaggagaaatgcttcctgacccagctggcaggtttcttggctaatcgacagaaaaaatataagtatgaggaatgcaaagaccttatcaaatttatgcttcgaaacgagagacagttcaaagaagagaaactggccgagcagttaaagcaggccgaggagttgagacagtacaaagtcctggtgcactcccaggagcgggaactcacccagctccgagaaaagcttcgtgagggaagggacgccagcaggagtctatacgaacatctccaggcccttctcacacccgatgaaccagacaagtcccaggggcaggatcttcaagaacagctggctgaagggtgccggttggcccagcatctggtgcagaagttaagcccagagaatgacgaagatgaagatgaggacgtgcaggtggaggaagccgaaaaggtgttggaatcctccgctcccagggaagtgcagaaggctgaggagagtaaagtgccagaggactccctggaggagtgtgctatcacatgctccaattctcacggcccatgtgatagcaatcagcctcataaaaatatcaagattacgtttgaagaggacgaagtgaattctaccctcgttgttgaccgtgagtcttcccacgatgagtgtcaggacgcactgaatattctgcctgagaacgaatctgacgatgaagaggaggaggaaaaaggaccagtgagcccacgaaacttgcaggagagcgaggaagaggaagtaccacaagagtcctgggatgaaggctattccacactgtctatacccccagagatgctggcctcttaccagagctactccagtacatttcactccttggaggagcagcaggtctgtatggctgttgatatcggcaggcaccggtgggatcaagtaaaaaaggaagaccaggaagccaccggtcccagactttcaagagaactcctggacgaaaaaggtccagaggtgttacaggatagcttggacaggtgctactccactccttccggctgtttggaattaactgacagttgtcagccttatcgttccgccttctacgtcttagagcagcagagagtgggatttgccgtggacatggatgaaatcgaaaaataccaggaggtcgaagaggaccaagatccttcttgcccacggctgtcccgcgagctgctcgacgaaaaagagccggaggtgctgcaagactcgcttgaccggtgttattctacacccagcggatacctggagctcccggatctcggccaaccatatagctctgctgtatactcactggaggagcagtaccttggccttgcactggacgttgaccgaataaagaaggatcaggaggaggaagaggatcaggggcctccttgccctcgccttagtcgagaactgctggaagtggtagaaccagaagtgttgcaggacagcctagatcgatgttactcaaccccgagttcgtgcctggaacagccagatagttgtcaaccctacggatcttcgttttatgccttggaagaaaagcatgtaggcttctctttagatgtgggtgagattgagaaaaagggaaaaggaaaaaagcgtcgcggacgtcgctccaagaaagaacgcaggagaggcaggaaagagggcgaggaagaccagaatccaccttgtcccagacttaacggagtgcttatggaggtggaagagcgtgaggtattgcaggacagtcttgatcgctgctattccacaccttctatgtatttcgaattgcccgactctttccaacattaccgtagcgtgttttatagctttgaggaacagcacattagctttgcgctgtacgtagacaatcgattttttactttgacagtcacatcacttcacctggttttccagatgggagtcatttttccacaatag

SEQ ID NO: 232334 - DNA, 519 bp, synthetic construct
  misc_feature 1..519: note = Description of Artificial Sequence: Synthetic coding sequence
  source 1..519: mol_type = other DNA
atggctgtcgatatagggaggcaccgatgggaccaggtcaagaaggaggaccaggaggcgacagggcctagccgcgaattgctcgatgagaaaggacctgaagttttccaggacagtcaggatcgatgctattcaaccccaagcggatgcttggagctgacagatagctgtcagccctaccgaagcgctttctatatcctggagcagcagagggtggggttagctattgacatggatgaaattgaaaaataccaggaggtagaggaagatcaggaccccagctgcccaaggctgtcaagggaacttttggacgaaaaggagcctgaagtgctgcaggactcactcgaccgctgttattcaactcctagcggctacctggagctgccggatctcggacaaccctatagcagcgccgtatactctctggaggagcaatatttaggacttgctctggatgtggaccgtattaagaaggaccaggaagaagaggaagatcagggccctccctgccctcggtag

SEQ ID NO: 232335 - DNA, 2295 bp, synthetic construct
  misc_feature 1..2295: note = Description of Artificial Sequence: Synthetic coding sequence
  source 1..2295: mol_type = other DNA
atgtttagcaattctacaggtaggctgccaggtcagcccacagaggagatccagcaatataaggtcctagtgcattcacaggagcgggagttaacccagctaagggagaaattacgagaaggtagagacgcttctcgctccttgtacgagcatctgcaggcacttctgacgccagacgagcccgataagtcacaaggacaagacttgcaggaacagctcgccgaggggtgtcgtttggcgcagcatctggtgcaaaaattgagtccagaaaatgatgaggacgaagatgaggacgttcaagttgaagaggccgagaaagtactggagtcttccgccccaagagaagtgcagaaggccgaggaaagcaaggttcctgaagactccttggaggaatgcgccatcacctgtagtaattcccacgggccttgcgattccaatcagccccacaagaatatcaaaataacctttgaggaggatgaggtcaacagtacattggtggtcgacagagagtcgtcacatgatgagtgtcaagacgcccttaatatcctccccgtgcctggacctaccagcagtgctacaaacgtgtccatggttgtctctgcaggccctctgtcatccgaaaaggctgagatgaatattttagaaatcaacgaaaaactcaggccacaactggccgagaagaaacagcagtttaggaatcttaaggagaagtgcttccttacacagctctcgggatttctggctaaccagcagaagaagtacaagtacgaggagtgcaaggacctgattaagtttatgttgaggaacgagaggcaatttaaagaagagaaattggcagagcagctgaaacaagccgaagagctccggcaatacaaggtgctggttcacgctcaggaacgggagcttacccagctgaaagagaagctgcgggaggggagggacgcttcccgcagcctcaacgagcacctgcaggcgttgctgacaccatacgaaccggacaaatctcagggtcaggacctgcaggaacagttggcggagggatgcagattggcacagcacttagtgcagaagttatctcccgagaacgacaacgatgatgatgaagacgtgcaggttgaggtggccgagaaggtccagaaatcgtcagccccacgagaaatgcaaaaggctgaggaaaaagaggtgcccgaggacagcctggaagaatgtgcgatcacatactcgaatagtcacggcagctatgactccaatcagccacacagaaaaacaaaaatcacttttgaggaagacaaagtagattcgaccctcattgggagcagttcccatgtggagtgggaagacgctgtgcacatcattcctgagaatgagagtgacgacgaagaggaagaggagaaaggcccagtttccccgcgaaacctgcaggagtcagaggaggaggaggttccccaggagagttgggacgaaggctactcaactctcagcataccaccagagatgctggcctcttatcagtcttattcttcaacctttcattcactggaagagcagcaggtgtgtatggctgttgacatcggcagacataggtgggaccaggtcaaaaaggaggatcaggaggccactgggccacgactgtcacgagagctgctcgatgaaaaaggccctgaggtgctccaggactccctggacagatgctacagcactccttctgggtgcctggagctgacagattcttgccaaccataccggtctgccttctacgtgcttgaacagcagcatgttggcttggcagtggatatggatgaaatcgagaagtaccaggaggtagaagaagatcaggatcctagctgtcccagactcagccgagagctgttggacgagaaagaacctgaggtgctgcaggactctctggataggtgctactctaccccatcagggtacttggaactgccagatcttggccaaccttattcctccgctgtatacagcttggaagaacaatatctgggtttggcactggatgtggatcgcattaagaaagatcaggaggaagaggaggatcaagggcctccatgcccccgactgagccgcgagcttttggaagtcgttgagccagaggtccttcaggactccttggacaggtgctacagtaccccttctagttgtcttgaacaacccgatagctgtcagccgtacggcagcagtttctatgcactggaggaaaaacatgtcggattttctcttgacgtcggcgagatagagaagaagggtaagggaaagaaacgcagggggcgatag

SEQ ID NO: 232336 - DNA, 105 bp, synthetic construct
  misc_feature 1..105: note = Description of Artificial Sequence: Synthetic coding sequence
  source 1..105: mol_type = other DNA
atcggatcatcatcacatgttgaatgggaagacgcagtgcacatcatccccgaaaatgagtctgacgacgaggaagaggaggagaaaggtcccgtctcaccatag

SEQ ID NO: 232337 - DNA, 2517 bp, synthetic construct
  misc_feature 1..2517: note = Description of Artificial Sequence: Synthetic coding sequence
  source 1..2517: mol_type = other DNA
atggtggtatctgccggaccatggagttccgagaaagccgaaatgaacatattagagattaatgagaaactgagaccgcaactggctgagaataagcagcagtttcgaaatttgaaagaacgctgcttcctgacgcaactagcagggttcctggccaaccggcagaagaagtataaatatgaggagtgcaaagacctgatcaaatttatgctaagaaatgaacgccaattcaaggaagaaaaattggctgaacagttgaagcaggccgaagagctacggcagtataaggtactcgtgcatagtcaggagcgggagctaacacagctccgggagaagctgcgcgaagggagggacgcctcccgctcactgaacgaacatctccaagcccttctcacgcccgatgagccggacaagagtcagggacaggacctccaggagcaactcgccgaaggctgtcggctcgcacagcacttagtacagaaactgagccccgaaaatgatgaagatgaggatgaggacgtgcaggttgaggaggatgaaaaagtcctagaaagtagcgcccctcgcgaagtgcagaaagccgaagaatctaaggtgccggaggactcccttgaggagtgcgccattacctgctcgaattcccacggaccctgtgatagtattcagccccacaagaacatcaagatcaccttcgaagaggacaaggtcaatagctctctggtagttgatcgagaaagctcacacgatggatgtcaggacgctctgaatattcttccagtccccggaccaaccagtagtgcaactaacgtgtcaatggtggtgagtgccggtccacttagtagcgaaaaggcagagatgaatattctggagataaatgaaaagctgtgtccccagctcgctgaaaaaaaacagcagtttagaagccttaaggaaaaatgcttcgtcactcaggtggcgtgcttcctggccaaacagcagaacaagtataagtacgaggaatgcaaagacctgattaagtccatgctgagaaacgaaagacagttcaaggaagagaagctggccgaacagctgaagcaggcagaggagcttaggcaatataaagtgctcgttcattcgcaggagagggaattgacacagctgagggaaaagctacgggaggggagggatgcctcccgctccctgaacgagcatttgcaggctctgcttacacccgacgaaccggacaaatcgcagggccaggatcttcaggagcagctggctgaaggatgtaggctggcacaacatctggtacaaaagctctcgcccgaaaatgataatgatgacgatgaagatgtgcaggtggaggtggccgagaaggtgcagaagagttcctcgccaagagagatgcagaaggccgaggagaaagaagtgcctgaagattcattggaagagtgcgccattacctgctccaatagtcacgggccttatgacagcaatcaaccacaccgaaagccaaagtcacatctgaggaaaactaagtcaacgcagttgtcgctggctcaccccttaatgctgaatggaagaatgctctatactctgtcacagaaaatgaaggtgatgatgaggaagaggaagaaaaaaggccaatgcttgcctggcatctgcagatctctcaaacgccgaaaatcacccaggagtccaggtatgaaggtaatccgcctcagccagttcctgctcaaagggcatcgctgggaccaggtcaaaaaagaagatcaggaggctactgggcctcgtctgtctagggagcttcttgatgaaaaagaaccagaggtgctccaggattctcttgaccgctgttacagcactccatctgtgtacctgggcctgacggacagttgccagccttaccgctcagctttttacgtgttggagcagcaacgtatcggtctcgccgtagatatggacgaaattgagaagtaccaagaagtggaggaagatcaggacccatcctgccccagattgagcagggagctgctcgcagaaaaggagccagaggtccttcaagatagcctcgatcggtgttactctacgccttccggctacctagaactgcccgacctaggacagccctatcgcagcgccgtttactctctggaggagcagtatcttgggctggcactggacgtggaccggattaagaaggatcaggaagaggaggaagaccagggcccaccctgtccccgactaagcagggagcttttggaagttgtcgagcctgaagtgctccaggattcacttgatgttatccaactcctgcctgtcgttctcaattccctgacgccagcctcacctacagaagtcccatttatgcactggagaaaaaacatgctcgccttcctcctaacttgggaaaaactgaaaaggcgcggacgcggaagaaaggaaggggaggaggatcagagaaggaaggaggagggggaggaaaaaaaaggaaaaaagataaaaactcatcatgctcccggatccgccgcttgctag

SEQ ID NO: 232338 - DNA, 2373 bp, synthetic construct
  misc_feature 1..2373: note = Description of Artificial Sequence: Synthetic coding sequence
  source 1..2373: mol_type = other DNA
atgttttccaactctaccgggaggcttccagggcagccaaccgaagaaatacagcaatataaggttctggtgcattcacaagaaagggaactcacgcagttaagagagaagctgagagaagggagagacgcaagtaggtcgcttaacgagcatctccaagcactgctcacacccgatgagcccgataagtctcagggccaggaccttcaagaacagctcgcagagggttgtcggctggcccaacatctcgttcagaaactatcacccgagaacgacgaagatgaggacgaggacgtccaagttgaggaagatgagaaggtgcttgaaagtagcgcccctcgcgaagtccaaaaggccgaggagtctaaggtaccggaggatagtctcgaagaatgtgctataacctgcagcaattctcatggcccttgcgactccattcagccccacaaaaacattaagatcacctttgaagaggacaaggtgaactccagcctagtcgtggacagagaatcctctcatgatgggtgccaggacgccctcaacatcttgccagtgcctgggcctacaagttccgctaccaacgtcagtatggtagtatccgccggtcctctatccagtgagaaagctgaaatgaatattctggaaatcaatgagaagctatgtccccagctggccgagaagaagcagcagtttagatcgctcaaggagaagtgtttcgttactcaggtggcttgtttcctggccaagcaacaaaataaatataaatatgaggaatgcaaggacctcattaagtctatgctgcgcaacgagcgacagtttaaagaggaaaaattagcggagcaactcaaacaggcagaggaactgcggcagtacaaagtactggtacactctcaagagagagaacttacccagctgcgcgaaaaactcagggaggggagggacgccagccggagccttaacgaacatctacaggcgttgttaactcctgacgagcccgacaagagtcagggccaggatctccaggagcaacttgcagagggatgccgcctcgcccagcatctggttcagaagctcagccccgaaaacgacaacgatgatgatgaagacgtgcaggtggaggtggccgaaaaggtccagaagagctcatccccccgtgagatgcagaaagctgaggaaaaagaagttcctgaggatagcttggaagaatgtgctattacatgttcaaacagccacgggccttatgacagtaatcagccccaccggaagacaaaaataacgtttgaggaagacaaagttgactcgactctgattggtagctcatcccacgttgagtgggaggacgccgttcatatcatccctgagaacgagagtgacgacgaagaggaggaagaaaagggcccagtcagtccacggaacttacaagagagcgaagaagaagaggtgcctcaggaatcctgggacgaaggctactctacactctcgattccccctgagagactggcttcctatcagtcatactcatccacttttcatagtttagaagagcagcaagtgtgcatggccgttgacataggaagacacaggtgggatcaagtcaaaaaagaggaccaggaggctaccggaccacgcctttcacgggagctgctcgatgagaaagagccagaagttctccaggactcactggatcgctgttacagcacacctagcgtgtacctgggcctcaccgacagctgccagccctaccgatccgccttttatgtcctggagcagcagcggatcgggctggccgtcgacatggatgagatagaaaagtatcaggaggtagaggaagaccaagacccgtcatgtccaagactgagtagggaattgttggccgaaaaggagcctgaggttctgcaggacagcctcgatcgctgttactcgacccctagtggctatcttgagctgccagacctgggtcagccctacaggagtgcggtctattctctggaggaacagtacctgggcctagccctcgacgttgaccgaataaaaaaagatcaggaggaggaggaggaccaagggcctccctgccctagactttccagggagctgctggaagttgttgaaccagaagtgttacaggactctctggacgttattcagctgctgcccgtggtgctaaatagtttaaccccggcatcccctaccgaggtcccatttatgcactggcgtaagaacatgctggcattcttacttacttgggagaaactcaaacggcgagggaggggcagaaaagaaggggaagaagaccaacggaggaaagaggaaggcgaagaaaaaaaaggcaagaaaattaagactcaccacgccccagggagcgcagcatgctag

SEQ ID NO: 232339 - DNA, 258 bp, synthetic construct
  misc_feature 1..258: note = Description of Artificial Sequence: Synthetic coding sequence
  source 1..258: mol_type = other DNA
gagatgcagaaggctgaagagaaagaggttcccgaagactccttagaagaatgcgccattacatgctctaacagtcatggcccttatgacagtaaccagccacatcggaaaaccaaaatcactttcgaagaagataaggtcgattctactctgataggttcatcttctcatgtggagtgggaggacgccgtacatattattcccgagaacgaatcagacgacgaggaagaggaggagaagggccctgtctccccatag

SEQ ID NO: 232340 - DNA, 1101 bp, synthetic construct
  misc_feature 1..1101: note = Description of Artificial Sequence: Synthetic coding sequence
  source 1..1101: mol_type = other DNA
ctggcaagttaccaatcctatagcagcacgtttcacagcttggaggagcaacaggtctgtatggctgttgacataggacgacaccgatgggaccaggttaaaaaagaagatcaagaggctactgggccacgactgagtcgggaacttctggacgagaaggaaccagaagttctccaggactccctggatcgctgctacagcacccccagtgtttacctgggtctgacggattcatgccaaccatacaggtccgccttctacgttcttgaacagcagcgcatcgggttggcagtggacatggatgagattgaaaagtaccaggaggttgaagaggatcaggacccgtcctgccctcgtctgagtcgtgagctcttagcagaaaaagagcctgaggttttgcaggattctctggaccggtgctattcaacgccctctggatacctagaactcccagatctaggccagccttaccgctccgcagtctactcactggaggagcaatatctggggctcgctcttgacgtagacagaattaaaaaagaccaggaggaagaggaggatcaaggtccaccctgcccccgtttatccagggaacttctcgaagtggtggagcccgaggtcctgcaggattccctctgctatagcactccaagttcatgcctggaacagccggactcttgtcaaccatatggctcgtcattctacgcgctggaggagaagcacgtcggattctctctggacgtgggtgagatcgagaagaaaggcaagggcaagaagcggagagggagacggtccaaaaagaagcgacgcagagggaggaaggagggagaggaagatcaaaacccaccatgccccaggctgtcaagcgttctgatggaggtggaggtgccggaggtgctgcaggactctcttgacagatattacagcaccccttccatgtactttgagttacctgactcctttcaacactatcgatccgtgttttatagctttgaagagcagcacatcagcttcgcactggacatggacaatcggttctttacacttacagtcaggtcgctgcacctggtcttccagatgggcgtgattttcccccagtag

SEQ ID NO: 232341 - DNA, 2598 bp, synthetic construct
  misc_feature 1..2598: note = Description of Artificial Sequence: Synthetic coding sequence
  source 1..2598: mol_type = other DNA
atggtcgtttctgcaggaccttggtctagcgaaaaggccgagatgaatatcctcgaaatcaacgaaaagcttcgccctcagttggccgaaaacaagcagcagtttaggaacttaaaagagcgttgtttcctcacgcagcttgcaggtttcctggccaaccgccagaagaaatacaaatacgaagaatgtaaggatctcatcaagttcatgctacgcaacgagcggcagtttaaagaggagaagctggctgagcagctgaagcaagccgaggaacttaggcagtacaaggtgctagtccactctcaggaacgtgaactgacccagttacgagaaaagctcagagaggggagagatgccagcagaagtctgaacgagcacctgcaggccctcctgacccctgacgaaccagacaagtcacaggggcaggaccttcaggaacagctcgccgagggctgcaggctcgcccagcatctcgtgcaaaaactttcgccggagaatgacgaggacgaggatgaggacgtccaggtggaagaagacgaaaaggttctggagtcctcggcccctcgtgaggttcaaaaggcagaggagagcaaagtgccggaggattcccttgaagagtgtgctatcacgtgttccaatagccacggcccatgcgactccatacagcctcataagaacatcaaaattacctttgaagaggacaaggtgaattcaagtctggtagtggaccgggagagtagccatgatgggtgtcaggacgctctcaacatacttcccgttccgggaccaacttcttctgctacgaacgtgtccatggtggtttctgctggcccactgagtagtgagaaggccgagatgaatattctcgagattaacgaaaaactgtgcccccaactcgccgagaagaagcagcaattccgtagcctgaaggagaagtgctttgttacacaggtcgcatgttttttggccaagcagcaaaataagtataagtacgaggagtgtaaggatctaataaagagtatgctgaggaatgagcgacagttcaaggaggaaaaactggctgagcagctaaagcaggctgaagagctgcgacagtataaggtgttagttcactcacaggaacgtgagctgacccagctgcgggaaaaactccgggaagggcgagacgcgagccgctccttgaacgagcaccttcaggcactgttgacccccgatgagccagacaagtcgcaagggcaagacctgcaggaacagttagcagagggatgccggctggcccagcatctggtgcaaaaactgtcccccgagaacgacaacgacgatgatgaagacgtgcaggtggaggtggccgaaaaagttcagaaatcctctagccccagggagatgcagaaggcggaagaaaaggaggtgccagaggactccctagaggagtgtgctatcacatgcagtaattcccatgggccatatgattcaaaccagccccatcgcaaaactaagattacctttgaagaggacaaggttgattctaccctgatcgggagctctagccacgtggagtgggaagatgctgtccacattatccccgaaaatgaaagcgacgatgaggaagaggaggagaagggtcccgtgagtccccgtaacttgcaggagtccgaggaagaggaagtgccgcaagaaagttgggatgagggttattcaacactctcaatccccccagagagactggccagctaccagtcctattcaagcacattccactcactagaggaacagcaggtttgtatggctgtcgatattggccgacacagatgggatcaggtcaagaaggaggatcaggaggccaccggtcccagactgtccagggaactgctggacgagaaggaaccagaggttcttcaggacagtctggaccggtgctactccacacccagcgtgtatctgggtctaacagattcatgtcagccctatcgaagtgcgttctacgttttagaacagcagcgcatcggactcgccgttgatatggatgagatcgaaaagtaccaagaagtagaggaggatcaggatccatcttgcccacggctgagcagggagctgctagcagagaaggagcccgaggtgctacaggatagcctcgaccggtgctactcaactccctcagggtacctggagctgcccgacttgggacagccataccggtctgcagtgtattcccttgaagaacagtacctgggcctcgcacttgatgtggatcggatcaaaaaggatcaggaggaggaggaagatcagggtcctccttgtccgaggttgtccagggagctgctagaggtggtcgagcccgaagtgttacaagactccctggatgtgattcagttgctccccgtggttctaaactccctgactccagccagccctaccgaggtgcctttcatgcactggagaaaaaatatgctggcatttctgctgacatgggagaagctaaagcggagaggaaggggcagaaaggaaggagaggaagaccagaggcgaaaggaagagggagaagagaaaaaaggcaaaaaaatcaaaacccaccacgcgcctggatctgccgcttgttag

SEQ ID NO: 232342 - DNA, 2373 bp, synthetic construct
  misc_feature 1..2373: note = Description of Artificial Sequence: Synthetic coding sequence
  source 1..2373: mol_type = other DNA
atgttcagcaactccaccggacgcctgccaggacaacccacagaggaaatccagcagtacaaagtcctggtgcattctcaagagagagagctcacacagttacgggaaaaactacgcgaggggagggacgcttcccgctccctgaacgaacacctgcaggcactcctgacaccagacgaacccgacaaatcgcagggacaggacctgcaggaacagttggcagagggctgccggctagcccagcagctggtgcagaaactgagcccggagaacgacgaagatgaagatgaggatgtccaggttgaagaggacgagaaagtgttggagtcaagcgccccacgagaagtgcaaaaggcagaggaatcgaaggtccctgaggattcactggaagaatgcgctatcacgtgctctaacagtcacggaccgtgtgattcaaaccagcctcataaaaacatcaagattacatttgaggaagacaaagtcaattcttcactggtcgtggacagggaatacagccatgatgagtgtcaggatgcgctgaacattctgcccgtgcctggcccaacttcaagtgcaactaacgtcagcatggttgtgagtgccggacctctctcctccgaaaaagctgaaatgaacatcttggagatcaacgaaaaactgaggccgcagctagcggagaaaaaacagcaattcagatctctgaaagagaagtgttttgtgacacaggtagcttgcttcttagcaaaacaacaaaacaagtataaatacgaagagtgcaaggaccttattaaaagtatgttaagaaatgagctgcaattcaaggaagagaagttagctgaacagctgaagcaggcggaggaactccggcagtataaagtgctggtgcactcccaagaaagagaactcacccagctgcgagaaaagctgcgggaagggcgtgatgcctcccggtccctgaacgagcacctgcaggctctgctgactcctgatgagcccgacaagagccaggggcaggatctacaggagcaactcgcagagggctgccgcctggctcagcacctcgtgcaaaagctgtcccccgaaaacgacaatgacgatgacgaggatgttcaggtggaggtggcggaaaaagtgcagaagtcctcttctccaagagagatgcagaaagccgaagaaaaggaagttccggaagacagtctcgaagagtgcgccatcacctgttcaaatagccatgggccttatgattccaaccagccgcatcggaagactaagatcacctttgaggaggacaaagttgacagcacactgatcggatcctctagccacgtcgagtgggaggacgcagtccacatcattcctgagaacgagtcggacgacgaagaagaggaagaaaaaggaccagtgtcaccacgtaacttgcaggaaagcgaggaggaggaggtgccgcaggagagttgggacgaaggctacagcactctcagcattccacccgagcggctggcctcataccaaagttactctagtaccttccacagcttggaagaacaacaggtgtgtatggcagtcgacattgggaggcatcggtgggaccaggtgaagaaggaagatcaggaggcgaccgggccacgcctgagtcgggagctgctggctgagaaggaacccgaagtcctccaggattcactggacaggtgctattcaaccccctcagtctatctcggcctgaccgacagttgccagccgtaccggtcggcattctacgtgctggagcagcagcgcgttggattggccgttgacatggacgaaatcgagaaataccaggaggtggaggaggatcaggatcccagctgtcctagactgtccagggagcttctcgctgagaaagagcccgaagttctacaagatagcttggaccggtgttactctaccccgagtggctacctggagttaccagacttaggacagccctaccgcagtgccgtctatagtctcgaggagcagtacctcggattagccctcgacgtagacagaatcaaaaaggatcaggaggaggaggaagaccagggacctccttgcccccgactgtcccgcgagctactggaagttgtggaacccgaagtgctgcaagactccctggacgtcatccagctgctccccgtcgtgttgaactctctaacacccgcttctcccaccgaagtccccttcatgcattggaggaaaaatatgctggcctttctgttaacctgggaaaagctaaaaagacgcggacgtggcaggaaggaaggagaagaggaccagcgcaggaaggaagaaggggaggagaagaaaggtaaaaagatcaagacccaccacgctccaggaagcacagcatgctag

SEQ ID NO: 232343 - DNA, 234 bp, synthetic construct
  misc_feature 1..234: note = Description of Artificial Sequence: Synthetic coding sequence
  source 1..234: mol_type = other DNA
atggatgaaatcgagaagtaccaggaggtcgaggaggatcaggatccttcctgccccagactcagccgggagctgctggccgaaaaggaaccagaagttctccaggatagcctcgatagatgttactctacaccatctggttatctagaactacccgaccttggtcagccctatcgttccgccgtctattctctggaggagcaatacttaggtctggcactcgacgtagactag

SEQ ID NO: 232344 - DNA, 234 bp, synthetic construct
  misc_feature 1..234: note = Description of Artificial Sequence: Synthetic coding sequence
  source 1..234: mol_type = other DNA
atggatgaaattgagaagtatcaggaggtggaggaggatcaggacccttcttgtcctcgtctgtcccgcgagctgctagccgaaaaagaacccgaagtgctgcaagattcactggacagatggtattccaccccatccggataccttgagcttccagatcttggacagccttaccgttccgcagtgtattccttggaggagcaatatctcgggctggctctggacgttgattag

SEQ ID NO: 232345 - DNA, 234 bp, synthetic construct
  misc_feature 1..234: note = Description of Artificial Sequence: Synthetic coding sequence
  source 1..234: mol_type = other DNA
atggacgaaatagaaaaatatcaagaggtggaagaggaccaggacccatcctgtccccgattgtcacgggagctcctggccgagaaggagccggaggtgcttcaagacagcttggacaggtgttatagcactccatccggctacctggagcttcccgatctggggcagccttatcgatctgcagtttattcattggaagagcagtacctgggcttggcactggacgtggattag

SEQ ID NO: 232346 - DNA, 207 bp, synthetic construct
  misc_feature 1..207: note = Description of Artificial Sequence: Synthetic coding sequence
  source 1..207: mol_type = other DNA
gaaatgcagaaggccgaggaaaaagaagtccccgaggacagcttggaagaatgcgctatcacttgcagcaattcccacggcccttatgattctaatcagccgcatcgaaaaacaaagatcacatttgaggaagataaagtggattctactctgatcggcagctctagccacgttgagtgggaggatgcagtgcacatcatcccctag

SEQ ID NO: 232347 - DNA, 9996 bp, synthetic construct
  misc_feature 1..9996: note = Description of Artificial Sequence: Synthetic coding sequence
  source 1..9996: mol_type = other DNA
atggtggtctccgctggcccttggtcctccgagaaggcagagatgaacatactggagatcaatgagaaacttcggccacagctagctgaaaataagcagcaattcagaaacctcaaagaaagatgttttctgacccagctggccggattcctagccaaccggcaaaagaaatataaatatgaggaatgcaaggacctcatcaaattcatgttgcgcaacgaaagacagttcaaggaagagaagctcgctgagcagctcaagcaggctgaagaacttagacaatacaaggtccttgtgcactcacaggagcgcgaactgacccaattgagggaaaagctgagagaaggcagagatgcaagtaggagcttgaacgaacacctgcaggctctcctcacccctgacgaacccgataagtctcagggccaggatctgcaggagcagctagcggaagggtgtcgcttggctcagcaactggtacagaagctctctccagagaatgacgaagatgaagatgaggatgttcaggtggaagaagacgagaaggtgcttgagagctcagcccctcgcgaggtgcagaaagctgaagagtctaaagtccctgaagatagtcttgaggagtgcgccattacctgctctaacagccatggaccttgtgactccaatcaaccccataagaatatcaagatcacgtttgaagaggacaaagttaattccactgtagtggtagatagaaagagcagtcacgatgagtgccaagacgcgctgaatatcttgcctgttcctggcccaacctcctctgcgaccaatgtatccatggtggtttcagcaggccctttatcttccgagaaagccgaaatgaacatactggagattaacgaaaaactgcggccacagttggccgagaagaagcagcagtttcggagcttaaaggagaagtgtttcgtgacacagctcgcagggttcctcgccaaacaacagaacaagtacaaatacgaggagtgcaaggaccttattaagagcatgcttcgcaatgagttgcagtttaaggaggaaaaactggctgagcagctcaagcaagccgaagagctcagacagtataaggtcttggtgcactcacaggaaagggagctaacacaacttagagagaagttgcgcgaaggacgggacgctagccggtctttaaacgaacatctgcaggccctgttaaccccagacgagcccgacaaatcccagggacaagacctgcaggaacaactcgcagaaggatgcaggctcgcacagcacctggtgcaaaagcttagtccagagaatgatgaggacgaggacgaggacgtgcaggtggaggaggacgaaaaggtgctggaatctagctctcccagggaaatgcagaaggctgaggagagcaaggtccctgaagactccttagaagagtgcgcgatcacctgcagtaactcgcatgggccatgtgatagtaatcagccgcataaaaatattaaaataacgttcgaggaggacaaggttaactcttcattggttgtcgaccgagaatactcgcatgacgaatgtcaggatgccctgaacattctcccggttccaggcccaactagctcggctaccaacgtttccatggtcgtaagcgccggtccactctctagtgaaaaggcagagatgaatattctagagatcaacgaaaaactcagacctcaattggcggagaagaaacagcagttccgctctctgaaagaaaagtgtttcgtgactcaggtagcctgttttctcgcaaaacagcaaaacaaatacaaatacgaggaatgcaaggacttgattaaatctatgctgcggaatgaactgcaatttaaagaggaaaaactggcagagcagcttaagcaggccgaggagctgcggcagtacaaagtgctggtccactctcaggagcgtgaattaactcagttacgcgagaaacttagagagggcagagacgcatcgcgctccttaaacgaacatctgcaggctctgctcacccccgatgaaccagataagagccagggccaggatctgcaggagcagctcgctgagggctgccgcctagcccagcacctcgtacagaagttaagccctgagaacgataatgatgatgatgaggatgtgcaggtggaagtggcagaaaaagtacagaaaagctcctcaccacgggaaatgcagaaggccgaagagaaggaagtgccagaagatagcctcgaagagtgcgccataacgtgttccaacagccacggaccttacgacagtaatcaaccacacaggaagactaaaataactttcgaagaggacaaagtggacagcaccctgataggatcttcttcacacgtggagtgggaagatgccgttcacattatccctgagaacgagtcggatgatgaagaggaagaagagaaaggtccggtgtccccacggaatctgcaggagtccgaggaagaggaggtgcctcaagagtcctgggatgagggctacagcacgctctcgatcccaccagagcgcctagcctcttatcaatcctatagctcaacattccattcactggaggagcaacaggtatgcatggctgtggatattggcagcgagtactctatcgtcaaagtgattaaattgcaatttatggctcagagtcaagcaatgccagtacccacttggacagattgccacgacattgagctgaaggcaggacacagatgggaccaagttaagaaagaggatcaagaggccacagggcctcgactatcacgggaactgcttgcggagaaagagccagaggttctccaggatagcctggatcgctgttattctactcccagcgtgtacctgggactgaccgactcctgtcagccatataggagcgcattctatgtgctcgagcagcagagggtcggacttgctgtggacatggatgaaattgagaagtaccaagaggtggaggaggaccaggaccccagctgtccgcgtctcagccgggaattgttggctgaaaaagaacccgaggtgttgcaagacagcctggacagatggtatagcaccccctccggatacctcgagctgcctgacctagggcagccataccgtagtgccgtgtacagcttggaggaacagtacctgggcctcgcgttagacgtggatcgaatcaaaaaagaccaagaggaagaggaagaccaggggcctccctgcccacgactaagcagagagttacttgaggtcgtggaaccagaggttctgcaggattcactagacagatgctacagtacgcctagctcatgcttggaacagccggacagctgccagccttatcggtctagtttttacgccctggaggaaaagcatgtaggattctccctggacgtaggcgaaatcgaaaagaaggggaagggcaagaagaggagagggaggcgtagcaagaagaaacgaagaagaggcagaaaagagggagaagaagaccagaaccccccttgccccagactttccagagagcttctcgcagagaaagaacccgaagtgctccaggattctctggatcggtggtacagcactccgtccgtgtacctaggtcttactgacccgtgtcagccctaccggtctgcattctatgttctggagcagcagagggtggggctggccgttgacatggatgagatcgagaaatatcaagaagtggaggaagatcaggatcctagctgcccaagactgtcaagagagctgctagctgagaaggagcctgaagtcttgcaggactcattggaccgatggtactcaactccttctggatacctcgaactgccagaccttggccagccctacagatcggcagtgtacagccttgaagagcaatatctcggcctggctctggatgtggataggatcaaaaaagaccaggaagaagaggaagatcaggggccaccatgtccacgtttgagccgcgagctcttggaggttgtcgaacctgaggttctgcaggattcgctcgataggtgttattccactccgagcagctgtcttgagcagccagactcctgccagccctacagatcttctttttacgccttggaagagaaacacgtgggattctccttggatgtgggggagatcgagaagaagggcaaggggaagaaaaggagagggaggcggtcaaaaaaaaaacgtcgtcggggtcgcaaagagggggaagaagatcagaacccgccttgccccaggctttctcgcgagttgctggctgagaaagagccggaggtgcttcaagattcactggaccggtggtacagcacacccagtgtctacttaggactgactgacccatgtcagccgtaccggagtgccttctatgtcttagagcagcagagagtcggcctcgccgtggacatggacgagatagaaaagtaccaggaggtggaggaagatcaggacccatcctgccctcgcttaagtagggagctgctggccgagaaggagccagaggtgctccaagactccctagacaggtggtactctacaccgtccggatatttggaactgccagatctgggtcagccatacagatctgccgtctactcactggaagagcaatatctgggtctcgcacttgatgtggacagaattaagaaagaccaggaagaggaagaggaccagggtcccccttgccccagactctctcgggagctgttggaggtcgtggaacctgaggtgcttcaggactctttggaccggtgttactctaccccctccagctgcctcgagcaaccagactcttgtcagccataccgttccagcttttacgcgctggaagagaagcatgtcggattttctttggacgtgggcgagatagaaaagaaagggaagggcaagaaaaggaggggccgacggagtaagaagaagcgcaggcgaggcagaaaagaaggcgaagaagatcagaatcctccttgccccaggcttagtcgggagttactagctgagaaggaacctgaggtgctccaagattccctcgatcgatggtacagcacaccctccgtctaccttggacttacagacccatgtcagccatataggtcggctttttacgtcctggagcaacagagagtgggactggccgtagatatggacgagatcgagaaataccaagaggttgaagaagaccaggatccaagctgtccacgcctctcccgggagctgctggctgagaaagagccagaggtgctccaggattcccttgatcgctggtattcaacccctagtggctacctcgaactgcccgaccttggccaaccttatcgttccgctgtatattctcttgaagagcaatacctgggcctggcccttgacgttgataggattaagaaggaccaggaggaagaggaagaccagggcccaccttgtcctcgcctctcaagggaactgctggaagtagttgagccagaggtcttgcaggactcactcgaccggtgctacagcaccccatctagttgtttggaacagcccgatagttgccagccttatcggagtagcttctacgcactggaagaaaagcacgtggggttttctctcgacgttggggagattgagaaaaagggtaaaggcaagaagagacgaggtaggcgtagtaagaaaaaacggagacgcggtagaaaagagggtgaagaagaccagaacccgccttgtcccaggctaagtcgggaattactggcagagaaagagccagaggtgcttcaggacagcctggatcgctggtacagcacaccgagcgtctacttgggactgactgacccatgccagccctatcggtctgccttctacgtactagagcagcagcgtgtgggattggctgtggatatggatgagattgagaagtatcaggaggtggaagaagatcaagacccgagttgcccccgtttatctagggaactgttggccgagaaggagccagaggttctgcaagactcactcgatcgttggtatagcacaccctctggctacctcgagttgcctgatctgggccagccgtaccggtccgccgtgtatagcttagaagaacagtaccttggcttagcactggacgtggacaaaattgagaagtaccaggaagtcgaggaagatcaggatccctcatgtccaaggctcagccgggagttgctggccgagaaagaaccagaggttctccaggacagtctcgaccggtggtatagcactccttcagtgtacttgggcctgaccgacccttgccaaccgtatcgttctgccttctatgtgttggaacagcaaagagtcggcctcgctgttgatatggacgaaatcgagaagtaccaggaagttgaagaagaccaggatccctcgtgtcccagacttagtcgagaactgttagccgaaaaggagccagaggtcctccaagactcgctggaccggtgctattctacacccagcggctatctcgagctgcccgatctaggccagccttaccgaagcgccgtatacagcttggaggagcagtacctgggattggcgctggacgtcgatcggattaagaaggatcaggaggaggaagaggatcagggaccgccatgtcctcgtctgagtcgggaactcctcgaagtggtcgagcctgaggtactccaggattctctggatagatgctatagtacccccagctcttgcctcgaacaaccagacagctgccaaccgtaccgaagttccttctatgcactcgaggagaaacatgtcggcttcagcctggacgtgggggagatagaaaagtatcaggaggtcgaggaggaccaggaccccagttgccccagactcagtcgagagttgctcgctgagaaagagccggaggtgctccaggactcactcgatcgatggtattcaactccctctgtctacttgggtcttaccgatccctgtcaaccttaccgtagcgctttctatgtcttagagcagcagagggtggggctggccgttgatatggatgaaatcgagaaatatcaggaggtagaggaggaccaggatccgagctgccctcgcttgagtcgggagctcctggcagaaaaggaaccggaggttctacaagattccctagatcggtgttattctaccccatcggggtatctggagttgcctgacctgggccagccgtatcgttccgctgtgtactccctggaagaacagtatctgggcctagccctggacgtggaccggattaagaaagatcaagaagaggaggaggatcagggtccgccatgcccaagactgtcccgggaactcctcgaggtggtggaacccgaggtgttgcaagatagcctcgataggtgctatagcaccccgagctcttgtctggagcaacccgattcctgccagccttaccgcagttcattctacgctttagaggaaaaacatgtcggctttagcttggacgtgggagaaattgaaaagaaagggaagggaaaaaaacgcagaggtcggagatcgaagaaaaagcggagacgtggccgtaaggagggagaagaggatcagaaccccccttgccctcgtctctcaagagagctactagcggagaaagaaccggaggtactccaggacagcctggacagatggtattctaccccgtccgtgtacctgggcctcactgacccttgtcaaccctacagaagcgctttttacgtgctcgagcagcaaagggttgggctcgccgtggacatggacgagatcgagaagtatcaggaagttgaggaagaccaagatccctcctgcccacggttgagccgagagctcctggctgagaaggaacctgaggttttgcaggattccttggaccggtggtattccacgccttccgggtaccttgagttacccgacctgggccagccctaccggagtgccgtgtattccttggaagaacaatacctgggacttgctctcgacgttgacaggattaagaaggatcaagaagaggaggaagaccagggtccaccttgtcctcggttgtcccgagagctgctggaggtggtcgagccggaggtcctgcaagatagcctggacaggtgctattcgacaccgagcagctgccttgaacaacctgacagttgccaaccttatcggtcaagtttttatgcccttgaggagaagcacgtggggttctcactcgacgtgggcgaaatcgagaagaagggaaaagggaagaaacgtcggggtaggcgctccaagaagaaacggagacgcggacggaaagagggggaggaggaccagaacccaccctgccctcggctgtcgcgcgagttgttagctgagaaagaaccagaggtacttcaagactctctcgaccggtggtattccacgccatcagtctacctaggtctgacggacccatgtcagccatatcggtccgcattttatgtgctcgagcagcaaagggtcgggctggccgtcgacatggatgagatcgaaaagtaccaggaagtcgaggaagatcaagatccgtcttgcccgaggctgagtcgcgaactgctggcagaaaaggaacctgaagtgctgcaggattctttggatcgatgctactctacaccttcaggctacctcgagctccctgatctgggacagccctaccggtccgctgtttattcccttgaggagcagtacctgggcctcgctctggacgttgatcgcatcaagaaggaccaagaagaggaggaagatcagggcccaccttgtccacgtctttctagggagttgctggaagtcgtcgagcctgaggtgctgcaggattcattggacaggtgctattctacccctagctcctgtctcgagcaacctgactcctgtcagccgtaccggagttcattctatgccctggaggaaaaacacgtggggttcagtctggatgtcggagaaatagaaaagaaaggaaagggcaagaagcggagaggccgaaggagcaagaagaaacgacgcagggggcgtaaggagggggaggaggatcagaatccaccctgtcctcgactgtctcgggagcttctggccgagaaggagcctgaggtgctgcaggatagtttggaccgctggtatagtacaccatccgtttacctgggccttactgacccttgtcaaccttgcaggtccgcgttctacgtcctggaacagcagcgagtcggcctggctgtcgacatggacgaaatcgaaaaataccaggaagtggaagaggatcaagacccctcgtgtcctcggctgagcagggagctcttagccgagaaagagccagaggtcctgcaagacagtctggatagatgctattccacaccatcaggctatctcgaactgccagacctcggccagccttaccgcagcgccgtctattccctggaggagcagtaccttggactggctctggatgtagacagaattaaaaaggaccaagaggaagaggaggatcaggggcctccgtgtcctcggctctcacgcgaattgttggaggttgtcgaacccgaggtcctgcaagatagccttgatcgttgctattcaactccaagctcttgtctggagcaacctgactcgtgtcagccatatcgtagctcattctatgcattggaggagaaacacgttggattcagccttgatgtgggcgagatagagaagaaaggtaaaggtaaaaagagacgaggtcgcagaagtaaaaagaagaggagacgcggtcggaaagagggggaggaggaccaaaatccaccttgtcccaggctcaactctgttctgatggaagtcgaggagccggaggtgttgcaggactccttggatagatgctactcaaccccttctatgtacttcgaattaccagattcgttccagcattatcgttcagtgttttacagtttcgaggagcagcatatcaccttcgcattagacatggataacagtttctttaccctaacagtgacctcgctgcatctcgtttttcaaatgggagtgatctttccacagtaa

SEQ ID NO: 232348 - DNA, 234 bp, synthetic construct
  misc_feature 1..234: note = Description of Artificial Sequence: Synthetic coding sequence
  source 1..234: mol_type = other DNA
atggacgagatcgagaaataccaagaggtcgaagaagatcaggaccccagctgccccaggttatctagggagctgttagctgaaaaagagcccgaggttctgcaggactccctagatcgttgctactcaactccatctggctacctcgagttgcccgatctgggccagccctaccgatcggccgtttatagcctcgaagagcagtacctggggcttgcccttgacgtggactag

SEQ ID NO: 232349 - DNA, 2517 bp, synthetic construct
  misc_feature 1..2517: note = Description of Artificial Sequence: Synthetic coding sequence
  source 1..2517: mol_type = other DNA
atggttgtgtcagccggtccgtggagctcggagaaggctgagatgaatatcctggaaatcaatgaaaagctgcgtccacagcttgcggaaaataaacaacagtttcgcaatttaaaggaaagatgcttcttgactcagcttgctgggttcctggctaatcgtcagaagaagtacaaatacgaagagtgcaaggacttgattaaatttatgttaaggaatgagcgccaatttaaggaggagaagctggctgaacagctgaagcaagctgaggagcttaggcagtacaaagtccttgtgcacagccaggaacgtgagcttactcaactaagggaaaagctacgggagggacgcgatgcctccagaagcctcaacgaacacctgcaagctttgttaactccggacgaacctgacaaatctcaaggccaggacttgcaggagcagttagcagagggatgccgtctggcccagcagttggtgcagaagctgtctcctgagaacgacgaggacgaggatgaggacgtacaggtcgaggaggacgagaaagtgctggagtcctctgctcccagggaagtgcagaaggcggaagaaagcaaagtacccgaggactcactggaagaatgcgccattacatgtagtaatagccatggcccatgcgactccaatcaaccccataaaaacattaagatcacatttgaagaagacaaagtgaacagttccctggtggtcgatagagaatatagccatgacgaatgtcaggacgctctcaatattttacctgtgccgggacccactagttcagctacaaacgtgtcaatggtcgtgagtgctggccctctgtcgtctgagaaagcggagatgaatatactcgaaatcaatgagaagcttcgtcctcagctcgcggagaagaaacagcaatttcgctctctgaaagagaagtgctttgttacccaggtggcctgctttctggcaaaacagcaaaacaagtataagtatgaggaatgtaaggacctgattaagagtatgctcaggaatgaactgcaatttaaagaggagaagctggctgaacaattaaaacaggctgaagagctccggcagtacaaggtgctggtacacagtcaggagcgggagcttacacagctgcgggaaaaactgcgcgagggaagggacgcttccaggagcctgaatgagcaccttcaagcacttctgaccccagatgaaccagacaagagccagggccaggatctacaggagcaactggccgagggctgtagacttgcccaacacctggtacagaagctgtcccctgagaatgacaacgacgatgatgaggatgtgcaggtggaggtggccgaaaaggtgcagaagtcatctagccccagagagatgcagaaagcagaggagaaagaagtgccggaagactcgcttgaggaatgtgctatcacctgctctaactcccacgggccttatgatagtaatcagccccaccgcaagccaaagagccacctgcgcaagacaaaatccacacagctttcacttgcgcatcccctaatgctgaatggcaggatgttgtacacactttcacagaaaatgaaggtgatgatgcgtaaacggaagaagaagggacaatgtctgcctggcatctgtcggagtcttaaaaggcggaagtcccctcgatcgccaggaatgaaggtgatccgcttatctcaattcttgttgaaaggacaccgctgggaccaggtgaaaaaagaagaccaggaggcaactgggccacgcctctcccgggaattactggccgagaaagaaccggaggtgctccaggactcccttgaccgttgttacagtacaccgagcgtctatctgggtcttacggacagctgtcaaccctacaggagtgctttctacgtgttagaacaacagagagtcgggcttgctgtggacatggacgaaatcgagaaatatcaggaagtggaagaagaccaggatccatcttgcccccgattgtcccgggagctgctggcagagaaagaaccggaggtcctccaagactcccttgatcgctgttattccactccttccggttatctggagctgcccgatctcgggcagccttatcgaagcgctgtgtacagtttggaagagcagtatctcggactggcactcgacgtagatcggatcaagaaagatcaggaggaggaggaagaccagggcccaccttgtccaaggttgtctcgcgagctgctcgaagtagttgaacctgaagtgctgcaagatagcctggacgttatccagctgctgccggtggttctcaactctctgacccctgctagccccactgaggtcccctttatgcattggcgcaagaacatgctggcctttctcctaacgtgggagaagcttaaaagaagagggcgtgggagaaaagagggcgaggaggatcaacgcaggaaggaagaaggagaggagaagaagggtaagaaaataaagactcatcatgcacctgggtctacagcatgctag

SEQ ID NO: 232350 - DNA, 288 bp, synthetic construct
  misc_feature 1..288: note = Description of Artificial Sequence: Synthetic coding sequence
  source 1..288: mol_type = other DNA
atcgccgagatcgagaaataccaagaagtggaggaagatcaggatcccagctgtccccgactcagcagagaactgctggcagaaaaggaaccagaagtgttacaggacagccttgatcggtggtatagtacaccatctgggtatctcgagctaccagatctgggtcaaccttaccgcagtgccgtgtattctctagaagagcaatacctgggcttggcattggatgtggacaagatcgaaaagtaccaggaggtcgaggaggaccaggacccctcctgtccacgctag

SEQ ID NO: 232351 - DNA, 234 bp, synthetic construct
  misc_feature 1..234: note = Description of Artificial Sequence: Synthetic coding sequence
  source 1..234: mol_type = other DNA
atggatgaaattgagaagtatcaagaagtggaagaggaccaagacccgtcgtgtccacggctgtctagagaactgctggctgaaaaggaacccgaagtgctccaggactcactggacaggtgttactccaccccaagcggctacctcgagctacccgacctcgggcaaccataccgttccgctgtgtactcgctggaggagcagtatcttggtctggccttggacgtcgactag

SEQ ID NO: 232352 - DNA, 2784 bp, synthetic construct
  misc_feature 1..2784: note = Description of Artificial Sequence: Synthetic coding sequence
  source 1..2784: mol_type = other DNA
tgagaccttataaaatcaatgctgcgcaatgagcggcagttcaaggaagaaaaactggccgagcagctgaagcaggctgaggagttaaggcaatataaagtcctggttcatgctcaggagcgggaactgactcagttgcgagaaaagttacgggaggggcgagacgcctctcggagcctcaatgagcacctccaagccctcttgactccagatgagccggacaagtcacagggccaggatttacaggagcagctcgctgagggctgcagacttgcacagcaccttgtgcaaaagctgtcgccggagaatgataatgatgacgatgaagacgtacaggttgaggtcgctgagaaagtgcagaagtcttcagctccacgcgaaatgcagaaggcagaggaaaaggaggtgcccgaggactctttagaagagtgcgctatcacctgttcaaactctcacggaccctacgacagcaaccagccccatagaaagaccaagatcacatttgaggaagataaggtcgacagcaccttaattgggtccagcagtcacgtggagtgggaggacgctgtgcacatcattcctgaaaatgaatctgacgatgaagaagaggaggagaaagggcctgtgagccctaggaatcttcaggagtccgaagaggaagaggtaccccaggagtcttgggatgagggctacagcactttatccattccaccagaaatgctcgctagttacaagagctattcttctactttccactcactcgaagaacagcaagtgtgtatggcggttgacatcggcagacaccgctgggaccaggtaaaaaaggaagatcatgaggccaccgggcctcgcctgagccgcgaactgctcgacgagaagggcccagaggttctccaggactctctcgaccggtgctacagtacgccatccggctgccttgaactcacagactcttgtcagccctatagatcagcattctatgtcctggagcagcagcgtgtgggcttggcagtaaacatggacgagattgaaaaatatcaggaggttgaggaagaccaggacccaagttgccctagactaagcagggaactcttggacgagaaagagcctgaagtgctgcaggattccctgggacgctgctattcaactccctctggatacttggagctgcccgacctggggcagccctactcatccgcggtctattctctggaggagcagtatctggggcttgctctggacgtggacagaattaagaaagatcaggaggaggaagaggaccaaggccctccctgccctcgtttatccagagagctactggaagtggtggaacctgaggttctgcaggactccctggataggtgttactcgaccccttcatcatgcctggaacagccagatagctgccagccctacggatcaagcttctatgctttagaggagaaacatgtggggttttcactggacgtgggtgagattgaaaagaaaggtaaaggaaagaagcgtcgagggcgaagaagtaaaaaagagaggcgccgaggacggaaggaaggagaggaagatcaaaacccgccatgcccaagactctcccgggaactactggatgaaaaaggccctgaggtgctgcaggactcgttggatcgctgctattctactccttcgggatgtctcgagttgaccgactcttgtcagccatataggtctgctttttatatcctagagcagcagagggtgggactggccgttgacatggacgagatcgagaagtaccaagaggtggaagaagaccaagacccgtcgtgtcctcgtctctccggggaactgctggacgagaaagagcctgaggtcttgcaggagagtctagacagatgctacagcacccccagtggctgtctggagctgacggactcttgccaaccttatcggagcgctttttatatcttggaacaacaacgagttggcctggcggtggacatggatgaaatcgagaaataccaagaagttgaagaggatcaggacccctcatgcccgagactttccagggagctccttgacgagaaagagcccgaggtgctccaagacagcctgggaagatgctactccacccctagcggctacctggagcttcctgaccttgggcagccgtacagctccgcagtttacagtttagaagaacagtaccttgggctggctcttgacgtggacaggattaaaaaagaccaggaggaggaggaggaccagggacccccatgtcctcggctgtccagggaactgttagaagtggtcgagccggaagtgttacaagactcactcgatagatgctacagtacgccctcctcttgtctggagcagcccgacagttgccagccgtatggcagctccttttacgcattggaagagaagcatgtaggattttctctggacgttggcgagatcgaaaaaaagggcaaaggcaaaaagcgacgagggaggcgttctaagaaggaacggagaagaggcagaaaagagggagaagaagatcagaaccccccatgccctagactgaactctatgttgatggaagtggaggaacctgaagtattgcaggacagccttgacatctgttatagcacccccagtatgtacttcgagctccctgactcatttcagcattaccgctccgtgttctattctttcgaagaagagcatatatccttcgccttgtacgtggacaacaggtttttcacactgacagtgacctctcttcacttggtctttcagatgggcgtgattttcccacagtag

SEQ ID NO: 232353 - DNA, 2766 bp, synthetic construct
  misc_feature 1..2766: note = Description of Artificial Sequence: Synthetic coding sequence
  source 1..2766: mol_type = other DNA
atgctgcggaacgaacggcagttcaaagaagaaaagttggcagaacagttgaagcaggccgaggagctcaggcagtacaaagttcttgtgcacgcacaagaaagggaactgacacagctgcgcgagaaactacgtgagggtagggacgcatctagatccctaaacgagcatctccaggccctcttaacccccgatgaacctgataagagccaggggcaggacctgcaagaacaactggccgagggatgccggctggctcagcatttagtgcagaagctgtccccggagaacgataatgatgacgacgaagacgttcaagtggaggtggccgaaaaagtgcagaaatcatcagcacctcgagagatgcagaaggctgaagaaaaagaagtccccgaggattctctggaggagtgtgctattacctgtagcaattcacatgggccttatgacagcaaccaaccacaccggaaaaccaagatcaccttcgaggaggataaggtggattctacactgatcggaagctcttcccacgtagagtgggaagatgccgttcatattattccagaaaatgaatcagacgatgaagaagaggaggagaaagggccagttagtccccgtaatctccaggaaagtgaagaagaggaggtgcctcaagaatcctgggacgagggctactccaccctcagcatccctccggagatgttggcctcctacaaaagttacagctccactttccattccctggaagagcagcaggtgtgtatggccgtggatataggacgccaccgttgggaccaggtgaagaaagaggaccatgaggcaactggtcccaggttgagccgcgagctgcttgacgagaaggggcctgaagtgctgcaggattcacttgatcggtgttacagtacaccatctggttgtcttgagttgacggatagctgccagccctaccgatctgccttctatgtactggaacagcagcgcgtcgggcttgccgtgaacatggacgagatcgaaaaatatcaggaggttgaggaagatcaagatcccagctgccctcggctcagtagagagctgctggatgaaaaagagccggaggtgttgcaggattccctgggtcgttgttactcgacaccatccggatacttggagttgcccgacctgggccagccatattccagcgctgtgtattctctggaggagcagtacctaggcctcgccctggatgtggacagaatcaagaaggatcaagaggaggaggaggaccagggccctccgtgcccacggctgtctagagaattactggaagtggtggaacctgaggtgcttcaggacagccttgatcggtgctattccacaccctcctcctgtcttgaacagcccgactcttgccaaccgtacgggtcttccttctacgctctcgaagaaaagcacgtgggcttttctctggacgtcggagaaattgaaaaaaaggggaagggcaagaaaaggcggggacgccgaagcaagaaggagcgcaggcgcggaaggaaggagggcgaagaggaccagaaccccccatgccccagattgagcagagagctcttggacgaaaagggcccagaggttctccaggacagcttggacaggtgttatagtaccccatcaggatgtctcgaactgacagattcctgccagccctaccgctcagcattttatattttggagcagcaacgcgtcgggctcgccgtggacatggacgaaatcgagaaatatcaggaggtcgaagaggatcaagatcctagctgccccagactgagtggagagctgcttgatgagaaagaaccagaagtgcttcaggagtcattggaccgctgttactcaacgcctagcggatgcttggagctgaccgactcctgtcaaccttatcgcagcgctttctacatccttgaacagcagcgcgtgggcctggcggtagacatggacgagattgaaaaataccaggaggtggaggaggaccaggacccttcctgtcctaggctgtcccgggaactgctggacgagaaggaaccggaagttctgcaggattccctggggaggtgctactcaactccatccggatatctggagctgcctgacttaggacagccatattcttctgctgtgtactccttagaggaacagtatctcggactcgctttggatgtggatcggatcaagaaggaccaggaggaagaagaagatcaaggacctccctgtcccagactgagtagagagctgttggaggtggtcgagccagaagtactgcaagattcgctggaccggtgttactccaccccctcttcctgtctggagcaacctgacagttgccaaccctacgggagcagcttttacgccctggaggaaaaacacgtcggattctctctggatgttggagagatagaaaagaaaggcaagggcaagaagcggcgtggacggaggtcaaagaaagaaaggcgtcgaggaaggaaagaaggcgaggaagatcagaaccccccttgcccgaggctgaatagcatgttaatggaagtggaggaacccgaagttctccaggattccctggatatctgctactccactccatcaatgtactttgaactgcccgacagctttcagcattatagatcagttttttacagttttgaagaggaacacattagctttgccctgtatgtggacaacaggttcttcacccttactgtgaccagtctgcatctggtattccagatgggggtaatctttcctcaatag

SEQ ID NO: 232354 - DNA, 810 bp, synthetic construct
  misc_feature 1..810: note = Description of Artificial Sequence: Synthetic coding sequence
  source 1..810: mol_type = other DNA
atggacgagattgaaaagtaccaagaagtagaggaggatcaagacccttcatgccctcgcctgtctcgtgagctgctagacgagaaagagccggaagttctgcaggattctctgggcaggtgctactcgactcctagtggatacctcgagctgccggatctcggacaaccctactcgtcggccgtctactcactggaagaacagtaccttggcttggctcttgatgttgacaggattaagaaggatcaagaggaggaagaggaccaaggcccaccttgtcctcgactgtcacgcgagttactggaggtggtggagcctgaagtcctgcaggatagcctggatagatgctatagtaccccaagcagctgtctggaacagccggatagttgtcagccttatgggagtagcttttacgcgctggaggagaaacacgtcggcttcagcctcgacgtcggagagatagagaagaagggaaagggaaagaagaggcggggtaggaggtccaagaaggagaggagaaggggcaggaaggagggcgaagaggaccagaacccgccttgccccaggctgaatagcatgctgatggaggtcgaggagcctgaagtccttcaggacagtttggatatttgctatagtaccccttctatgtactttgaactgcccgattcattccagcattataggtccgtgttctattcctttgaagaggagcacatcagtttcgcgctttacgtcgataatcgattctttacactgaccgtgacttccctgcaccttgtgttccaaatgggggtgatcttcccacaatag

SEQ ID NO: 232355 - DNA, 1539 bp, synthetic construct
  misc_feature 1..1539: note = Description of Artificial Sequence: Synthetic coding sequence
  source 1..1539: mol_type = other DNA
tgatatgaggaatgcaaagacctcattaaatcaatgcttcgcaacgaaaggcaattcaaggaggagaaactcgccgagcagctgaagcaagctgaggagctgcggcaatataaggtattggtgcacgcccaggagagggaactgacacagctgcgcgagaaactgcgtgagggaagagatgcctctagaagtctgaacgagcacttacaggcgttgctaactcccgacgagcccgacaagtctcagggccaggaccttcaggaacagctggccgaagggtgccggctggcccagcacctggtccagaagctctccccagaaaacgacaacgatgatgacgaggacgtccaggtcgaagtggccgagaaggtccaaaaatcctcagccccacgcgagatgcagaaggccgaggagaaagaagtgccggaagatagcctagaggaatgtgcgatcacttgttctaactcccatgggccatatgactccaatcagccccacaggaagaccaaaatcacttttgaggaggataaggtggattccaccctcatcggttcaagttcccacgtcgaatgggaggatgctgttcatatcatacctgagaacgagtcggacgatgaggaagaggaggagaaagggccagtctccccaagaaatctgcaagagtcagaggaagaggaagtgccccaggagtcctgggatgaagggtactccaccctttctattcctcctgagatgctcgccagctataagtcctacagcagcactttccactccctagaggaacagcaggtgtgcatggccgtagatattggaagacaccggtgggatcaggttaaaaaggaagatcacgaagccacaggtccgcgtctgagtcgcgagctgctcgatgaaaaggggcctgaggttctacaggattcacttgaccggtgttatagcacaccaagtggatgcctggaattaactgattcatgccaaccttacagatccgcattctacgtgctggagcagcagcgtgtgggcctcgccgtaaatatggatgagatagaaaagtaccaagaggttgaggaggaccaggacccttcctgtccacgcctgtcccgggaattactcgatgagaaggaacctgaggtcttgcaggatagcctgggtagatgttactccacccccagtgggtacctggagctgcctgacctcggccagccatatagctcagccgtgtattccctggaagaacagtacctcggtctcgccctagacgtagaccgaatcaaaaaggaccaggaagaggaggaggatcaggggcctccttgtcctagactgtccagggagctactcgaggttgtggaaccagaggtgctgcaagatagtctcgacagatgctacagcacccctagctcttgcctagagcagcccgatagttgccaaccatacggctctagcttctacgctctggaggagaagcacgtgggatttagcctggacgtaggggaaatagaaaagaagggtaaaggcaagaaaagacgcggtcggagaagctag

SEQ ID NO: 232356 - DNA, 567 bp, synthetic construct
  misc_feature 1..567: note = Description of Artificial Sequence: Synthetic coding sequence
  source 1..567: mol_type = other DNA
atggatgagattgagaagtatcaggaagtcgaggaagatcaggacccttcctgccctcgcctctccagggagctgcttgacgagaaagaacccgaggtgctgcaggactcacttggtcgttgttattccactccttccgggtacctcgaattgcccgatctcgggcagccgtacagtagcgccgtctatagcctcgaggaacaatatctcggcctcgcactggacgttgacaggattaagaaggaccaggaagaagaagaggaccagggtcctccatgcccaagactgtctcgagagttactggaggtggtggagcccgaggttttacaggactccttagaccgatgctactccactcctagctcttgtctcgaacaacccgacagttgccaaccttatggcagttcattctacgctttagaggagaagcacgtgggtttttcactggacgtcggagaaatcgagaaaaaaggtaaggggaaaaaacgacggggtcggaggtccaagaaagagaggagacggggaagaaaggagggagaggaagaccaaaatccgccttgtccctag

SEQ ID NO: 232357 - DNA, 1539 bp, synthetic construct
  misc_feature 1..1539: note = Description of Artificial Sequence: Synthetic coding sequence
  source 1..1539: mol_type = other DNA
tgatatgaggaatgcaaagaccttatcaagtcgatgctgcgtaatgaacgacagttcaaggaagagaagctggcagaacagcttaaacaggccgaggagttgcggcagtacaaggtactcgtgcacgcacaggagagggagctcactcagttgagggaaaaactaagggaaggcagagatgcatctcggagcctgaatgagcacctgcaggccttgctcacacctgacgaacccgataaaagccaaggtcaggacctccaagagcagctggctgagggctgtcgactcgcgcaacacctcgttcagaagctgagtcccgagaatgacaacgatgatgacgaagatgtacaggtcgaggtggccgagaaggtgcagaagagtagcgccccacgtgaaatgcagaaagcggaggaaaaagaggtccctgaagactctttagaggagtgcgcaattacgtgttctaattcacatggcccatatgattccaaccaacctcatcgaaaaaccaaaataacgtttgaagaagataaggttgatagtacgctcattggttcgagcagtcatgtagagtgggaggatgcagtccatatcattccagagaacgagtctgacgacgaagaggaagaggagaaggggccagtctcccctaggaacctgcaggagagtgaagaggaggaagtgccacaagaatcctgggatgaagggtatagcacactgtctataccccctgaaatgctggcatcatataagagctactcttcaacatttcatagccttgaggagcagcaggtgtgcatggcagttgacattggccgtcatagatgggaccaggtgaagaaggaggaccatgaggccactggccctcggctctcccgggagctgttggatgagaaagggcctgaagtactccaggactctctggatcgctgctatagtactccaagcggttgtctggagcttactgattcgtgccaaccttatcgttccgcattctacgtgctagaacaacagcgcgtcgggttagcagtgaacatggatgagatagaaaaatatcaggaggtggaggaagatcaagaccctagctgtcctaggctcagtcgggaactgcttgatgagaaggagccggaggtgttgcaagattccttggggaggtgctactcgactccctcgggctatctggaactgcccgacctgggccagccatacagcagcgccgtctacagccttgaggaacaatacctcggcctggcacttgacgtcgaccggataaaaaaagaccaggaggaagaagaggaccagggcccaccctgtcctagactgtctagagagctattggaggtcgttgagcctgaggtcttgcaggactctctggatcggtgttacagcacacccagttcatgcctcgaacagcccgactcttgtcagccatacggttccagtttctatgcgttagaagaaaagcatgtgggctttagtctggacgtgggagagatcgagaaaaaggggaagggcaaaaagcggagaggccgtcgtagctag

SEQ ID NO: 232358 - DNA, 1539 bp, synthetic construct
  misc_feature 1..1539: note = Description of Artificial Sequence: Synthetic coding sequence
  source 1..1539: mol_type = other DNA
taatacgaggagtgtaaggacctgataaagtccatgttacggaacgaacggcagtttaaggaagaaaagctggcagagcagctcaaacaggcagaggagctgaggcagtacaaagttctggtccacgctcaggaacgggagttaactcagctacgtgagaaactgcgcgagggccgtgatgccagtaggtcactgaacgagcacctgcaggccctgcttacaccagacgagccagacaaatctcagggtcaggacctgcaagaacaacttgcggagggctgtaggctggcacagcacctggtccagaaattatcccccgaaaatgacaatgacgatgatgaagatgttcaggttgaggtggccgagaaggttcaaaagagttctgcccctcgcgaaatgcagaaagcagaagagaaggaggtccctgaagattctctggaggagtgcgctatcacatgctctaattcccacggcccatatgactccaatcaaccccatcgcaaaactaaaatcactttcgaagaagataaggtggacagcacactgatcgggagcagctcccatgtggaatgggaggatgccgtgcacattatccccgagaatgagagcgacgatgaggaagaggaagagaagggtccagtttctcctcggaatctgcaggagtcggaagaagaagaggtgcctcaggaatcttgggacgaaggctacagcacactgtctatcccccctgaaatgttagcgtcatataaaagttattccagtacgtttcactccctcgaagaacaacaggtttgtatggcggtcgacataggtcgtcataggtgggatcaggtcaaaaaggaggatcacgaagctacagggcctcgactttcccgggaacttctggacgaaaaaggccctgaagtcttacaggactcgctggacagatgctacagcactccaagcgggtgcctcgaactcaccgactcctgtcagccttataggtctgcattttacgtccttgaacaacagcgagtggggctggcagtcaacatggacgaaatcgaaaaataccaggaagtggaggaagaccaagatccttcttgccctcgcctgtcccgcgagttgttggacgaaaaggagcctgaagtccttcaagatagcctcggccgttgctattcgacaccctccggttatctcgagttgcctgacctggggcagccatattcctctgccgtgtattccttggaagagcagtacctgggcctggccttggatgtggataggatcaaaaaggatcaggaggaggaagaggatcagggcccaccttgcccccgactgtctagggagttgttagaagtagtggagcctgaggtactgcaggactctctggacagatgttacagcaccccttccagttgcctggaacaacctgatagctgccagccatacggctcttctttctatgccctggaggaaaaacacgtcgggttctccctggatgtcggcgaaatcgaaaaaaagggcaagggaaaaaaacgcagggggcgaaggtcctag

SEQ ID NO: 232359 - DNA, 753 bp, synthetic construct
  misc_feature 1..753: note = Description of Artificial Sequence: Synthetic coding sequence
  source 1..753: mol_type = other DNA
gaaatcgaaaaataccaggaagttgaggaggaccaggatccatcttgccctcggctgagtcgcgaactgctggatgaaaaggaacccgaagtgcttcaagactctctcgggagatgttactccaccccctccggctaccttgaattacctgatctgggacagccctattcatccgcagtgtactcactggaggagcagtatctgggtttggccctggacgtcgaccgcattaaaaaggaccaggaggaggaggaggatcaaggcccaccatgccctaggctgtctagggaactgctggaggttgtcgaacctgaggtcctgcaagattctctggacagatgttactccactccgagttcatgtcttgagcagccagacagctgccagccgtatgggtcttcattctatgcactcgaagagaaacacgtgggcttttccctggatgtgggggagatagagaagaaaggcaaggggaaaaagcgtaggggacgacgcagtaaaaaggaacgtcgccgaggtcggaaagagggcgaggaagatcaaaatccaccatgcccaagactctctggagagctgctagatgagaaggaaccagaggtgttacaggagtccctggacagatgttatagcaccccatcaggatgcctagagctcacagactcctgccagccctacaggtctgctttctatattctcgagcagcagagggtaggattagccgtagatatggacggagagtacctgagcatgtag

SEQ ID NO: 232360 - DNA, 1539 bp, synthetic construct
  misc_feature 1..1539: note = Description of Artificial Sequence: Synthetic coding sequence
  source 1..1539: mol_type = other DNA
tgatacgaagagtgtaaagacctcattaaatcaatgctcaggaacgaaagacagttcaaggaggaaaaactggcagaacagttaaaacaggccgaggagctgaggcaatacaaggttttagtccatgcccaggagcgggaactgacacagttgagagagaagctgcgcgaaggacgtgacgcctctagaagtctgaacgaacatctccaggcactgctgacacccgacgaaccggacaagagccagggccaggacctgcaagagcagctagccgaagggtgcaggttagcccagcacttagtccagaaacttagtcctgagaacgacaacgacgacgatgaagacgttcaagtggaggtggcagagaaggtacagaaatcctccgccccaagagaaatgcagaaagccgaagagaaagaagtacccgaagactcccttgaagaatgtgccataacttgttccaacagtcatgggccatatgactccaaccagcctcaccggaagaccaaaattacattcgaggaggataaggtcgactcgactcttatcggtagttccagccacgtggaatgggaggatgcggtgcatatcatacccgagaatgagagcgatgacgaggaagaggaagagaaagggccagtctcccccaggaacttacaggaaagcgaagaggaggaggtcccccaggagagctgggatgaggggtattcgactctgagcatcccaccagagatgctcgcgtcttacaaaagctacagttctactttccactcactcgaggaacagcaggtgtgcatggcagtcgacatcgggagacataggtgggatcaagtcaagaaggaggatcacgaagcaacgggtcctagactttctagggagctgttagacgaaaagggtcctgaggtgctgcaggattcattggatcgatgttatagtacaccaagcgggtgtcttgaactgacagactcatgtcaaccctacagaagtgcattttatgtcttagagcagcagcgagtagggctcgcagtgaatatggacgagatcgagaagtatcaggaagttgaggaggatcaggatccttcctgtccccgactttctcgggagctcctcgatgagaaggagccagaggtgttgcaggactctttagggcgatgctattcaacccccagcggctacctggaactacccgacctcggtcagccatattcttccgctgtttattctttggaggagcagtacttgggattagctttggatgttgataggatcaagaaagatcaagaggaggaagaggatcagggaccaccatgccccaggctgtcgcgcgaactgttggaggtagtggaacctgaagtgctacaggactcactcgaccggtgctattcaacacccagcagctgtctagagcaaccagactcctgccaaccctacgggtcaagtttctacgcacttgaggaaaagcacgtggggtttagtctcgacgtgggtgagatcgagaagaagggaaaaggcaagaaaagaagaggcagacgctcttag

SEQ ID NO: 232361 - DNA, 1539 bp, synthetic construct
  misc_feature 1..1539: note = Description of Artificial Sequence: Synthetic coding sequence
  source 1..1539: mol_type = other DNA
tgatatgaagagtgcaaagatctgatcaaaagcatgcttagaaacgagagacagttcaaggaagagaagttggccgaacagctcaaacaagcggaagagctcaggcaatacaaggtcctggttcacgcgcaggagcgggaactgactcagcttagggagaaattgagggaggggagagacgcttcaagaagccttaatgaacatctgcaggcgctgctcacgcccgacgagcccgacaagtctcaaggacaggacctgcaggaacagcttgcagagggatgtagacttgcgcagcaccttgtccagaagctgagccctgaaaatgataacgacgatgacgaggatgtgcaagtggaggtggctgagaaagtgcaaaagagcagcgcccctcgggagatgcagaaggccgaagagaaagaagttccagaggactctctggaggagtgtgcgattacatgctccaatagtcatggaccctacgactccaaccaaccccatcgtaaaaccaaaatcaccttcgaagaggacaaggtggattcaactttgatcgggagctcctcacacgtcgaatgggaggacgcagtccacatcatacccgaaaacgaatccgacgacgaggaggaggaagaaaaaggacctgtgagcccgagaaatttacaggagtccgaagaggaagaagtgcctcaggagtcttgggatgaaggatattctaccttgagcatcccacccgaaatgcttgctagctataagtcctacagctctacgtttcactctctagaggaacagcaggtctgtatggccgtagacatcgggagacataggtgggatcaggttaaaaaggaggaccacgaagcgaccggcccacggcttagcagggaactgctggacgaaaaggggccagaggtgcttcaagactccctggacaggtgctactctacacccagcggctgtttggaactcacggatagctgtcagccctatcgctctgctttctatgtgcttgagcaacaacgagtgggcctggctgtcaatatggacgagatcgagaaataccaggaggtagaggaagaccaagacccctcttgccccaggttgtctcgcgagttgttggatgagaaggaacctgaggtactgcaggatagccttggacgctgttactctactccatccggttatttggaattacccgacctggggcagccatactcatcagccgtttatagtctggaggaacagtatctgggcctcgcattggacgttgacagaattaaaaaggatcaggaagaggaggaggaccagggtcctccctgcccaaggctgtccagggagctgcttgaggtggttgagcctgaagtgctccaggactccctggaccggtgttacagcacccccagctcttgcctcgagcagcccgacagttgtcaaccctacggatctagcttttatgccctggaagaaaaacacgtgggtttcagcctggatgttggcgaaattgagaaaaagggtaagggtaaaaaaaggcgcggaaggagaagctag

SEQ ID NO: 232362 - DNA, 1539 bp, synthetic construct
  misc_feature 1..1539: note = Description of Artificial Sequence: Synthetic coding sequence
  source 1..1539: mol_type = other DNA
tagtacgaggagtgtaaggacttgatcaaatcaatgctgagaaatgaacgccagtttaaggaggaaaagctagccgagcagctcaagcaggccgaggaacttaggcagtataaagtacttgtgcacgcacaggagagagaactgacccagctgcgagaaaaactcagggaaggcagggatgccagccgttctctcaatgaacaccttcaggccttgctaaccccggacgagcctgataaatctcaggggcaagatctccaggagcaattggcagagggttgccgcctggctcagcacttggtgcagaaattaagtcctgaaaatgataacgatgatgatgaggatgtccaggtggaggtagccgaaaaggtccaaaagtcatctgcaccgagggagatgcaaaaagccgaggaaaaagaagttcccgaggatagcttggaggagtgcgctataacctgttcaaactcccatggcccttatgattcaaaccagccacacagaaagactaagattactttcgaggaagacaaggtggacagcacattgatcggctcctcctctcacgtagagtgggaagacgctgtccacatcattcccgaaaatgagagcgacgacgaggaggaggaggaaaagggcccagtatctcctcgcaatctacaagaaagcgaagaagaggaggtgcctcaggagagctgggacgaaggctactctacactgtcaatacctcccgaaatgctggctagttataaatcctactctagtacattccactctttggaagaacaacaggtatgtatggccgtggacatagggagacacaggtgggaccaggtcaagaaggaggaccatgaagccactggaccgcgactgagtcgggaactgctcgacgaaaaaggaccagaagtgttgcaggacagcctagaccgctgttatagcactccttctggatgtctggagctgacagatagctgccagccatatagatcagccttctatgtgctagaacagcaaagggtagggttagccgtcaacatggacgagattgaaaaataccaggaagttgaggaggaccaagacccaagttgtccaaggctgagtcgcgaactgctggatgaaaaggagcccgaagtattgcaggacagcctgggcaggtgctacagcaccccctctggctacctggagctacccgacctaggacagccatactccagtgccgtttactctcttgaggagcagtacctgggcctggcgctggacgtggatagaatcaagaaggaccaggaggaggaggaagatcagggcccaccctgccctcggctgtcaagggaattgttggaggtggtggaacccgaagtcttacaagattctttggacaggtgttattctacaccctcttcttgtctggaacagccggatagttgccagccctatgggtcaagcttttacgccctggaggaaaaacacgtgggcttttccctggatgtgggcgagattgagaaaaagggaaagggcaagaaaaggcgcggtaggcggtcatag

SEQ ID NO: 232363 - DNA, 1539 bp, synthetic construct
  misc_feature 1..1539: note = Description of Artificial Sequence: Synthetic coding sequence
  source 1..1539: mol_type = other DNA
taatatgaggagtgtaaagacctcatcaaaagcatgcttaggaacgagcgacaatttaaagaggagaagctcgccgaacaactgaagcaggccgaagagctccggcagtacaaggtcctggtgcatgcccaggaacgagaattgactcaactcagggagaaattgcgcgaagggagggacgcatctcgcagcctcaatgaacatcttcaggccctgctaacaccagatgaaccagacaagagccagggccaggatttacaggaacaattggcagagggctgcagattggcccaacacctggtccagaagctgtcccctgaaaatgataatgacgatgacgaggatgtgcaggtagaggtcgcagaaaaagtgcaaaaaagttccgcccctagggagatgcagaaggccgaggaaaaggaagtcccagaggacagcctggaggagtgtgcaattacctgtagcaatagccacggcccttatgattccaaccagccacataggaagactaagatcaccttcgaggaggacaaagtggattctacacttattgggtcttcaagccatgtagagtgggaggatgcagttcacattattcctgagaatgagtccgacgatgaggaggaggaggagaagggaccagtgagcccaaggaatctgcaagaatccgaagaggaagaagtgccacaagaaagctgggacgaaggctattcaacgctgtccatccctccagaaatgctagcaagctacaagtcatattcctccacctttcactccctagaagagcagcaagtctgtatggctgtggatataggcagacatagatgggatcaggttaagaaggaggaccacgaggccacagggcctcgtttgtcacgcgagctcctagatgaaaaaggtccggaagtgctccaggactcccttgaccgttgctactccaccccttctggctgtttggagttgaccgactcttgtcagccttatagatcagcattctacgtgctggaacagcaacgcgtggggctggccgttaacatggacgagatcgagaaataccaggaggtagaagaggaccaggaccctagttgcccccgacttagcagggagctgttggatgagaaggaaccggaagttctgcaagacagcctggggagatgctacagcactccctctgggtatcttgaactgcctgatctcggtcagccctactccagcgctgtctatagcttggaggaacagtatctgggccttgccttggacgtcgatcgaataaagaaagaccaggaggaggaagaggatcagggacccccatgcccacgcttgtcacgggaactcctggaggttgtggagcccgaagttttgcaggactctcttgaccggtgctactctaccccttccagttgtctggaacaaccagacagttgtcagccttatggtagcagcttctatgccctcgaagagaagcacgtgggattttccctcgatgtcggcgaaatagaaaagaagggcaaggggaagaagcgcagaggccgaagatcctag

SEQ ID NO: 232364 - DNA, 2013 bp, synthetic construct
  misc_feature 1..2013: note = Description of Artificial Sequence: Synthetic coding sequence
  source 1..2013: mol_type = other DNA
atggtcgtgtccgctggacccctgtcttctgagaaggcagagatgaacatcctggagatcaacgagaaactgagaccgcaactagccgaaaagaaacaacagtttcgaaacctcaaagaaaaatgtttcctcacacagctggcgggatttttagcgaataggcaaaaaaagtacaagtatgaggagtgtaaagacttaatcaagttcatgctccggaacgagaggcagtttaaagaggaaaaactagcagagcagctgaaacaggcggaggagttgcgacagtataaggtgctcgtgcacgcccaggagagggaactcacgcagctccgagaaaaacttagggaggggagggatgcttctcggagcctgaatgaacacctgcaggctttattgacaccagacgaaccggacaaatcacaggggcaggacctgcaggagcagctcgctgaaggatgccgattaacccagcacctggttcagaagcttagcccagagaacgacaacgatgacgacgaggacgtccaggtggaggtcgccgaaaaggtgcagaagtcaagtgcccctcgtgaaatgcagaaagctgaggagaaagaggttcccgaggattcactggaggagtgcgcgattacatgctccaattctcacggaccatacgatagtaaccaaccacataagaagactaagataacttttgaggaagacaaagtagacagtactctcataggtagcagctcacacgtggaatgggaagatgccgttcacatcatcccagaaaacgaaagcgacgacgaggaggaggaagagaaaggcccagtatcccctcggaatctccaggagtcagaagaagaagaagtgccccaggaaagctgggatgaggggtattctactctctcgatcccaccggagatgttggcctcttatcagtcttatagcagcaccttccattccctggaagagcagcaagtgtgcatggccgttgatattgggagacataggtgggaccaggtgaagaaggaggaccaggaggctactgggccacgtctgtcaagagaattgctggatgagaaggaacccgaggttctgcaagactccctggacaggtgctactccacgccttctgggtgtctcgagctgactgattcctgccagccttatcgctccgccttctatgtcctggaacagcagcgtgtgggcctggcgatcgatatggatgaaattgagaaataccaggaagtcgaagaagatcaggacccctcctgtccacgtctcagtagggaactgctggacgagaaagagccggaagttctgcaagactcactcgatcgctgttattctactccttctgactatctggagttaccagatctgggccagccatatagctctgccgtttatagtctggaagaacaatatctcggcctggccctggatgtggataggattaaaaaggatcaagaagaggaggaggaccaaggccctccatgcccccgtctcagccgagaattgctagaggtggtggagccggaggtgctccaggattctttggatcggtgctattcaaccccttcaagctgcttggagcagccagacagctgccaaccctatggatcttccttttatgctctggaggagaagcacgttggcttcagtctggatgttggcgagattgagaaaaagggcaaagggaaaaagaggaggggccgtaggtctaaaaaaaagagacgtaggggacgcaaggaaggagaggatgacaatcccccatgtcctagactgtatggggtacttatggaagtggaggaaccagaggtattgcaggacagtctagaccgctgttattcaacaccctccatgtatttcgagcagcccgactcctttcaacattataggagcgttttctatagcttcgaggaggagcacattagcttcgccctgtacgttgacaatcggtttttcaccctgaccgtgacttccttgcatctcgtgttccagatgggggtgatatttccccagtag

SEQ ID NO: 232365 - DNA, 2013 bp, synthetic construct
  misc_feature 1..2013: note = Description of Artificial Sequence: Synthetic coding sequence
  source 1..2013: mol_type = other DNA
atggtggtgagtgctggccctctaagcagcgaaaaggccgagatgaatatcctcgagatcaacgaaaagttgagaccacaattggccgaaaagaagcaacaattccggaatctcaaagaaaagtgtttcctgactcagttagccggatttttggcaaaccggcagaaaaaatacaagtacgaggagtgcaaagatctgataaaattcatgctgagaaacgagcgccagttcaaagaggaaaaactagccgagcagttgaagcaagccgaagaactgcgccagtacaaggtgttggtgcacgcccaagagagggaacttactcagctccgcgagaaactcagggagggtcgcgatgcgtctcgctccctgaacgaacacctgcaggccctgttgacgcccgatgagccggataaatctcagggccaggacctgcaagagcaacttgcggagggctgcaggctgactcagcacttggtgcagaaattaagcccagagaacgataacgacgacgacgaagacgtgcaggtagaagttgcagagaaggttcaaaagtcaagcgcacccagggaaatgcaaaaagccgaagagaaggaggttcccgaagactccctggaagagtgtgcaatcacctgttccaactcccacggcccatacgatagcaaccagccccacaaaaagacaaagattacattcgaggaggacaaagtcgattcaactttgattggttcttcatcccatgtcgagtgggaggacgccgtccatatcatccccgagaacgaatctgacgacgaagaggaggaggagaagggaccagtcagtcctcgtaacctgcaggagagtgaagaagaggaggtgcctcaagaatcttgggacgaggggtattcaactctgagcatccctccggagatgctcgcctcctatcagagctatagctctactttccacagcctcgaagaacagcaggtgtgtatggctgtagacatcggaaggcaccggtgggaccaggtgaaaaaagaagaccaagaagccactgggccacgactgtcccgcgagctgcttgatgagaaagagccagaagttcttcaggactctctcgacaggtgttactccacaccaagcggctgcttggaacttacagacagttgccagccttacaggtccgctttttacgtcttagaacaacagagggtggggctagccatcgacatggatgagatcgaaaaatatcaggaggtcgaggaggaccaggatccctcctgccccaggctcagtagagagttacttgatgagaaagaacccgaagtgcttcaggatagtctagatcggtgttacagcacaccttccgactacctcgagcttcccgatctgggtcagccctactccagcgccgtgtattccttggaggagcagtatcttggccttgctctggatgtcgaccgcattaagaaggatcaggaggaagaggaagatcagggcccaccatgtcctcgtctgagccgcgaactgcttgaggtggtggaacctgaggtactgcaagactccttggacaggtgttactctactccttcttcatgcctggaacaacccgacagctgtcagccatacggcagcagcttctacgctctcgaagagaaacacgtgggattctcactcgatgttggcgaaatagagaagaaggggaagggcaagaagagacgtggcaggcgcagcaagaagaaacgtaggagggggagaaaggagggagaagatgataaccctccgtgccctcgactctatggagtgctaatggaagtagaggagccggaagtacttcaagatagtcttgataggtgttacagtaccccctctatgtatttcgagcagcctgattcctttcagcattatcggtcagtgttctattcttttgaggaggaacatatctcatttgccctgtacgttgacaatcgtttcttcacactcactgttacatccttgcatcttgtttttcaaatgggcgtgatttttcctcagtag

SEQ ID NO: 232366 - DNA, 2013 bp, synthetic construct
  misc_feature 1..2013: note = Description of Artificial Sequence: Synthetic coding sequence
  source 1..2013: mol_type = other DNA
atggtcgtgtccgcgggtccgctgagctcggagaaggcggaaatgaatatcctggagatcaatgaaaagttgcgccctcagttggccgagaaaaagcagcagttcagaaatctgaaggagaagtgcttcttgacgcagctggccggatttctggccaaccggcaaaaaaagtataaatacgaggaatgcaaagacttaatcaaatttatgctccgcaacgaacggcaattcaaggaggaaaagctagccgaacagctcaaacaggctgaagaactgcggcagtataaggttctcgtacacgcccaggagagagagctgacccagctgcgcgaaaagctccgtgaggggcgagacgcttcccgaagcctgaatgagcatcttcaggctctcctcactcccgacgaacctgataagtctcaaggccaggacttgcaagaacagcttgccgagggctgtcgtctaacgcaacatctggttcaaaagctaagccccgagaacgataacgatgatgatgaggacgtgcaggtcgaggtggcagagaaagtgcaaaagagttcagctcctagagaaatgcagaaagccgaggagaaggaagtcccagaagacagtctggaagaatgtgccattacgtgtagcaattcacacggcccttatgattcgaatcagcctcataaaaagacaaaaattacctttgaagaggataaggtggattccaccctcatcggctcatctagccatgtagagtgggaggacgccgtgcatatcattcccgaaaacgagagcgacgacgaagaggaagaggaaaagggaccagtcagtccgcgaaacctgcaggagtcggaagaggaggaggtccctcaggaatcatgggacgaaggctactccacgctcagcatccctcccgagatgctggctagttatcaaagctattccagcacgtttcacagtctggaagagcagcaggtctgcatggccgtggacatcggtagacacaggtgggaccaggtgaagaaagaagatcaagaagccacaggtccccgactcagtagagagctgttggatgagaaggagcctgaagtgttacaggactctctagatcgctgttacagcacccctagtggctgcctggagctcacggatagttgccaaccgtacagaagcgccttttacgtgctggagcagcagcgagtcggcctcgccatagatatggatgaaatcgagaagtatcaggaggtggaagaagatcaagatcctagctgtcctcgcttatcgagggagctccttgacgagaaggaaccagaggtactgcaggactccctggacagatgctacagtacaccttccgactatctggaactgccggatttgggccaaccttactcgagtgctgtttatagcctggaggagcagtacctcgggcttgccctcgacgtggatcgaattaagaaggaccaggaagaggaggaggatcaaggccctccatgccctaggctatctagggagttgcttgaggttgtcgagccagaggtgttgcaggacagcctagaccgatactacagtacccccagctcctgccttgaacagccagatagttgtcagccatacggatcttctttttacgcactggaggagaagcatgtggggtttagtctggacgtgggggaaattgagaagaaaggtaagggcaaaaagcgcagaggtcgccgaagcaagaagaaaagaagaagaggaagaaaggagggtgaggacgataaccccccatgccctaggctgaacggtgtcctgatggaagtggaggaaccagaggtactgcaggatagtctggacaggtgctatagcacccaatccatgtattttgaactccccgatagcttccagcactataggagtgtcttttacagctttgaggaagagcacatttcatttgccttatacgtcgacaacaggttctttacgctgacagtcacatcccttcatttagtcttccagatgggggtgatctttccacagtag

SEQ ID NO: 232367 - DNA, 2013 bp, synthetic construct
  misc_feature 1..2013: note = Description of Artificial Sequence: Synthetic coding sequence
  source 1..2013: mol_type = other DNA
atggttgtatccgccggacccctctccagtgaaaaggccgagatgaatatattggagatcaacgagaagctccggccacagctcgcagaaaagaagcagcagtttcgtaatctgaaagagaaatgttttcttacgcaactggccggattcctggcgaaccgacagaagaaatacaagtacgaggagtgtaaagacctgatcaaattcatgttgcggaatgaacggcagttcaaggaagagaaactggcagaacagctgaagcaggcagaagaactgcggcagtacaaggtgctagtacacgcgcaggagcgggaactgacacaactccgcgagaaactgagggaaggtcgggatgcatctaggtctctgaatgagcacttgcaggcgctgttaacaccggatgagcctgacaaatcccagggccaggacctgcaagaacagcttgctgagggctgccgtttgacacaacacctagtccaaaagctgtcgcctgaaaatgacaatgatgatgatgaggacgtccaggtggaggtcgccgagaaagtacagaagtccagtgcccctagggagatgcagaaagctgaagaaaaggaggtccccgaagactccctcgaggagtgtgccattacttgttcaaacagccacgggccatatgactctaatcagcctcacaaaaagaccaagatcaccttcgaagaagataaggttgatagcacactgatcgggagctcatcccatgttgagtgggaagatgccgtacacatcattccggaaaacgaatccgacgacgaagaggaagaggagaagggcccagttagtcctagaaacctgcaggagagcgaggaggaagaggttccacaggaaagctgggacgagggctacagcactttgtctatacctccagaaatgctagcttcctatcagtcatactcttctacattccattctctggaagaacagcaggtctgtatggcagttgatatcggcagacatagatgggaccaggtaaagaaggaggatcaggaagcaacaggtcctagactgagtagagagctgctagacgagaaggaaccagaggtgctgcaggacagtctggatcggtgctacagcactccatccgggtgccttgagcttaccgacagctgccagccatatcgtagtgcattttacgtgctggaacagcagcgtgttggcctggccatcgacatggatgaaattgaaaagtaccaggaggtagaggaggatcaggatccatcatgtcctagacttagccgcgagctactggatgagaaggaacccgaagtgttgcaggatagtctggataggtgctatagtactccaagcgactaccttgaattgccagacctgggccagccatacagttctgctgtgtacagcctggaggagcaatatctcggactggcactggatgtggatcggattaaaaaagaccaggaggaggaggaggatcagggaccgccatgtccaagactgtccagggagcttttagaagtggtggagccagaggtgttacaggactctctggacaggtattatagcacgccgagtagctgtctggagcagcccgactcctgtcaaccatacggatcaagcttctacgcgctggaggagaaacacgttgggttttctttggatgtcggcgagattgagaaaaaaggtaagggtaagaagcgacgagggaggcgaagcaaaaagaagaggagacggggtagaaaagagggtgaagacgataaccccccttgccccagattaaatggagtcttgatggaggtcgaggagcctgaagttctgcaagactcattagataggtgctacagcacccaatctatgtacttcgagttgccagacagcttccaacactatcggagcgttttttacagcttcgaagaagagcacatttcattcgctttgtacgtcgacaacaggttctttactctgaccgttacctctttacatctggtgtttcagatgggggttatatttccccagtag

SEQ ID NO: 232368 - DNA, 2526 bp, synthetic construct
  misc_feature 1..2526: note = Description of Artificial Sequence: Synthetic coding sequence
  source 1..2526: mol_type = other DNA
atggttgtatcagccggaccttggtcaagtgagaaggccgagatgaacatcctagagattaatgaaaaattgaggccccagcttgctgaaaataagcagcagtttggcaacctgaaggaaaggtgcttcgtcacacaattggctgggtttttggctaatcagcagaagaaatacaactacgaggagtgcaaggacctcatcaagttcatgctcagaaacgagcgacaatttaaagaagagaagctcgccgaacaactgaaacaggccgaagaattgcggcagtataaggtgctggtgcacagccaggaaagggagttaacccaattacgggaaaaactcagggaaggccgagacgcttcgaggtctctcaatgaacatctgcaggctctgctaactttagatgagcctgataagagccaagggcaggatctccaggagcaattagccgaaggttgccgccttgctcaacatttagtgcagaaactgtcgcccgagaacgacgaagatgaagacgaagatgtgcaggtggaagaggccgaaaaggtgcagaaaagttccgcccctcgagaagtccaaaaaactgaggagtccaaggttccggaagactccctagaagagtgtgccatcacttgctcaaactcgcacgggccttgtgattctaatcagccgcacaagaatattaagatcacctttgaggaagacgaagtgaactcaaccctggttgttgatagagagtcctcccatgatgagtgtcaagacgctttgaatatcctgcccgtgccgggacccaccagcagcgcaaccaacgtaagtatggtagtttccgccggtcccttaagttccgaaaaggcagagatgaacatcctggagatcaatgagaagctccatccccagctagccgagaagaaacaacagtttcggaacctgaaggagcgctgcttcgttacacagctagctggctttctcgccaatcaacagaaaaagtataaatacgaggagtgcaaagacctaatcaagagtatgctgcgaaatgagagacagttcaaagaggagaaattggctgaacagctcaaacaggccgaagagctccgccagtacaaggtgctagtgcatgcacaggagagggaactgactcagcttagagagaagctgcgggaggggagagacgcctctaggtcactgaacgaacacctgcaagcactgctgacccctgatgagcctgacaagtctcaggggcaggatttgcaggagcaactggcagagggctgcagactcgcacagcacctggtccagaaattgtctcctgagaatgataacgacgatgacgaggatgtgcaagtggaactagccgagaaggtccagaaatcatctgcgcctcgcgagatgcagaaggccgaagagaaggaagttcccgaggatagtcaggaggagtgcgccatcacatatagcaactcacacggcccttatgattccaatcagccacacagaaagaccaagatcaccttcgaggaggacaaggtcgactctacgctgattggatcaagctcccatgtagagtgggaagacgctgtccatatcattcctgaaaatgagagcgatgacgaggaagaagaggagaagggaccagtttcacccagaaacttgcaagagagcgaggaagaagaggtgccacaggagagctgggatgagggatacagtaccctgtccattcctccggaaatgctcgcttcctatcagagttatagctcaaccttccatagcctggaggaacaacaagtatgtatggcagtagatatcggacgacataggtgggaccaggtgaaaaaggaagatcaggaggctaccggaccacggttatcgagagagctgctcgatgagaaaggaccggaagtattgcaagattcactcgatcggtgctattctactccctctggatgtctcgagctcacggattcgtgccaaccataccgcagtgcattttatgtgctcgagcagcaacgcgttggactggcagtggacatggacgaaattgagaagtaccaagaggtggaggaggatcaggaccccagctgtcccagactctcacgtgagctcctcgacgagaaggaacctgaggtcttgcaggacagtctggaccgatgctattctactccttctggctacctcgagctgccagatctcgggcagccctattcttctgcagtctacagcctggaagagcagtacctgggactggccctggatgtggatcgtactaagaaagatcaggaggaagaagaagaccaaggtcctccgtgtcctagactcagcagagagttattagaggttgtggaacccgaagtgctgcaggactcgctggacaggtgttattccacaccgagttcatgtctggagcaaccagacagctgccagccctacggatcatcattttatgccctggaagaaaagcatgtggggtttagtctggacgtgggcgaaatcgagaaaaaaggaaagggcaagaagcggaggggtcggagatcttag

SEQ ID NO: 232369 - DNA, 13866 bp, synthetic construct
  misc_feature 1..13866: note = Description of Artificial Sequence: Synthetic coding sequence
  source 1..13866: mol_type = other DNA
atggtggttagtgccggtccctggagcagcgaaaaggctgaaatgaacatcctagagattaatgaaaagctacgccctcagttagccgaaaataagcaacagtttgggaaccttaaggagcggtgcttcgttacacagctcgctggcttcctcgcgaaccagcaaaaaaaatacaactatgaggagtgcaaggatctgattaagtttatgctgagaaacgagagacagtttaaagaggagaagctggcagaacagctgaagcaagccgaagagctgaggcaatacaaagttctggttcactcccaagagcgcgaactcacacagcttcgggaaaaattgcgagaaggacgggatgcatccagaagcctgaatgagcatctgcaggcacttctgacactcgatgaacccgataaatctcaagggcaggaccttcaggagcagctagctgagggttgccggctggcacagcatctggtgcagaaactgtcccctgaaaatgatgaggatgaggacgaagatgtccaagtggaagaggcagagaaggtccagaagtcatccgccccaagggaggttcaaaaaacagaagagagtaaggttcccgaagactcgttggaagaatgcgccattacctgctcgaacagtcacggcccttgcgattcgaaccaaccacataagaatatcaagataacattcgaggaggacgaagtgaattccacccttgtcgtggacagagagtcgtcccatgatgagtgccaggacgccctgaacatcctgccagtaccagggcctaccagttctgccacaaatgtgtctatggtggtctccgctgggccactgtcttcagaaaaggcagaaatgaacatccttgaaattaacgaaaagctccatcctcagctggctgaaaaaaaacagcagttccgcaatctcaaggaacggtgcttcgttactcaattagctggctttcttgcaaaccagcagaagaagtacaagtacgaggagtgcaaagacctcattaaatcgatgctgcgcaacgagcgtcagttcaaggaagaaaaactggccgagcaacttaagcaagcggaggagctgagacaatacaaagtcctggtgcatgcgcaagaacgggagctgacccagctccgggaaaaactccgagagggcagggatgcttcaaggtctctgaacgagcacctccaggcactcctgactcccgatgaaccagataagtcccaggggcaggatctccaggaacagctggccgaaggctgtaggctggcgcagcatctcgtgcagaaacttagcccagaaaacgacaatgacgacgacgaggacgtccaagtggagctcgctgaaaaggtgcagaaatccagcgcacctagggaaatgcagaaggcagaggaaaaagaggtccctgaagacagccaagaggagtgcgctattacctattcaaacagtcacggcccttatgactccaatcagccccaccgtaaaacgaaaatcacctttgaagaggacaaagtggatagtactcttattggcagctcttcccacgtggaatgggaagatgcagtgcacataattcccgagaatgagtcagatgatgaggaagaggaagagaagggccctgtcagcccaaggaatctgcaggagtccgaagaggaagaagttccccaggaaagttgggacgagggatacagcacactgtctatcccacctgagatgctggcctcctaccagagctactcaagcacttttcatagcctggaggagcagcaggtgtgcatggctgtcgatattggcaggcacagatgggaccaggtgaaaaaagaagaccaggaggccacggggcctcgtctttcgcgagaactcctcgatgagaaagggcctgaagtgcttcaagactccctggatcgatgctattccacaccatctgggtgcctggagctcaccgactcttgccagccttataggtccgcattctatgtcttggagcagcagaggatcgggctggccgtagacatggacgaaattgagaagtaccaagaagttgaagaggatcaagacccttcctgtccccgattgtcccgggaactgttagacgagaaggaacccgaggtcctacaggattccttggataggtgttattccacacccagcgggtatttagaactgcccgacttagggcaaccctacagttctgccgtgtacagtttggaggaacaatacctcggcctcgcactggacgttgacagaacaaagaaagatcaggaagaggaagaggaccaagggcctccatgccctcggctgtcgcgggagttattagaggtggttgaacccgaggtactccaggatagcctggacagatgttactccacaccttcaagttgtttggaacagcctgacagctgtcaaccttacggaagtagtttctacgcgctggaggaaaagcatgtaggcttcagcttagatgtaggcgaaattgaaaaaaaaggcaaaggcaagaagcggcgaggaaggcgcagcaagaaggagcggaggagaggacggaaagaaggggaagaagatcagaacccaccttgcccccgattatctcgcgagctcttggatgaaaagggcccagaagtgctacaagattccttggataggagctacagtacaccttcagggtgtctggaactcaccgattcctgccagccatatcgaagtgctttctacgttctggagcagcagagagtgggtcttgccgttgacatggatgagatcgagaaatatcaggaggtggaggaagaccaagaccccagttgtccgagactcagtagggagctgctagacgagaaggagccagaagtcttacaggattctcttgaccgctgctatagtacaccaagtggctatttagagttacccgacctcggacagccatactccagcgccgtatattctctggaagaacagtacctgggcttggccctggatgtggatagaactaaaaaagaccaggaagaggaggaggatcaaggacctccttgtcccagactttcgcgagagctcctcgaggtcgtggagccagaggtgcttcaggattctctggacaggtgctattctactccatcctcatgcctggagcagcctgacagttgtcagccctacggtagctccttctacgccctggaggagaaacacgtggggtttagcttagacgtgggcgaaatcgagaaaaagggaaagggtaagaagaggaggggaaggaggtccaaaaaggagcggcgtcgcggacgcaaagaaggggaggaggaccaaaacccgccttgcccgaggctgagtagagagctgctcgacgaaaaaggacccgaggtccttcaggattccctcgacagatgttatagtacaccatctggatgcctggagcttaccgattcctgccagccgtatcgcagcgccttctacgtgcttgaacagcagagagttggtctggcggtcgatatggacgaaatagagaaataccaggaagtcgaggaggatcaggatccgagttgtccacgactgtcccgggagctgctggatgagaaggagcctgaggtgctgcaagactcactagacagatgctactcaaccccttcgggctacctggagcttccagacctcggacagccttattcttcagcggtatactccttagaagagcagtacctagggctggccttggacgtggaccgtacgaagaaggaccaggaggaggaggaggaccaggggccaccatgcccaaggctgtccagggaactgctagaggtggtcgaacccgaggttcttcaggattccctcgaccggtgctattctacgcccagcagctgtctcgaacaacctgattcatgtcagccttatgggtccagcttctacgcactcgaggagaagcacgtgggcttcagtctcgatgttggagagatagagaaaaaaggtaaggggaaaaaacgcagggggcgacgatccaagaaggagagaagacggggacgaaaggagggagaagaagaccagaatccaccatgcccacgattatctcgcgagttactggacgagaagggaccagaagtgctccaggacagtcttgatcgctcctattctaccccgtccggatgtctggagctaactgatagttgtcaaccatatcgttcagcattctatgtgctcgagcaacagcgcgtgggtctggccgtcgatatggatgagattgaaaagtatcaggaagtcgaggaggaccaagacccttcgtgtcccagactgtccagagagctgcttgacgagaaagagccagaggtgctgcaggacagtctggatagatgttatagtacccctagcggctatctagaactccctgatctgggtcagccttatagtagtgcagtctactcactggaggagcaatacctgggtctggctttagacgtggaccgtacgaaaaaagaccaggaggaggaggaggatcagggacccccatgtcccagactcagccgagagttgctcgaggtagtggaaccggaggtgctgcaggacagcctggacaggtgctatagtacccccagcagctgcttggaacaaccagattcttgtcaaccatacggttcctcattctatgctctggaagaaaagcatgtggggtttagtctcgacgttggagagatcgaaaagaaaggaaaagggaaaaagcggcgaggacgtagatccaaaaaggaacgcaggaggggacggaaagagggagaggaggaccaaaatcctccttgccctcgcctgtccagggaactgctggacgaaaagggcccagaagtgctccaggatagcctggaccgctgctatagtacgccatccggctgcctcgagcttacggattcttgtcagccttataggtccgctttctatgtcttggagcagcaacgcgtgggtctggcggtagacatggacgaaatagagaaatatcaagaagtggaagaggatcaggaccctagttgtcccagactgagtagggagttactagacgaaaaggaacccgaggtacttcaggatagcttggacaggtgttatagcacgccctctggatacttggagctccctgacctcggccagccatatagctctgcagtgtactcacttgaagagcagtatctgggacttgccctggacgtagataggacaaagaaggaccaggaggaggaagaagatcaggggccaccctgtcctagactgagccgtgaactcctggaggttgttgagcctgaggtcttgcaggactccctcgaccgttgttactccacgccatcctcctgtctggagcagcctgatagctgtcagccatatggaagcagcttttacgcgctggaggagaagcatgttgggttttcccttgatgtgggcgagattgagaagaaaggaaagggaaaaaagcggaggggcaggcgtagcaaaaaagaaagacggaggggtcgcaaggagggagaggaggatcaaaatcccccttgtccacgattgtcccgcgagctgcttgatgaaaagggacccgaggttctgcaagattcactcgatcggtcttattccacgccatctggttgtttagagctcacagactcttgtcaaccatatagatctgcgttctatgttctggagcagcagagggtaggtctcgccgtagatatggacgagatagaaaaataccaggaggtggaggaagatcaggaccctagctgtccccgattaagtcgagagctgttagatgaaaaagagccggaggtgcttcaggactccttagaccgctgttactctacgcccagcggatatctggagctgcctgatctggggcagccttatagttctgcggtgtactcactggaggagcagtatctgggcctggccctcgacgtcgatcgcactaaaaaagaccaggaggaggaggaggatcaaggccctccctgtccccgactctctcgggagctactggaggttgttgaacctgaggtgctacaggattctctggaccgttgttattcaaccccaagctcttgcctcgaacagcctgactcttgccaaccctatggtagtagcttttacgccctcgaagagaaacacgtcggcttcagtctcgacgtgggggaaatcgagaagaaaggcaaaggaaaaaagcgcagaggtcgaaggtcaaagaaagagcgcaggcgcggtcgtaaggagggagaggaagaccaaaacccaccatgccctcgattgtcccgtgagctcctggatgaaaagggcccagaggtcctgcaagacagcttggatcgaagctactctacccccagtggatgtctcgagttaacagattcatgccagccttacagaagcgcgttctatgtcctggaacagcaaagggtggggctcgctgtggacatggacgagatagaaaagtatcaggaggttgaggaggaccaagacccaagctgtcctaggctgtcaagggagctgctggatgaaaaagagcccgaagtcctgcaggatagtctggatagatgctattcaacccccagcggctacctcgaactccctgatttggggcaaccatactcaagcgcagtctatagtctggaagagcagtatttggggcttgccttggacgttgacagaactaaaaaggaccaggaggaagaagaggaccaaggcccaccctgccccaggctgtctagagagctcctcgaggtggtggaacctgaggtgctccaggactctctagataggtgctactccaccccctcatcctgtctggagcagcccgatagctgtcagccctacgggagcagtttctacgccctcgaggaaaagcatgtaggatttagtcttgacgtgggggagatcgaaaaaaaaggcaagggtaaaaagaggaggggacggagatcaaagaaggagcgaagacggggaagaaaggagggagaggaggaccagaaccctccctgccccagactgagcagagagctacttgacgaaaaaggacccgaggtgttgcaggactcattggacagatcttatagtaccccttccgggtgcctggagttgactgatagctgccagccttatcgttctgctttttacgtacttgagcagcagcgagtgggtctggcagtcgatatggacgaaatcgaaaagtatcaagaggtcgaagaggaccaggatccttcctgccctagactttctcgggagttattagacgagaaagagcctgaagtgctgcaggactcccttgaccgctgttattctacaccttcaggctacctcgaactgcccgatctcgggcagccgtacagcagcgccgtttacagcctcgaagagcaatatctgggactcgcccttgatgtagatcggactaagaaggaccaagaggaagaggaggaccaaggtccgccttgccctagactcagccgtgaactgttggaggtcgtggaacccgaggtcctgcaggactctcttgaccgctgctactccacacctagcagctgtctggagcagcctgatagttgtcaaccctacggctcctctttttatgctttggaggagaagcacgtggggtttagtttagacgtgggagagatcgagaagaaaggcaagggcaaaaagaggaggggtaggaggtccaagaaggaacgtagaagaggcaggaaagaaggcgaggaagatcaaaatcccccttgcccgaggctgtctagagaacttctggacgagaagggacctgaggttctccaggatagtttggacaggtcttactccacgccatccggctgccttgaacttaccgactcttgtcaaccttaccgcagcgccttctacgtgctcgagcagcagcgagtcggattggccgtggatatggacgaaatcgaaaaataccaggaagtggaagaggatcaggacccaagctgtcctagactctcccgcgagctacttgacgagaaagaaccagaagtcctacaggattcgctggaccggtgctacagcaccccttctggatatctcgaattaccggaccttgggcaaccatactcctcagcagtgtatagtttggaggagcaatacctgggccttgccctagacgtggaccggacaaagaaagatcaggaagaagaagaagaccagggcccaccatgccccagacttagtagggaactgctggaagtggtggagcccgaggtcctgcaggattccctggaccggtgctacagcacccccagctcctgcctggagcagcccgattcctgtcagccctatggctcctccttctatgccctggaagagaagcacgtggggttttcattagatgtgggcgagatagaaaaaaaaggaaagggcaagaagagaagaggacgcagatctaaaaaggaaaggcggagaggcaggaaagagggcgaggaggatcagaaccccccttgtccacgcctgtccagggagttgctggacgaaaaagaacccgaggtgcttcaggactccctggatcgttgctatagcaccccaagtgggtacctggagttacctgatcttgggcaaccctacagctctgcggtctacagccttgaagaacagtatttagggctggccctggatgtggaccggaccaagaaggaccaagaggaggaggaggatcagggccctccttgccccaggctgagcagggagctgctcgaggttgtggagccagaagtcctccaagattctctggatagatgctactccaccccttcttcctgtttggagcagcctgacagttgccagccatacggttcgagcttttacgccttggaagagaagcacgtggggttctccctagatgtgggagagatcgaaaaaaagggtaagggcaagaaacggagagggcgacgctccaagaaagagaggcgaagagggagaaaggagggcgaagaagatcagaaccctccttgccccagactctccagagaactccttgatgagaaagaacccgaggtccttcaggacagtttggatcgctgttacagtaccccttcaggctatctggaattgcctgatttgggtcagccctactcctctgctgtctacagcctagaagagcagtacctgggcctggctctggacgtggaccgtacaaagaaagaccaggaagaggaagaggaccagggaccaccctgcccaagactgtcaagagagctgctcgaggtcgtggaacccgaggttctgcaggattccctggatcggtgttatagcacaccttccagctgtctcgagcagcccgactcatgccaaccctacggctcttcattttacgcactggaggagaagcacgtcggtttctccctggatgtgggcgaaatagagaaaaaggggaagggaaagaaaagaaggggtcgaagaagcaagaaggagcggcgacgaggcaggaaggaaggcgaggaggaccagaaccctccatgtcctaggttatcccgggaactgttggacgagaaagaacccgaggttcttcaagattccctggacagatgttactctaccccatccggttatctggagctgccagatttgggacaaccctatagcagcgcggtatattcccttgaagaacagtatctcgggctggcactggacgtcgacaggaccaaaaaggatcaggaggaggaagaggatcagggccctccctgtcctcgactgtcccgtgagttactcgaggtcgtcgagcctgaagtactccaggatagcctggaccgctgttatagcaccccatccagttgtctagagcagccggactcatgccagccatacggatcatctttttacgcacttgaagaaaaacacgtcggattctcactcgacgtgggggaaattgagaaaaagggtaaaggcaaaaagcggagagggcgaagatcaaaaaaagaacggaggaggggaagaaaagaaggcgaggaagaccagaaccccccatgccccagacttagcagggagctgctggacgagaagggtccagaggtgctgcaggactctctagatcgctgctactctacaccatcaggatgccttgaactgactgattcgtgccagccatatagatcggcgttctacgtactagagcagcagagggtgggcctggctgtagatatggacgaaattgagaagtatcaagaagtcgaggaggatcaggaccctagctgccctcgcctttccagggaactgctggacgaaaaagagcccgaagtcctgcaggattccctggatcggtgctatagtactccaagcgggtacctcgaactgcctgatcttggccagccttattcctccgccgtgtacagcctggaggagcagtacctaggtctcgctctggatgtggaccgaaccaagaaagaccaggaagaagaggaggaccaggggcctccctgccctcgccttagtagagaactgcttgaagtcgttgagccagaggtactccaagactcccttgaccgttgctactcaaccccttcttcatgtctggaacaaccagattcatgtcagccatacgggagttcattttacgcgcttgaagagaagcacgtgggtttttctttggacgttggggagatcgagaagaaaggaaaaggcaagaaaaggagaggtcgcaggtctaagaaggaaaggagaagagggcgaaaggaaggggaggaggaccagaatccaccctgtccaaggctgagtagggagctgctggatgagaagggaccggaagtcctccaggattctctggataggtgctatagtacccccagcgggtgcctcgagttgacagatagctgccagccttataggtccgcattctacgtcctggagcagcagcgcgttggtctagccgttgacatggatgaaatagagaaatatcaggaagtcgaggaagaccaggacccaagttgtcccaggttgtcccgagagttattagatgagaaggaacctgaagtgctgcaagactctttggatcggtgttatagcaccccgtccgggtacctcgaattgcccgacctgggacaaccctactcctcagcagtgtatagcttggaagagcaatacttgggactggctctggacgtggatagaaccaagaaagaccaggaggaagaagaagatcaaggcccaccctgtccacgactttccagggaactccttgaggtggtggagccagaggtgttgcaggactcactggaccggtgttactccacccctagcagctgtctggagcaaccagattcctgccagccttacggaagctctttctacgcattggaagagaagcacgtggggttttccctggatgtcggcgaaatagaaaagaaggggaagggaaaaaaacgccgaggacggagaagcaaaaaggagcggagaagggggagaaaagaaggggaggaagatcagaatcccccttgcccaaggctttcccgcgagctgctggacgaaaagggcccagaagttttacaggactctctggatagatgctattccacacccagcggttgcctcgagctgaccgactcgtgccaaccttaccgcagtgctttctacgtgctcgagcagcagcgcgtgggactcgcagtggatatggacgaaatcgaaaagtaccaggaagtggaagaagatcaggacccaagttgtcctcggctatctcgcgagctcctcgacgagaaagaacccgaggtcctgcaagatagcctggataggtgctactctactccctcgggttacctagaactgcctgatcttggtcagccatactcatcagccgtgtattcgttggaggagcagtacctggggctggccctggacgttgaccgaacaaagaaggaccaggaagaagaagaagaccaggggcctccatgtccccgacttagtagggagctattagaggtggtggaacctgaggtcctgcaagactctctggatcggtgctactccacaccaagttcctgtctagaacagccggacagctgtcagccatatggttccagcttttatgcactcgaggaaaagcatgtcggattctctctcgatgtgggggagattgaaaaaaagggcaagggaaagaagcgacgcggacgacgctctaaaaaggagcggagaagaggacgaaaggaaggggaagaagatcagacgccaccttgtccccgtctgagtagagaactcctggacgaaaaaggaccagaagtgctacaggactcactggaccggtgctatagcaccccaagcgggtgcctagaactgacagacagctgtcaaccttaccgatcggcattttacgtcctcgaacaacagagagtaggcctcgcggtcgatatggacgaaatagagaagtatcaggaggtggaagaggatcaggacccctcatgccccagactttctagagagcttctagacgagaaggagcccgaagtcctgcaggattcattggatcgatgctactctacaccctctggctatttggagctgcctgacctggggcaaccttactctagtgcagtgtactcactggaagagcagtacttgggtctcgccttagatgtggatagaacaaagaaagaccaagaagaagaggaagaccaggggcctccatgccccagactgtcccgggaactgctggaagtggtggagccggaggtcctccaagactcactcgaccgctgctattcaacgcccagttcatgcctagagcaacctgattcttgccaaccctatggtagttctttttatgctctggaggagaagcacgtgggcttttcgctcgatgttggcgaaattgagaaaaaaggaaaaggcaaaaagcgcaggggtaggagatcaaaaaaagaacggagaaggggacgcaaggaaggcgaagaggatcagaatcctccctgccctcgactgagtcgcgaattgctggacgaaaagggtccggaggtcttacaggattcactcgatcgctgttatagtaccccgagtgggtgcttagaactgacagactcctgccaaccctaccgcagtgccttttacgtgctggagcagcagcgagtgggcctggcggtagacatggacgaaatagagaaataccaggaggtcgaggaggatcaggacccaagctgtccaagactgtcccgggagttgcttgatgaaaaggaacctgaggtgctgcaggatagtcttgatcgatgctacagcacccccagtggatacttagagctgccagacctgggccaaccgtactcctccgctgtttattcactggaggagcaatatctcggactggccctcgacgtggaccgcaccaaaaaggatcaggaggaagaggaggatcaagggccaccgtgtccgcgattgtcacgagaactgctcgaggtggtggaaccggaggtgctacaagatagcttagatcggtgttatagcaccccatcgtcctgtcttgagcagcccgatagttgtcaaccttatgggtcttcattctacgcattggaggagaagcatgttggcttcagtttggatgtcggtgaaatcgaaaagaagggaaaggggaaaaaaaggcggggtaggagaagcaagaagaagcgtcgcagaggtaggaaagaaggggaagaagaccaaaacccaccatgtccccgactgaatggcgtcttgatggaagttgaagagcccgaagtgcttcaggatagtctagatggatgttactccacacctagcatgtatttcgaacttcctgacagctttcagcactatcggagcgtcttttattcctttgaagagcagcatatttcatttgcgctgtacgtcgacaatcgctttttcacgctcaccgttaccagtctccatctggtgttccagatgggcgttattttcccccagtag

SEQ ID NO: 232370 - DNA, 780 bp, synthetic construct
  misc_feature 1..780: note = Description of Artificial Sequence: Synthetic coding sequence
  source 1..780: mol_type = other DNA
atggtggtgagcgccggtccttggtcgtctgagaaggctgagatgaacatcctagagatcaatgagaagctgagacctcagcttgccgaaaataagcagcagtttgggaatctgaaagaacgctgctttgtgacccaactcgccggttttctcgccaatcagcagaagaagtacaattacgaggagtgtaaggatctgattaaattcatgcttcgcaacgagagacagtttaaggaggaaaagctggccgagcagttgaaacaagctgaggagctcagacagtacaaggtattggtccatagtcaagaacgtgagttgacgcagttgagagaaaaattgagagaggggagagacgcatcccggtctctgaatgagcatcttcaggctctcctgaccctggatgagcctgacaagtcccagggacaggaccttcaagaacagctcgctgagggctgcagactggcccagcaccttgtgcagaaactgtctcctgagaatgatgaggacgaggatgaagacgtccaagtggaggaggctgagaaagtccaaaagtcctccgcaccgagggaagttcaaaaaacagaagaatcgaaggtgcccgaggattccctcgaggagtgtgccatcacctgctctaacagccacggcccatgtgatagcaatcaacctcataaaaatatcaagatcaccttcgaggaagacgaggtaaattctaccctagtagtcgatcgggagtcttcacacgatgagtgccaagatgcactcaacattctcccatag

SEQ ID NO: 232371 - DNA, 456 bp, synthetic construct
  misc_feature 1..456: note = Description of Artificial Sequence: Synthetic coding sequence
  source 1..456: mol_type = other DNA
ctatcacgcgaactcctggaagttgtcgaaccggaagtgcttcaggactccctagacaggtgttactcgacaccgagctcctgtctagagcaacctgattcttgccagccttatgggtctagtttctatgcccttgaggaaaagcacgtggggttttcactggacgtcggggaaatcgagaaaaaggggaagggtaagaaacggagaggcaggagaagcaagaaagaaaggaggaggggccgaaaagagggcgaggaagatcaaacgcccccatgtccgcgactgtcccgcgagctgcttgacgaaaaagggccagaggtcctgcaggacagtctggatagatgctactccacaccctccggttgcctggaactgacggatagctgtcagccttaccgatccgccttttatgtacttgagcaacaacgcgtagggctggccgttgatatggactag

SEQ ID NO: 232372 - DNA, 456 bp, synthetic construct
  misc_feature 1..456: note = Description of Artificial Sequence: Synthetic coding sequence
  source 1..456: mol_type = other DNA
ctaagtcgggagttactggaggtcgtggaaccagaggtcctacaggactcattggatcggtgctattctacaccttcatcttgcctggaacaacctgacagctgtcaaccatatggatcctcattttacgcactggaggaaaagcacgtcggcttttcccttgatgtgggagaaattgagaagaaaggaaaaggaaagaagaggagggggagacggtcaaaaaaagagcgcaggcgaggtagaaaagagggagaagaggaccaaaatccaccttgcccaaggctgagccgagagttactggacgaaaaggggccagaggtcctgcaggattcattggataggtgttactctacaccctctggctgcttggagctaactgacagctgccagccatatcgctccgccttctacgtgcttgaacagcaaagggttggactcgcagtggatatggattag

SEQ ID NO: 232373 - DNA, 456 bp, synthetic construct
  misc_feature 1..456: note = Description of Artificial Sequence: Synthetic coding sequence
  source 1..456: mol_type = other DNA
ctgtccagggaactgctagaagtcgtcgagcccgaagtattacaggattccctggatagatgttatagcacccccagcagttgccttgaacagcccgactcctgccagccttacggtagcagtttttacgcactggaagagaaacatgtgggcttctctcttgacgtgggcgagatcgagaaaaaagggaagggcaagaaaaggcggggacgtcgctctaaaaaggagcgcaggcgcggacggaaagagggggaagaggaccagaatccaccatgtcctaggctgtctcgagagctcctggacgagaagggacccgaggtgctgcaagactcactggaccgatcttatagtactcccagtgggtgtcttgaacttacagacagctgccaaccatatagatcggcattctacgtcctcgaacagcagcgcgtcgggctggccgttgacatggattag

SEQ ID NO: 232374 - DNA, 456 bp, synthetic construct
  misc_feature 1..456: note = Description of Artificial Sequence: Synthetic coding sequence
  source 1..456: mol_type = other DNA
ttaagtagagagttattagaagttgttgaaccagaggtccttcaagactctctggataggtgctactctaccccatcttcctgcctggagcagcctgattcttgccagccttacgggtcttcgttctacgctctcgaggagaagcatgtaggtttctctttagatgtgggggaaattgaaaagaaaggcaagggcaaaaagaggagaggccgtagatcgaagaaggagcggcgaaggggccgtaaggaaggcgaagaagatcagaatccaccttgccctaggttatcccgcgagctcctcgacgaaaaggggccagaagtgctccaggactccctggatcgctgttacagcaccccttcaggctgtctggaactcacagactcgtgccaaccgtaccgctccgccttctatgtgctggaacagcaaagagtcggcctcgccgtggacatggactag

SEQ ID NO: 232375 - DNA, 2016 bp, synthetic construct
  misc_feature 1..2016: note = Description of Artificial Sequence: Synthetic coding sequence
  source 1..2016: mol_type = other DNA
atggtggtctcggccggacccctctctagcgagaaggcagaaatgaacatcctagaaatcaacgaaaagcttcatccacagctggcagagaagaaacagcagtttcggaacttaaaggaacgctgtttcgttacacagctggctggtttcctcgccaatcaacagaagaagtataagtacgaggagtgcaaagatctgattaagagcatgcttcgtaacgaaagacagttcaaggaggagaagctcgccgagcagttgaagcaggcagaggaactgaggcagtacaaggtgcttgttcacgctcaggagcgagaattaacccagctccgggaaaagctgagagaaggaagggatgccagccgctctctgaacgagcaccttcaggcactactcactccagatgaaccggataagtcacaggggcaagacttgcaggagcaactggccgaagggtgccggcttgcccagcacttagttcagaaactgtcccccgaaaacgacaacgacgatgatgaagacgtgcaagttgagctggctgagaaggtgcagaaatcatccgcccctagagaaatgcagaaagcagaggagaaagaggtgcccgaagacagccaggaggagtgcgctattacgtattcgaatagtcacggcccttacgattccaatcagccccacagaaaaaccaagatcacttttgaagaggacaaggtggactccactctgatagggagttccagtcacgttgagtgggaggatgccgtccacattatccccgagaatgagagcgacgatgaggaggaagaggagaagggcccagtctcccctcggaacttacaggaaagcgaagaggaagaggtcccacaggaatcctgggacgaaggatactctaccctctctattccccctgagatgctggcgtcttaccagtcatactcaagcacttttcactcactggaggagcagcaagtgtgcatggccgtggacatcggaagacacagatgggatcaggtgaagaaggaagaccaggaggcgactggaccgcgtctgtcaagggagctgctcgatgagaaggggcctgaggtgctgcaagactccctagaccggtgctactcaacccctagcggctgtctggaattgacagactcctgtcaaccctatagatctgcattttatgtgctcgaacagcagagggtgggcctcgccgtggacatggacgagattgaaaaataccaagaagtggaagaggaccaagaccccagctgccctcggctgagccgcgagctgttggacgaaaaggaacctgaggttctgcaggatagtctggatcggtgttattccacacccagcggctatcttgaattgccggatctcggacagccttattcgagcgctgtgtactcattggaggagcaatatctaggcctggctctggatgtagatcgcaccaagaaggaccaggaggaggaggaggaccagggccctccttgccctcgactcagtcgcgaactgctggaggtggtcgagcccgaggtgttgcaggacagtctggataggtgctacagtactccctcgagctgtctggaacagcccgacagctgtcagccttatggaagttccttttacgccctggaggaaaagcatgtgggcttctcgctggatgtcggtgagattgaaaagaagggaaagggaaagaaaaggcgcggtcggagatccaagaagaagcgtcggagaggcagaaaggagggcgaagaagatcagaaccccccatgtcccagattaaatggtgtgttgatggaggtcgaggagcctgaggttctccaagactcccttgacgggtgctactccaccccttccatgtatttcgagctgcccgactcttttcagcattacaggagcgtgttctatagcttcgaggagcagcacatctcttttgccctgtacgtagataatagattttttactctgactgttacttcactacatctggtattccagatgggtgtgatttttccacagtag

SEQ ID NO: 232376 - DNA, 474 bp, synthetic construct
  misc_feature 1..474: note = Description of Artificial Sequence: Synthetic coding sequence
  source 1..474: mol_type = other DNA
ttgtccagggaactcctggaagttgtggagcctgaggtgctccaggattccttggacaggtgctactcgaccccctcttcttgtctcgagcagcctgatagctgccagccctatggatcatctttttacgcacttgaagaaaaacatgtggggttctctctggacgttggggaaattgagaaaaagggtaagggcaagaagaggcggggtcggaggagcaaaaaggaaaggcgtcggggaagaaaagagggcgaggaggaccagaatcctccttgccctaggctgtcacgggagcttctggacgagaaggggccagaagtgttacaggattccctcgatagatgttactctaccccttctggctgtctggagctaacggacagctgtcaaccatataggtccgccttctatgtccttgagcagcagcgtgttggcctggccgtggatatggacggcgagtacctgtccatgtag

SEQ ID NO: 232377 - DNA, 681 bp, synthetic construct
  misc_feature 1..681: note = Description of Artificial Sequence: Synthetic coding sequence
  source 1..681: mol_type = other DNA
ctcagccgggaactgctggaagtggttgaaccagaggtacttcaggactccttggaccgctgttattctactccaagctcttgcctggaacaacctgattcatgccagccttatggcagctcgttttacgcactagaagagaaacacgtgggcttttctctggatgtcggcgagatcgaaaagaaaggcaagggtaagaaaaggcggggtagaagaagcaaaaaagagaggcgcaggggacggaaagagggggaggaggatcagaaccctccctgcccaagattaagtagggaactacttgatgaaaagggtcctgaggtactacaggattcgctggatcggtgttattcaactccttcaggctgcctcgagcttactgactcctgccagccctaccggagcgccttctatgtgctagaacaacagcgcgtgggattggccgtggatatggatgagatagaaaagtatcaggaggtggaggaggaccaagaccccagctgcccgaggctgtcaagagaactgctcgatgaaaaggagcctgaggtgctgcaggacagtctcgatcgatgctattcaacgccatctgggtatctcgagcttccagacctgggccagccgtacagtagtgcagtctatagcttggaggagcagtatcttggccttgctctggacgtcgattag

SEQ ID NO: 232378 - DNA, 810 bp, synthetic construct
  misc_feature 1..810: note = Description of Artificial Sequence: Synthetic coding sequence
  source 1..810: mol_type = other DNA
atggacgaaattgaaaaatatcaggaggtggaggaagaccaagacccctcatgcccgagactctcacgtgaactactggatgagaaagagcccgaagttctgcaggatagtttagaccgctgctacagcaccccctccgggtatttggaactaccggacctcgggcagccatattccagcgctgtatatagtctggaggagcagtatctggggctagctcttgacgtggacagaacaaaaaaagatcaggaggaggaggaggaccaggggccaccttgccctcgtctatcccgagaactgttggaggtggtagagcctgaagtacttcaggactccctggaccgctgctacagcaccccctctagctgtctggagcagccagactcttgccaaccctacggttccagtttttatgctctcgaggagaagcacgtgggattctcactcgacgtgggggaaatcgagaaaaaaggtaaaggcaagaagcgaaggggcaggcgctctaagaagaagagaaggcgtggacgcaaggaaggggaagaagatcagaacccaccgtgtccacggctcaacggcgtattgatggaagttgaggagccggaggtcctgcaagacagtcttgacgggtgctatagtacaccatccatgtattttgaactccccgacagctttcagcactaccggagtgtgttctatagtttcgaagaacagcacatctctttcgctctgtatgttgacaatcggttcttcacactcaccgtgacaagccttcacttagtgttccaaatgggcgttatttttccccaatag

SEQ ID NO: 232379 - DNA, 474 bp, synthetic construct
  misc_feature 1..474: note = Description of Artificial Sequence: Synthetic coding sequence
  source 1..474: mol_type = other DNA
ctgtctagggagctcctggaggtggtggagccggaagtcctgcaagactccctggaccgttgctattcaacacctagttcatgccttgaacagcctgattcttgccagccgtacggctcctccttttacgctttggaagagaagcatgtgggcttcagccttgacgtgggggaaattgaaaagaagggcaaagggaagaaaaggcgtggacgtcgctccaaaaaagaacgacggaggggcagaaaagaaggagaggaagaccagaaccccccatgtccccgtctgtcccgggagttgctggatgaaaaaggtcccgaggtgctccaggatagtcttgaccgatgctacagtaccccgtccggctgtctggaactaaccgacagctgtcaaccctatcggagcgcgttctacgtccttgaacagcagagagtcggcttagccgttgacatggatggcgagtatttgtcaatgtag

SEQ ID NO: 232380 - DNA, 525 bp, synthetic construct
  misc_feature 1..525: note = Description of Artificial Sequence: Synthetic coding sequence
  source 1..525: mol_type = other DNA
ctcagtagggaactgctggaggtcgtggaacccgaagtgctccaagactcactggatcggtgctattccactccaagtagctgtctggaacagccggacagctgtcagccctatggatccagtttttacgccctggaggagaagcatgtgggattctccctggacgttggagagattgagaagaagggcaagggtaaaaaacgcagaggacgcaggtctaaaaaaaagcggagacgagggagaaaggagggagaagaggaccagaatcctccttgtccgagactaaacggtgtgctgatggaagtggaggagcctgaggtactgcaagacagtctggacggttgctactctacaccctctatgtactttgagctgcccgacagcttccagcattaccggtcagtgttctactcgtttgaagagcagcatatttcatttgccctttacgtcgataataggttctttacacttacagtcacaagtttacatcttgtcttccagatgggtgtgatcttcccacagtag

SEQ ID NO: 232381 - DNA, 456 bp, synthetic construct
  misc_feature 1..456: note = Description of Artificial Sequence: Synthetic coding sequence
  source 1..456: mol_type = other DNA
ctttctagggagcttctggaagtggttgagccggaagttttacaggattccttggaccgatgttactctacgccttcctcctgtctggagcagccagactcctgccaaccatatggcagcagtttctacgcgttagaagaaaagcacgttggttttagcctggacgtgggggaaatcgaaaaaaaaggtaaaggtaaaaagcggcgtgggcgtcgatccaaaaaggagcggcgaagggggagaaaggaaggagaagaggatcagaatcctccctgtccacggctgtcacgcgaactcctcgatgagaaaggcccagaggtactgcaggattcgctagacaggtcttattcgactcctagcggctgcctagagctgacagattcttgccagccttatcggtcagctttctatgtgctcgagcaacagagggtaggactcgctgtggacatggactag

SEQ ID NO: 232382 - DNA, 759 bp, synthetic construct
  misc_feature 1..759: note = Description of Artificial Sequence: Synthetic coding sequence
  source 1..759: mol_type = other DNA
atggacgaaatcgagaaatatcaagaagtcgaggaagaccaagacccatcctgtccccgactcagccgtgagttgctggacgagaaggagccagaggtgttgcaggactccctcgaccggtgctactccacgccctccggatacttagaactgcctgacttgggacagccttatagtagtgctgtgtacagtttggaggaacagtacctcggcctggcccttgacgttgataggaccaaaaaggaccaggaagaggaagaggaccagggcccaccgtgcccaaggctctcgagggaattgttggaggtcgtggaacctgaagtcctgcaggactctctcgacagatgctactccacacctagctcatgtctcgagcaacctgatagttgccaaccttatggctcctcattttatgccctagaggagaaacacgtaggcttttccctggatgtgggggaaatcgaaaagaaaggcaaaggaaagaaacggcgaggacggcgaagcaaaaaagaaaggaggagaggacgaaaagaaggggaagaagatcagaaccccccttgtcctcggttgagcagagaactgcttgatgagaaggggcctgaggtactccaggactccctggaccgctgttactctaccccatcggggtgtcttgaacttaccgatagctgccagccgtaccggtccgcgttctacgtcctggagcagcaaagggtggggctggccgtcgatatggacggggaatatttgtccatgtag

SEQ ID NO: 232383 - DNA, 1734 bp, synthetic construct
  misc_feature 1..1734: note = Description of Artificial Sequence: Synthetic coding sequence
  source 1..1734: mol_type = other DNA
atggtagtatctgcagggccatggtccggagaaaaggctgagatgaatattctggaaattaacaagaaaagccgccctcagcttgccgagaataagcagcagtttcggaacctcaagcaaaagtgcctagtgacccaggtggcctacttccttgcgaacagacagaacaactatgactatgaggactgtaaagatctcatcaagtccatgctccgcgatgaacgcctgctgactgaggaaaaactcgctgaagaactgggccaagcggaagagctcaggcagtataaagttctggttcatagtcaggaaagggaactgacacaactgcgtgaaaaactgcaggagggcagggatgccagccgcagtttgaaccagcacctgcaggccctgctaactcccgacgaacctgataacagccaaggcagggacctccgagagcagctcgctgaaggatgtcgtcttgctcagcacctcgtgcaaaagctgtctcctgaaaatgacgatgacgaagatgaagacgtgaaggttgaagaggcggagaaggtacaggagctctacgccccaagagaggtacagaaagccgaggaaaaagaagtgccagaggattccctggaagagtgcgctataacttgctccaatagccatcatccctgcgagagtaaccagccctacggcaacaccagaataacattcgaggaggatcaggttgatagcacactgatcgactcttcaagccacgatgaatggcttgacgccgtgtgcattatcccagaaaatgaatccgatcatgagcaggaagaggagaagggccctgtcagtcctcgcaatctccaggagtctgaagaggaggaagcgccacaggaatcgtgggacgagggcgactggacactgagtattccaccagatatgtctgcaagttatcagtctgaccggagcacctttcattccgttgaagagcagcaggtgggtctagcactagacattggtagacactggtgtgatcaggtaaagaaagaggaccaggaggccacctctcctcggctctctagagagctgctggacgagaaagaacccgaggtgcttcaggactctttggaccgattctattccacacccttcgagtacctcgagctgccagatctgtgccagccttaccgaagcgacttttacagcctccaggagcagcatctaggcctggcactagatctcgacagaatgaaaaaagatcaggaagaagaggaggatcagggccctccctgccctcgactgagccgcgaattaccggaagtggtcgagccagaggacctgcaggactcactggaccgatggtattcaacaccattcagctatccagaactgccagatagctgccagccctacggcagctgcttttactccttggaagaggagcatgtcgggttctcactggacgtagacgagatagagaaataccaggaaggagaggaggaccagaaacccccttgtcctaggctaaacgaggtgctcatggaagccgaggaaccagaagtcttgcaagactccttagatcgctgctattctaccacaagcacatactttcaattgcatgctagctttcaacagtatagatccgcgttctactcatttgaggagcaggacgtgagtttagccctggacgtagacaacaggttcttcactcttacagttattagacaccacctggcatttcagatgggagtgatttttcctcactag

SEQ ID NO: 232384 - DNA, 1902 bp, synthetic construct
  misc_feature 1..1902: note = Description of Artificial Sequence: Synthetic coding sequence
  source 1..1902: mol_type = other DNA
atgcccttgacccctaccgtacagggattccagtggaccctgagaggcccagacgtggagacttcacccttcggtgccccacgggctgcctcccacggcgtcggacgccatcaggaactgcgggatcctaccgtgcctggtcccacttcatctgcaactaatgtcagtatggtggtgtctgccggaccctggtctggcgagaaggccgaaatgaatatcctggagatcaacaagaagagcagaccccagttggcggagaataaacagcagttccgaaacctcaaacaaaagtgcctggtgactcaagttgcatacttcctggccaatcggcagaataattatgactatgaagattgcaaggatctgattaaatcgatgctaagagacgagagattactcacagaagaaaagttggcagaagaactcgggcaggcagaggaactgcgacagtacaaggtgttagtgcatagccaggagcgagaactgactcaactgcgagagaaattacaggaggggcgagacgccagccgatcactcaaccaacatctgcaggctttgcttactcccgatgaacccgataattcacagggacgggaccttcgcgagcagttagcagaaggatgccgcctggcccagcacctcgtccagaagctttcacccgagaatgacgatgacgaagatgaagacgtgaaagtcgaggaagccgagaaagtccaggaactgtacgccccaagggaggtacagaaggctgaggagaaggaagtaccagaggactcattagaggaatgcgcaattacatgctctaacagccaccacccgtgtgagtcaaatcagccatacgggaataccagaatcacctttgaggaggaccaagtggattcaaccctcatagatagttcctctcatgatgagtggttagacgctgtgtgtatcatacctgaaaacgagtctgatcacgagcaggaggaggaaaaaggcccagtatcacccaggaatctccaggaaagtgaggaagaggaggcacctcaggaaagctgggacgagggagactggaccctgagtatcccacctgacatgtccgccagttaccagagcgaccgctccacttttcactccgtggaggaacagcaggtgggattagcactcgatattggccgtcactggtgcgaccaggtgaaaaaagaggaccaggaagcgacctcccccaggctctctcgcgagctgcttgacgaaaaagagcccgaggtgttacaagattctctcgatagattttacagtactccttttgaataccttgaactgccagacttgtgtcagccttacagatcagatttctactcgttacaggagcagcatttaggactggcactggacttggaccggatgaaaaaagaccaggaggaggaagaggaccagggcccaccctgtcctcgcctgtccagagagttacccgaagtagtggagcccgaagatctgcaggactccctcgataggtggtacagcacccctttttcctacccagaactgcctgactcgtgtcagccatacggaagctgcttttactccctcgaggaagagcacgttgggttcagtctcgatgtggatgagattgaaaagtatcaggaaggtgaggaggatcagaagccaccctgcccacggctgaacgaagtgctcatggaggccgaggagcccgaggtgctgcaggacagcctggaccggtgctattctacaacaagtacctacttccagctgcacgccagtttccagcagtataggtcagcgttctactccttcgaagaacaggatgtcagtctggctctcgatgtagataacaggttttttactctgaccgttatcaggcaccacctggctttccagatgggcgttatctttcctcattag

SEQ ID NO: 232385 - DNA, 1866 bp, synthetic construct
  misc_feature 1..1866: note = Description of Artificial Sequence: Synthetic coding sequence
  source 1..1866: mol_type = other DNA
atgcccttgacgccaaccgtgcagggctttcagtggacattgcgtggccctgacgtggaaacaagtccattcggcgctcccagggctgcttctcatggggtgggtcgtcaccaagaactgcgggaccccacagtaccgggtcctacaagctctgcaaccaatgtttccatggtcgtctctgctggcccatggagcggagagaaagcagaaatgaacatcttggagattaataaaaaaagccgccctcagctcgctgagaataagcaacagtttcgcaaccttaaacagaagtgtttggtgacccaggtggcttatttcttagcgaatcggcagaacaactatgactacgaggactgtaaagatttgatcaagtccatgctgcgagatgagagacttttgacagaagagaaactagcagaggaactcggtcaagcggaggagctccgccaatataaagttttggtgcatagtcaggagagggaactgacgcagctgagggaaaagctgcaggaagggagggacgccagcagaagcttgaatcagcacctgcaggctttactcactccagatgaacctgataactctcagggcagggacctgagagagcagcttgcggaaggctgtcgtctcgcacagcatctcgtccaaaagctgtccccggaaaacgacgacgatgaggatgaggacgtcaaggtggaagaagcggagaaggtacaggagctttacgctccacgggaggttcagaaggcagaggagaaagaggtccctgaggacagtctggaagagtgcgctataacatgctcaaattcccatcatccttgcgaatctaatcagccttatggtaacaccagaatcaccttcgaagaggatcaagtggacagcacgctgattgacagcagctcacatgacgagtggctggacgcagtttgcataatcccagagaacgaaagcgatcatgaacaggaagaagagaaaggtcctgttagcccccgatcgtccgggagattttgttgcctgatttccgtcgggtacatcttttgccatccatgtccagcttggcttatacggaacctgcaggaatccgaggaggaggaggcacctcaggagagctgggatgaaggccactggtgcgatcaagtaaaaaaggaggatcaggaagctacctcccctcgtttgtcccgggagttactggacgaaaaggagcccgaagttctgcaggacagccttgatcgcttctacagcacccctttcgagtatctcgagctgccagacctgtgtcagccataccgtagcgacttctacagcctccaggagcaacacctgggattagctcttgacctcgatcgtatgaaaaaggatcaggaggaagaggaggatcagggcccaccttgtcctcgcctgtcccgcgaactccctgaagttgttgagcctgaggacttgcaggattccctcgaccgatggtacagcaccccattctcctatcccgagttacccgattcttgtcagccctacggctcatgcttttacagtcttgaggaggagcacgtcggcttttccctggatgtggatgagattgaaaagtaccaggaaggggaagaggatcagaaacccccttgtcccagactcaatgaggtcttgatggaggccgaagagcctgaggttctacaagacagcctcgaccgctgctattcgacaacaagcacctacttccaactccacgcctccttccagcagtatcgatccgccttttactcatttgaagagcaggatgtgtccctcgctctcgacgtggacaataggttttttaccctgaccgtgatacgtcatcacttggccttccagatgggcgtgatcttcccacactag

SEQ ID NO: 232386 - DNA, 1062 bp, synthetic construct
  misc_feature 1..1062: note = Description of Artificial Sequence: Synthetic coding sequence
  source 1..1062: mol_type = other DNA
atggtcgtgtccgctgggccttggtccggtgagaaggcagaaatgaacatactagaaattaataaaaagagccggccacagctggccgaaaataagcaacaatttcgcaatcttaaacagaagtgccttgttactcaagtggcctacttcctggccaaccggcagaataattacgactatgaagattgcaaagatcttatcaagtctatgcttcgtgacgagagactgctgacggaagaaaaactcgccgaggagttgggccaggccgaggagttgcggcagtacaaagtcctggtacacagccaggaacgggaactgacacagctacgcgagaagctccaggagggaagggacgcaagcagatctctcaatcaacatcttcaagcactcctcactccggatgagcctgataatagtcaaggccgtgaccttagggagcagctagccgaaggctgtcgactagcacaacatctggtgcaaaagttgtcaccggagaatgatgacgatgaagacgaggacgttaaagtggaggaggcagagaaagtccaggagttatacgctccacgggaggtgcagaaagcagaggagaaggaggtgccggaagatagcctggaagaatgcgcgattacctgctccaattcccatcacccatgcgaatccaatcagccctacggcaacacacgtatcactttcgaggaggatcaagttgactcaaccctcatcgacagtagtagtcacgatgagtggttggatgcagtgtgtataatacccgaaaatgagtctgatcatgagcaagaagaggagaagggaccagtgtcccccagaaacctccaggaatcggaggaggaagaggcaccacaggagtcctgggacgaaggagactggactctatctattcctcctgatatgtccgctagctaccagtctgatcggagtacattccacagtgttgaagagcagcaggtgggtctggccctggacatcggccgtcactggtgcgaccaagaaaaagggggtcccaggggccataagtctcaggcccagcagggggctgcaggatag

SEQ ID NO: 232387 - DNA, 1668 bp, synthetic construct
  misc_feature 1..1668: note = Description of Artificial Sequence: Synthetic coding sequence
  source 1..1668: mol_type = other DNA
atggtggtgtccgccggtccgtggagcggtgaaaaagctgagatgaatatcctcgaaatcaacaagaaaagccgcccacagctcgctgaaaataagcagcagtttagaaacctcaaacaaaagtgcttagtgactcaggttgcttattttttggcaaatcgacagaataactacgactatgaggattgcaaagatctgataaaaagcatgttaagagatgaaaggttgctaactgaagaaaagcttgcggaggaacttgggcaggctgaggagctgagacagtacaaagttctcgttcactcacaggagcgagaactcacacagctccgcgaaaagctgcaggaaggacgtgacgcgtccagaagcctgaatcagcacctgcaggccctccttacccctgacgaacctgacaattctcaggggcgagatttgcgggaacaattggcagaggggtgtagactcgcgcagcacctcgtacagaagctgtctccggagaacgacgacgatgaggatgaagatgtaaaagtcgaagaggccgaaaaggtgcaggagctgtatgcgcctcgcgaagttcagaaggcggaagaaaaggaagtccccgaagactcgttagaggaatgcgcgataacctgctcgaacagccaccacccttgcgagagcaatcagccctatgggaatacacgtatcacatttgaagaggaccaagtagatagtaccctgatcgactcttctagccacgatgaatggctggatgccgtctgcataatacctgagaacgagagcgatcatgagcaggaggaggagaaagggccagtgagccctcgcaaccttcaagagtcggaagaagaagaggcaccccaagagtcatgggacgagggggactggacactttccattccaccggatatgagcgcctcatatcagtctgaccggtccaccttccattctgtagaagaacagcaagtgggtcttgcgcttgatatcggaagacattggtgtgatcaggtgaaaaaggaggaccaggaagctaccagcccgagactgtctagggaattacttgatgaaaaggagccagaagtgttacaagactccctcgatcgcttttatagtacgccctttgagtatctggagctgccagacttatgtcagccataccggtcagatttttactcactccaggagcagcaccttggactcgccctggatctggatcggatgaagaaggatcaagaagaggaggaagaccagggacccccatgcccaagactttcccgggaactccctgaagtggtggaacccgaagatctccaggactctttagacagatggtattcgactcctttttcatatccggagcttcctgattcatgccaaccttacggcagctgtttttatagtctagaggaggaacatgtaggattcagcctggatgtagacgaaattgaaaagtatcaggagggagaagaagatcagaaacccccatgtccaaggctgaatgaggtcctgatggaggctgaagagccagaagtcctgcaggacagtctggacagatgctactccaccacatcaacctatttccaactccatgcaagcttccagcagtaccggtcagccttctattctttcgaggagcaggacgtcagcctggctcttgatgttgacaattag

SEQ ID NO: 232388 - DNA, 1692 bp, synthetic construct
  misc_feature 1..1692: note = Description of Artificial Sequence: Synthetic coding sequence
  source 1..1692: mol_type = other DNA
atgccgcttactcctacagtccagggctttcaatggacattaaggggccctgatgtggagacatctccatttggcgctcccagggccgcatcacatggcgtgggcaggcaccaggagttgcgggacccaactgactacgaagactgcaaggatttgatcaagtctatgttgagggacgagcgtttgttaactgaagagaaactagcagaggaactgggtcaggccgaggagttaaggcagtataaggtcctcgtgcacagccaggagagggagctaacccagttacgcgaaaaactgcaggaggggagagacgcctcccgctctctcaaccagcatttgcaggctctgcttaccccagatgaacccgacaattctcaaggacgggatctgagggaacagctggccgaggggtgcaggcttgcgcaacacctggtccagaagctgtcacctgagaacgacgatgacgaagacgaggacgtgaaagttgaggaagcggaaaaggtgcaagaactgtacgcaccgagggaggtgcaaaaggccgaggagaaggaggtacccgaggacagtctggaagaatgcgcgattacttgttccaacagtcaccacccgtgcgaaagtaaccagccctatgggaatacccgtatcacctttgaggaggatcaggttgattccactcttatcgactccagctctcatgacgagtggctcgatgcggtttgcatcataccagagaatgagtctgatcacgagcaggaagaggaaaagggacctgtctccccaagaaacctgcaggagtctgaagaagaagaggctccgcaggagtcatgggacgagggcgattggaccctctccattcccccagatatgagcgccagctaccagagcgatcgtagtacttttcactctgtggaggaacagcaggtgggcctggccctggatatcgggcgacattggtgcgaccaggtcaaaaaggaggaccaggaagctaccagccccagactaagcagagagctccttgatgaaaaggagccggaagtgttacaggattctctcgaccgattctattctacaccgttcgaatacctggagctaccggatctttgccagccataccgcagcgacttctacagcctgcaagagcaacatctcggtctggcgcttgacctcgatcgcatgaagaaggaccaggaagaagaagaggaccaagggccaccatgtcctcgtttatcccgtgagctccccgaggtggtggaaccagaggatcttcaagacagcttggatcggtggtattcaacccccttctcctacccagagctgccggattcttgccaaccatatggtagttgcttttactcactcgaagaggagcacgtcggtttttccctcgacgttgatgagattgagaagtatcaggaaggcgaggaagatcagaaaccgccttgtcccagactgaacgaggtccttatggaggccgaagagcctgaggtattgcaggactcactggatagatgttactccacaacaagcacatacttccagctgcatgcatccttccagcagtatcgaagcgcattctactcctttgaggaacaggatgtctccctggctcttgacgttgacaacagattcttcaccctgacagtcattcgtcatcatttggctttccagatgggcgtcattttccctcattag

SEQ ID NO: 232389 - DNA, 1917 bp, synthetic construct
  misc_feature 1..1917: note = Description of Artificial Sequence: Synthetic coding sequence
  source 1..1917: mol_type = other DNA
atggtggtgtccgccgatcctctctcttctgaaagggcagagatgaatatcctggagattaatcaggagctccgcagtcagcttgctgaatcaaaccagcagttccgcgatttaaaggaaaaatttctgatcacacaagcgacagcttatagcctggcaaatcaactgaagaagtataagtgcgaagaatataaggacatcattgattctgtgctgagggacgagctccaatctatggaaaagctcgccgagaagcttcgacaggcggaggagctgcgccagtacaaggctctcgtgcatagtcaggccaaagaactcacccagttgcgggagaaactccgtgagggaagggacgcttctagatggctgaataaacatttgaaaaccctgttgactccagacgacccagataagtcccagggtcaggacctgagagagcaactcgcagagggccaccggctggccgagcacctggttcacaagctgtcccctgaaaatgacgaggacgaggacgaagacgaggacgataaggacgaggaggtggaaaaagtgcaagaatctcctgcccctagagaagtgcagaaaaccgaggaaaaagaagtgcctcaggatagcctcgaggaatgtgctgtcacttgttctaactctcataacccctctaattctaatcagccccatagatcaactaagatcacatttaaggaacatgaagttgattctgcgctcgtcgtggaaagcgaacatcctcatgacgaagaggaagaggctttgaacatcccacctgagaatcagaacgatcatgaggaggaagaagggaaggcccctgtgcctccaaggcatcatgacaaatcaaacagttaccgacatcgcgaagtgtctttcctagccctcgatgagcaaaaagtctgcagcgcccaggacgtggctagggattacagcaacccaaagtgggacgagacatctctaggttttctggaaaagcagtcggatctcgaggaggtgaagggccaagaaacagtagccccaagactgtccaggggacctctacgggttgataagcatgagatcccccaagaatccctggatgggtgctgtctgacaccgtcaatcctgccagaccttactccttcttaccatccatactggagtaccctgtatagcttcgaggacaagcaggtctcactcgccttagttgacaagataaagaaagatcaggaggaaatcgaggaccagtcaccaccatgccccaggctcagccaggagctgcctgaggttaaagaacaagaagttccggaagacagcgtgaacgaagtgtatttaacccctagcgtacaccacgacgtgagcgattgccaccagccttactccagtaccctatcctccctcgaagatcaactcgcatgttcagccctggatgtagccagtcctacggaagccgcttgtccgcaggggacatggagtggagacctatcccaccatcagagcgaagtccaggtgagccaggcgcagctggagccatcaaccctcgtccccagctgtctccgccttcagctggatcagggattccactgcggcaacgggctggcgcagcgcggattatccagcacaacttgctcgttttcggcgaatgcggattccggaaaccaatggccttttcaggagctggtgctggaaccttcactaggcatgaaaaatccaccacagctggaagatgatgccctggagggcagtgccagcaacacccagggtcgccaagtcaccggccgaatcagggcaagtttagtgttaatcctgaagacaatccgtagacggctccccttctcgaaatggcggctagcttttaggtttgcagggccacacgctgagtcagccgagatacccaataccgcaggccgaacacagaggatggctggctag

SEQ ID NO: 232390 - DNA, 1917 bp, synthetic construct
  misc_feature 1..1917: note = Description of Artificial Sequence: Synthetic coding sequence
  source 1..1917: mol_type = other DNA
atggtggtcagcgctgaccccttatcatccgagagagctgaaatgaatatcctagagatcaatcaggagttgaggagtcagttagccgaatccaatcaacagttccgtgatctgaaagaaaaattcctcatcacacaagcaacagcgtactcacttgcaaaccagctcaaaaaatataaatgcgaagaatataaggacataatcgacagtgtgctgagagatgaattgcagtccatggaaaagcttgcggaaaagctgagacaggccgaggagctcagacagtacaaagcgcttgtccactctcaggccaaggagctgacacagcttcgagaaaaactgcgcgaggggagggacgcctcaaggtggttaaataagcacctgaaaacgcttctgacacctgatgatccggacaaatcccagggacaagacctacgggagcagctcgcagagggccacaggctggcagaacatctcgtgcacaagctgtccccggagaatgatgaggatgaagacgaggatgaggacgacaaagacgaggaagtagagaaggtgcaggagagcccagcccctcgggaggtgcaaaagaccgaggagaaggaagtgcctcaggattctcttgaggagtgtgccgttacctgtagtaacagtcacaatcccagcaacagtaaccagcctcaccgaagcaccaaaattactttcaaggagcatgaagttgatagtgccctcgtggttgagtccgaacatccccacgatgaggaggaagaagcgttgaatatacccccagaaaaccagaatgaccacgaggaagaagaaggcaaggctcctgtgccgccaaggcaccatgacaaatctaattcctacagacaccgagaagtgagcttcctcgccctcgacgaacagaaggtctgcagcgcccaggacgttgcacgcgattacagcaatccgaagtgggacgagacatctctggggttcctggagaagcaatctgacctcgaagaagtgaaggggcaggaaacagttgcgcctaggctgtcgcgcggacctctcagagtagataagcatgagataccgcaggagtctctggacgggtgctgcctgaccccatcaatcctccccgaccttactccatcttaccacccttactggtcaacactgtactctttcgaagataagcaagtcagcctggccctggtggacaagatcaaaaaggaccaagaggaaattgaggatcagtcaccgccttgtccaagattgtcccaggaactcccagaagtcaaagaacaggaagtaccggaagacagcgtgaacgaagtctacttaacgccctctgtgcatcacgacgtcagcgactgccaccagccctattcctctaccctgtcgtcgcttgaagaccaactggcctgtagtgccctggatgtggcttcacccacggaggccgcatgcccgcaaggtacctggtcgggcgatttgtcgcaccatcagagtgaagtacaggtttcacaggctcagctggagccaagcacgctcgtcccttcatgtcttcggctacagctggatcaggggttccactgtggtaatgggctcgcccagcgcggactttcctcaaccacttgctcctttagtgctaatgccgactctgggaatcaatggccctttcaggagctggtcctcgaaccaagcctcggaatgaaaaatcctccacaacttgaggacgacgctcttgaggggtctgcatccaacacacaaggcaggcaggtgaccggaaggattagagccagcctggtgctcattctgaaaacaatcaggagacgactcccattttctaagtggagactggcctttagattcgccggacctcacgctgaatcagcggagatcccgaacacagctgggaggacgcagcgcatggctggttag

SEQ ID NO: 232391 - DNA, 1722 bp, synthetic construct
  misc_feature 1..1722: note = Description of Artificial Sequence: Synthetic coding sequence
  source 1..1722: mol_type = other DNA
atggttgtcagtgccgatccgcttagcagcgagcgcgcagagatgaatatattggagattaatcaggaactcaggagccagctggctgaatcaaaccaacagttccgtgacttgaaagaaaaattcctcatcactcaggcgacagcgtatagtcttgctaatcaactgaagaaatataagtgcgaggagtataaggatattatcgacagcgtccttagagatgaactccagtcgatggagaaactggctgagaagctgcggcaagccgaggaactccgccagtataaggccttggtccactctcaggctaaggagctgactcagctgagagagaagctgagagaaggcagggacgcctcacgctggctgaataaacatctgaagacactgttgacaccggacgaccccgataagtcacaaggacaggaccttagagagcagttggccgaaggacaccgcctggccgaacatctggtgcacaaattgagccccgagaatgacgaagacgaggacgaggacgaggatgataaagatgaggaagtggaaaaagttcaggagagtccagctccgagggaggtccagaaaactgaggagaaagaggttccacaggactccctagaagagtgtgccgtcacatgcagcaatagtcacaatccatcgaattccaatcagcctcacaggtctacaaagattacctttaaggagcatgaagtcgactcagccttggtggtagagtctgaacatccccatgatgaggaggaagaggcactgaatattccccctgagaaccagaatgaccatgaagaagaggagggcaaagctcctgtccctcctagaaaccggcagagcctcgaaccgggagaactcaccaacttacgcgatttccttatatctccagtagtaagtcacgtggccaaccctggtcatcacgacaagagcaactcctatcggcacagggaagtgagctttttggctctcgatgagcaaaaggtttgcagcgcgcaagatgttgctagagactacagtaaccccaagtgggatgagacttcactcgggttcctggaaaagcaatccgatctggaggaggtaaagggccaggagaccgtcgccccaaggctgtctaggggccctctgcgtgtggataagcacgaaataccccaggaatctctcgacggctgttgtcttacaccttcgattctgccagatctgaccccgtcttatcatccatattggagcacactctattcatttgaggataagcaggtttccctagccctcgtcgacaaaatcaagaaagatcaggaggaaattgaagaccaatcacctccctgccctagactttctcaagagctcccggaagtgaaagaacaagaagtcccagaggattctgtcaatgaggtgtatttaacaccatccgttcatcacgatgtgagcgattgccaccagccttatagtagcacacttagcagtcttgaggaccaactggcctgttcagcgctggacgtggccagccctacggaagccgcatgcccccaggggacatggtccggagacttgagccatcatcagtccgaggtgcaagtaagccaggcccagctcgaaccttcgacccttgttccaagttgcctgcgccttcaactggaccagggcttccactgcgggaatggcctggcacagagaggcctgtccagcacgacctgctcattttctgctaacgcatag

SEQ ID NO: 232392 - DNA, 372 bp, synthetic construct
  misc_feature 1..372: note = Description of Artificial Sequence: Synthetic coding sequence
  source 1..372: mol_type = other DNA
atggtggtgtctgctgatccactttcttcagaacgagctgagatgaatatactggagattaaccaggaactgcgctcacagctcgctgaaagcaaccagcagtttcgcgacctgaaggaaaagttccttatcactcaggcaactgcctattctcttgcaaaccagctcaagaagtactcgtgcttgaaatacaggaatcacctgccaccagaacgctgtcgcaggctgaagaaacgaaaatcactgcgcacccattggaggaacgtgctatccctcgttcagatagtgacgacactactgactcccacatctctcacaggggcacccaagagtcacctgcgcaataccaaaagcactctgctgtggctgtag

SEQ ID NO: 232393 - DNA, 2004 bp, synthetic construct
  misc_feature 1..2004: note = Description of Artificial Sequence: Synthetic coding sequence
  source 1..2004: mol_type = other DNA
atggtggtctcagcagacccactgagtagcgaacgcgcagagatgaatattcttgagatcaaccaggagttgagatcacagcttgcagaaagtaatcagcagttccgcgacttaaaagagaagttcttaatcacacaagccactgcctattctctggcaaaccagctgaaaaagtacaagtgtgaggagtataaagacattatagactctgttctcagggatgaattgcagagcatggagaaactggctgagaaattaagacaagccgaggaactaagacaatataaagcactcgtccactcacaggccaaagaactgacacagctgcgagaaaaactccgcgagggacgcgacgcctccaggtggttgaataagcaccttaagactttgctgacacccgacgatcccgacaagagccaaggccaggacctgagagagcagctggccgaaggtcatagattagctgagcacctcgtccacaagctgagtcctgaaaacgacgaagatgaggacgaggatgaggatgataaagacgaagaggtggagaaggtccaggagtccccagctccccgtgaagtacaaaagacggaggagaaagaggtgccccaggattccctggaggagtgtgctgttacttgttccaattcgcacaacccttccaactcaaaccagccgcatcgatccaccaaaatcacttttaaggagcatgaggtggattccgcactggtcgtagagtccgagcacccacatgatgaggaggaagaagctctgaatatcccaccagaaaaccaaaatgaccacgaggaagaggagggcaaagcacctgtcccgccaagaaatcgtcagagcttggaacccggagagctgaccaacttaagggactttttaatcagtccagtggtctcgcacgtggcgaacccgggacaccacgataagtcaaattcctacagacaccgtgaggtgtctttcctggcattggacgagcaaaaggtttgttctgcccaggacgtggccagagattactctaaccctaagtgggatgaaacaagcttaggattcctggagaaacaaagtgacttagaagaggtaaaggggcaggagacagtggctcctaggctctctagagggccactccgggtggacaagcatgagatcccccaggagtctctcgatgggtgttgcctcaccccctcaattcttccagacctgacaccctcctatcatccttactggtcaacactttacagtttcgaggataaacaagtgtcgctggctctggtggataagattaaaaaggatcaggaagaaattgaggaccagtccccgccatgtcccaggttgtcacaggaacttcccgaagtcaaggagcaggaggtgcctgaagacagcgttaatgaggtgtacttgactccaagcgtgcatcatgacgtttctgattgtcaccagccttactcttccaccctgtcctcgcttgaagatcaactcgcttgttccgcccttgatgtcgctagtcctaccgaggccgcttgtcctcagggaacctggtcaggcgaccttagccaccatcgatccgaagtgcagatcagtcaagcccaactcgaaccatctacactcgtgccctcttgcctccggcttcagttagaccagggctttcactgtggcaacggtctcgctcagagggggttgtcctccactacatgctcctttagcgccaacgcagactctgggaatcagtggcccttccaagaactggtccttgagccaagtctgggaatgaaaaacccaccccagttggaagacgatgccctggaaggatccgcttctaacacccaggggagacaggtgacaggcaggatccgggctagcttggtcctaatcctgaaaacaatacgcaggaggctgccgttctctaaatggcggctcgcctttcgtttcgccggtccacacgcggaaagcgctgagatccctaacaccgcggagagaatgcagaggatgattggatag

SEQ ID NO: 232394 - DNA, 1722 bp, synthetic construct
  misc_feature 1..1722: note = Description of Artificial Sequence: Synthetic coding sequence
  source 1..1722: mol_type = other DNA
atggtcgtttcagccgatcctctatcatctgagcgcgcagaaatgaacatactggaaataaaccaggagctgcgcagccagttagcggaatctaatcagcaatttagagacctaaaagagaagtttctcatcactcaggcaactgcctatagtctggctaaccagctgaaaaagtataagtgtgaggagtataaggatatcatagactctgtgttgcgagatgagctgcagagtatggagaaactggcagagaaactgcgccaggccgaggagctacggcagtacaaagccttggtgcattcacaggccaaggaattaacccaactccgagagaaactgagggaggggagggacgctagtagatggctgaataaacacctgaagactctgttgaccccggacgaccctgacaagtcacaggggcaggatttgagagagcaactagccgagggtcacaggctcgccgaacacctggtccacaaactaagcccagagaacgatgaggatgaggatgaggatgaggacgataaagacgaggaagtggagaaagtccaagagagtcctgccccaagggaagttcaaaagacagaagaaaaggaagtgcctcaggattcactcgaggagtgtgctgtgacttgtagcaacagccacaatccttccaacagcaatcagccacaccggtcaacaaaaattaccttcaaggaacacgaggtcgacagcgccctggtggtagaatccgaacacccacacgacgaagaggaggaggctttaaatatccccccagagaatcagaacgaccacgaggaggaagagggcaaggctcccgtgcccccaagaaaccgccagagtctcgagcctggcgagttgaccaatcttcgtgactttctcatctcccccgtagtgtctcatgtcgctaatcccggacaccatgacaagtcaaatagttaccggcatcgggaagtgtcttttctggcacttgatgagcagaaggtgtgcagcgcacaggacgtagccagggattactctaaccctaagtgggacgagacctcactgggatttctcgagaaacagtctgatctagaggaggtcaaggggcaagaaactgtggcaccacgcctcagcagaggcccactccgggtggacaagcatgagattcctcaggagtctctggacggttgctgtctgacaccaagtatcttacctgacttgaccccctcttatcacccctattggtcaactttgtactcgttcgaagacaaacaggtatcactggctctggtagataaaatcaaaaaggaccaggaagaaatcgaggatcaaagccccccttgtcctaggctgtcccaggaattacctgaagtcaaggagcaagaagttccagaagactccgtgaatgaggtgtacctgactcccagcgtccaccacgacgtatcagattgccaccagccctactcatcaacgttgtcgtccttagaagatcagctagcctgttcagcactggatgtggcctctcctacggaagctgcctgcccccaagggacatggagcggagacttaagccaccacagatctgaggtccagataagccaggcacagcttgaaccatctacgctggtgccctcttgcctgcggttgcagttagatcagggatttcactgcggtaacggcttggcgcaacgagggttatcttccaccacttgcagcttctctgctaacgcttag

SEQ ID NO: 232395 - DNA, 1917 bp, synthetic construct
  misc_feature 1..1917: note = Description of Artificial Sequence: Synthetic coding sequence
  source 1..1917: mol_type = other DNA
atggttgtttccgccgacccactctcttcagagcgagcggaaatgaatattctcgagatcaaccaggagcttcgtagtcaactggccgaaagtaatcagcagtttcgggatctgaaagagaagttcttgataacccaagcaacggcctattccctcgcaaaccagctcaaaaagtataaatgcgaggagtataaggacattatagatagtgtgctgagagatgaattgcagagtatggagaagctagccgagaagctgcgtcaggccgaagagctaagacagtacaaagccctggtccactcccaagcaaaggagttgactcagctgagagaaaaactgcgtgaaggtagagacgcttcccggtggctgaacaagcatctaaagacccttctgaccccggatgaccccgataaaagccaaggtcaggatttgagagagcagctagcagaggggcaccggctggctgagcacctggtccacaaattgagccccgagaacgatgaagacgaggatgaggacgaagacgacaaggatgaagaagtcgaaaaggtgcaggagagccccgctcctagagaggttcagaaaacagaagagaaagaagtcccccaggactctctggaggagtgtgccgttacatgttccaatagccacaacccgagtaactcaaatcagcctcacaggagtacaaagattacttttaaggaacatgaagtcgattctgccctcgtggtagaaagcgaacatccgcatgacgaagaagaagaagctctcaacatcccccctgagaaccaaaacgatcatgaggaggaagagggaaaagcgcctgtgccaccccgacaccacgataaatctaattcctatcggcaccgggaggttagcttcctggccctggacgaacagaaggtctgttcggctcaggacgtggctagagactatagtaacccaaaatgggacgagacatcactaggattcctagagaagcagtctgacctcgaagaggtgaaggggcaagaaacagtggccccacgactttccagagggccactcagggtggacaagcacgagattccccaggagtctttagatggctgttgcctcaccccatccatcctaccagatctgacgccctcttatcatccgtactggtccaccctgtacagtttcgaggacaagcaggtctcgctagcattagtcgacaagatcaagaaagatcaggaggaaattgaggaccagagcccaccatgcccacggctgtcccaagaactgccggaggtgaaagagcaggaggtgccggaggactccgtcaacgaagtgtaccttacaccgtccgtccatcacgacgttagcgattgtcatcagccctattcttctaccctgagttctttggaggatcagctggcctgctcagcgctggatgttgcctccccgaccgaagcagcctgcccacaggggacatggtccggggacttgtcacatcaccgctcagaagtacagatcagtcaggcacagctggaaccgtcaacgctggtcccctcatgcctccgcctacaactggaccaaggtttccattgcgggaatggtcttgctcagaggggcctcagttctaccacatgttctttctccgctaatgcagacagcggtaaccaatggccttttcaagagctggttctggagccttcattgggtatgaaaaaccctccacaactcgaggacgatgcactcgaagggagtgcttctaatacccagggcaggcaggtaaccggtagaattcgggcaagtctggtcctgatattgaagacaatccggcgtaggctgcctttttcgaagtggcggctggcgttccgatttgcgggtccccacgcggaatcagcggagatccctaacactgcagaacgaatgcagagaatgataggatag

SEQ ID NO: 232396 - DNA, 1917 bp, synthetic construct
  misc_feature 1..1917: note = Description of Artificial Sequence: Synthetic coding sequence
  source 1..1917: mol_type = other DNA
atggttgtgagtgccgaccccttaagttcagagagggctgagatgaacatcctggagattaaccaggagttgagatcacagctagctgagtcaaaccagcagtttcgcgacctgaaggagaaatttcttattacccaagcaaccgcatactcgctcgccaaccagttaaaaaagtataagtgtgaggaatataaggatattatcgacagtgttcttagagatgagctgcagtccatggaaaagctcgcagaaaagcttaggcaagccgaagagctcagacaatacaaagctctagtgcatagtcaagcgaaggagttaacccagctgcgcgaaaagctgcgggagggcagggacgcttcccgctggctcaacaagcacctcaagaccctcctgacccctgacgaccctgacaagagtcagggccaagatctgagagagcaactggcagaaggtcatcgtctagccgagcatctggttcacaaacttagtcctgagaatgatgaggatgaggatgaagacgaggatgataaggacgaagaggtggaaaaagtgcaggagtctcccgcacccagggaggtccagaagacagaggaaaaggaagttccccaagattccctggaggaatgcgctgttacttgctccaactcccacaatccttccaatagcaaccagccccataggagcaccaaaattacatttaaggagcatgaggtggattccgctttggttgtggaatccgagcatcctcatgatgaagaggaggaagccctaaacatacccccagagaatcaaaatgaccacgaggaggaggagggcaaggctccggtccctccacggcaccatgacaagagtaattcctaccggcatcgagaggtgtcttttctggctcttgacgagcagaaggtatgcagcgcacaggacgtggcccgtgactactcgaatccgaagtgggacgagacttcactcggctttctggagaaacaatctgacttggaggaagtaaaaggtcaggaaacagtagcccctcggcttagccgcggaccactaagggttgacaagcacgaaatcccccaggaaagcttagacggatgttgtctcacaccatcaatcctgcccgacttgaccccctcctaccacccatattggtcaacactctactcttttgaggacaaacaggtgagcctggctctggtagataagattaaaaaggatcaagaggagattgaggatcagagccctccctgcccgaggctgagccaagaactcccggaggtaaaggaacaggaggtgcctgaagacagtgtgaacgaggtgtatctgacaccttcagtgcaccatgacgtgagcgattgccatcaaccttatagttctacactgtcctcattggaagaccaattagcctgcagtgctctggacgtagcaagtccgacagaagccgcttgtccacaagggacctggagcggggacctgagtcatcacagatcagaggtgcagataagtcaggcccagctggagcccagtaccctagtcccctcttgtcttcggcttcagttggatcaggggttccactgtggaaacgggttggcacaacgcggtcttagcagcaccacgtgttccttcagtgcgaacgctgacagtggcaatcagtggccattccaggaactcgttctggagccctctctgggcatgaagaacccaccccagttggaagatgatgctcttgagggatcagcttccaacactcaggggagacaggtgactggtaggatcagggcatcattggtcctgattctcaaaaccataagacgtaggttgcccttcagcaagtggaggttggctttcagattcgcaggcccacacgccgagtccgcagaaatccccaacacagcagaacgaatgcagagaatgataggctag

SEQ ID NO: 232397 - DNA, 624 bp, synthetic construct
  misc_feature 1..624: note = Description of Artificial Sequence: Synthetic coding sequence
  source 1..624: mol_type = other DNA
atgctggcgagttacaagtcttacagttctacctttcatagcctggaagaacagcaggtttgcatggcagtcgatattggcagacaccggtgggaccaggttaagaaagaagaccaggaagctacgggaccacgtctctctagagaattattagacgagaagggacccgaggtactgcaagattcgctctataggtgctactctacacccagtggctgcctggagttgacggactcctgtcagccttataggtcagccttttatgttttagaacagcagcgggtggggctggccgtggatatggatgaaattgagaagtaccaggaagtggaagaagaccagggaagatgggaagaggaccagaatccaccctgcccgagattaaatggtgttctcatggaggttgaggagccagaggtgcttcaggacagcttggacggatgctactccaccccatcaatgtatttcgagctgcccgactcttttcagcattacagaagcgtattttactcttttgaagaacagcacatcagctttgccctttacgtcgacaacaggtttttcacgctaacagttacatctcttcatctggtttttcagatggaggttatttttccccagtag

SEQ ID NO: 232398 - DNA, 1830 bp, synthetic construct
  misc_feature 1..1830: note = Description of Artificial Sequence: Synthetic coding sequence
  source 1..1830: mol_type = other DNA
cctgtgcctgggccaacctcaagtgctaccaacgtaagtatggttgtaagcgcgggacctctctccagcgaaaaagcagagatgaacatcttggaaatcaacgaaaaacttagaccacagttggctgaaaagaagcagcagttccgaaacctcaaagagaaatgctttctcacccagttgtctgggtttctggctaaccaacagaacaaatataagtacgaggaatgtaaggatctgattaaattcatgctgcgcaatgaaaggcagtttaaagaagagaagctagctgagcagctgaagcaggcagaagagctgcggcagtataaagtcttggtgcatgcccaggagcgcgaactaacccaattgagagaaaagctcagggagggccgagatgccagtcggagtctgaacgaacacttacaggctctgttgacacctgacgagcctgataagtcccaggggcaggacttgcaggaacagctggctgaggggtgtcggctcgcacagcacctggtccaaaaactgagcccggagaacgataacgacgataacgaggatgtccaagtcgaggtggcggagaaggtccagaaaagcagtgcgccacgggagatgcaaaaggcagaggagaaagaggtccccgaagattctctggaagagtgcgctatcacctactctaacagtcacgggccatatgatagtaaccagcctcatagaaagacaaaaataacttttgaggaggataaggtggactctaccctgatcggatcttcatcacatgttgaaagggaagacgcggtccacatcattccggagaatgagagcgatgatgaagaagaggaagaaaagggcccagtgtcaccacggaacctgcaagagtctgaggaggaggaagtgcctcaagagagctgggatgagggctatagcacaccatcaatcccaccagaaatgttggcatcctataagtcctactctagcaccttccacagtttggaggagcagcaagtatgcatggctgttgatatcgggaggcacagatgggatcaggtcaaaaaggaggaccaggaagccaccggaccgcgtctgtcccgcgaactcctggacgaaaagggtcccgaagtcctgcaggatagtctttacaggtgctattcaacccccagcgggtacctggagctgcccgatctgggacagccttactcatccgctgtctactctctcgaggagcagtatctcggtctcgcattggacttagacaggataaagaaggaccaagaggaggaggaagaccaggggccaccttgcccacggttgtctcgcgaacttctggaggtcgttgaaccggaagtgttgcaggatagccttgataggtgctacagtactccgagtagctgtttagagcaacctgattcatgccaaccgtatggctcctccttctatgccctggaagaaaagcacgtgggattttccttagatgtgggcgaaatcgagaagaagggaaaggggaaaaagaggagaggcagacggagcaaaaaagagcggcgtcgcggtcgaaaagagggtgaggaggatcagaaccccccatgccctcgattgaacggggtgttgatggaagtcgaagagcctgaggtcctacaggatagtctcgacggctgctattccacaccttctatgtactttgagctccccgactctttccagcactatagaagtgttttttactccttcgaagaacaacacatctcattcgctctgtatgtagacaatcgctttttcactctgacagtcaccagtctgcatctcgtgttccagatggaggtgatttttccccaatag

SEQ ID NO: 232399 - DNA, 2052 bp, synthetic construct
  misc_feature 1..2052: note = Description of Artificial Sequence: Synthetic coding sequence
  source 1..2052: mol_type = other DNA
tagccgggacctacgtcatctgccaccaatgttagcatggtggtgtccgcagggccattgagctctgaaaaggctgagatgaacattctggaaatcaacgaaaaacttcgtcctcagctcgctgagaagaaacagcagttccgtaacctgaaggagaaatgttttctgacccagttgagtggtttcctcgctaaccagcagaataaatacaaatatgaagagtgcaaggatctgattaaatttatgttaaggaatgagaggcagtttaaggaagagaagctggctgagcagctgaagcaggccgaggaacttcgccagtataaggttctcgtgcacgctcaagaaagagagttgactcaactgagggaaaaactacgtgagggtagagacgcttcccgcagcctgaatgagcatctacaggccctattaacgcccgacgagcctgataagagtcagggacaggacctccaggagcaacttgccgagggttgcagattggcccagcatttagttcagaaattgagtccagagaatgataacgacgataacgaagatgtccaggtggaggtcgcagaaaaggtgcagaaaagttctgcgcctcgagagatgcagaaagcggaagaaaaagaggtacctgaggattccctggaagagtgtgccattacctatagtaattcccatgggccatatgactctaaccaaccacacagaaagaccaagatcacgtttgaggaggataaggtcgattccaccctaatcggtagttcaagccacgtcgagcgcgaggatgctgtgcacataattcccgagaatgaaagcgatgatgaagaggaagaggaaaagggccctgtgtcccccaggaatctccaggagtccgaagaggaggaggtaccgcaagaatcttgggacgagggctatagtactcccagcatcccacccgaaatgctggcctcctataagagctactcatcaacattccattctcttgaggaacagcaggtctgcatggcggtggacattggaaggcatagatgggatcaagtgaagaaggaagaccaggaggctactggtcccagactgtcccgcgagctcctggatgagaagggacccgaagtgctgcaagacagcctgtaccgatgttatagtactccctcaggatgtctagagctgaccgattcttgccagccctacaggtcagccttctatgtcctggagcagcagcgggtgggcctagccgtcgatatggatgagatcgaaaaataccaggaagtcgaggaggaccaagatccatcttgcccgagacttagcagagagctcctggacgagaaagagccagaagtcttacaagactccctggggaggtggtactccacacctagtgggtacttggagctgcccgacctaggccagccctactcctccgccgtctacagcctcgaggaacagtatcttgggctggctttagatctggaccgtattaaaaaagatcaggaggaagaggaagatcagggcccaccatgtcctcggttgagccgggagctcctggaagtggtcgagcctgaagttctccaagatagtcttgatagatgctacagtactccgtctagctgcctggaacagccggattcttgccagccatacggttcctccttctacgccctggaggaaaaacacgtgggtttctccctggatgtgggcgagatagaaaagaaaggcaaaggaaaaaaaaggcgcggtagacggtctaaaaaagaaagacgcagaggtcggaaggagggcgaggaggaccagaatcctccatgtccaaggttgaacggtgtcctgatggaggtcgaggagcccgaagtcctgcaggattccttagacggctgctattcaaccccatccatgtatttcgagctgcctgattcctttcagcattatcggagtgtgttctattccttcgaggagcagcatatctctttcgccctctacgtggataaccgcttttttactctgacagtgacctccctgcatctggtgttccagatggaggtcattttccctcagtag

SEQ ID NO: 232400 - DNA, 1824 bp, synthetic construct
  misc_feature 1..1824: note = Description of Artificial Sequence: Synthetic coding sequence
  source 1..1824: mol_type = other DNA
cccgtgccaggccctacatctagtgccactaacgtttccatggtggttagcgccggacctctatcgagcgaaaaggcagagatgaatatacttgaaataaacgagaaactgagaccacaattagccgaaaaaaaacagcagttccggaacttgaaggaaaagtgctttctcacccagctgtccggttttttagccaaccagcagaacaaatataaatacgaggagtgtaaagaccttatcaaatttatgctccggaatgagcggcagttcaaagaggagaagcttgcagagcagctcaagcaggccgaggagctccggcaatacaaggttctggtgcacgcacaggagcgggagctgactcagttaagggaaaagctacgagagggcagagacgcatccagaagtctcaatgagcatctccaggctctcctgacacctgatgaacccgacaaaagccagggccaagacctacaggagcagcttgccgaaggttgtagacttgcccagcacctggtacagaagctttcccctgagaatgataacgatgataatgaggacgtccaggtggaagtagcagagaaggtccagaagtcctcagcgcctcgcgaaatgcagaaagctgaagagaaggaggtccctgaggactctcttgaggagtgtgccatcacttattccaatagccacgggccatatgatagtaatcagccccataggaaaaccaagatcactttcgaagaagacaaggtggactccacgctgattggttcctcatcccacgtggagcgcgaggatgccgtgcatattataccggagaatgagtccgacgacgaggaggaggaggagaagggccctgtatctccccgaaacttgcaagagtcagaggaagaggaggtcccccaagaatcttgggatgaagggtactctaccccttctatccccccagagatgctggccagctataagagttattctagcacattccatagcctggaagaacaacaggtgtgcatggccgttgacatcggaaggcacaggtgggaccaggtaaaaaaagaagatcaagaggccaccggcccacggctttcccgggagttgttagacgaaaaaggaccagaggtgctgcaggattccctatatcgctgttattcaaccccatctgggtgtctcgaactcacagacagctgtcagccctataggagtgccttctatgtgctggaacagcagcgagtcggactggcagtggatatggacgagatcgaaaaatatcaggaggtggaggaggaccaagatccaagctgcccacggctcagccgggaactgctggatgaaaaagagcccgaggtcctccaggacagtctggggcgttggtacagcacgccttccggctatctggagctccctgatctgggccagccgtattcaagtgccgtgtactcccttgaggaacagtatttaggcctggccctggatctggaccggatcaagaaagatcaagaagaagaagaggaccaggggccaccatgccccaggctgtcacgagaattgcttgaggttgtcgagcctgaggtactgcaggacagtctagatgtcatccagttactgccggtggtactaaacagcctgacaccggcatcccctatggaagtgcctttcatgcattggagaaaaaacatgctggccttcctcctgacttgggagaagcttaagaggcgtggtcgcggacggaaggagggggaggaggaccagcggagaaaggaagagggggaggagaaaaagggtaagaaaattaagactcatcatgcacctgggagtacagcctgttag

SEQ ID NO: 232401 - DNA, 396 bp, synthetic construct
  misc_feature 1..396: note = Description of Artificial Sequence: Synthetic coding sequence
  source 1..396: mol_type = other DNA
atggccgatgtggtggtgggaaaggacaaagggggagaacaacgactgatctcccttccccttagccggatccgcgttatcatgaaatcatccccagaggttagcagtatcaaccaggaggctttagtcctgaccgccaaagccactgagctgtttgtgcagtgccttgccacctacagctacagacacggtagtggcaaagagaaaaaggtcctaacttattctgatttagccaacacagcccagcagtctgagactttccagttcctggcagacatcctccccaaaaagatcctggcgagtaaatacctaaaaatgcttaaggaggaaaagcgcgaggaggacgaggaaaatgataacgacaatgaatcagaccacgatgaggctgattcttag

SEQ ID NO: 232402 - DNA, 582 bp, synthetic construct
  misc_feature 1..582: note = Description of Artificial Sequence: Synthetic coding sequence
  source 1..582: mol_type = other DNA
atgggtaaacaaaattcaaagctcagacccgaggtgatgcaggacctcttagaatctaccgatttcaccgagcacgagatccaagagtggtataagggatttctgagagattgtccgtcaggacatctgtcgatggaagagtttaaaaaaatttatggtaatttttttccctatggcgacgcttccaaattcgcagaacacgtgtttcgtacattcgatgccaacggagatggaaccattgacttcagagagtttattatcgcactctcagtcacctcacgaggtaagcttgagcagaagcttaagtgggccttctccatgtacgatctcgatggtaacggatacatttctaaagctgaaatgctcgaaatcgtgcaggcaatctacaagatggtttctagcgtaatgaaaatgcccgaagacgagtccaccccagaaaaaaggacagagaaaatcttccgacagatggacacgaacagggacggcaagttgtccctggaagagttcattcgcggagccaagtccgaccccagcatcgtaagactgctgcaatgcgatcccagcagcgcaggacagttctag

SEQ ID NO: 232403 - DNA, 582 bp, synthetic construct
  misc_feature 1..582: note = Description of Artificial Sequence: Synthetic coding sequence
  source 1..582: mol_type = other DNA
atgggcaagcagaactctaagctccgcccagaggtcatgcaagatctcttagagagtactgacttcaccgaacatgagatccaggagtggtacaaagggttcctgcgagactgtccttcaggacacctctctatggaggagtttaaaaagatttacggcaatttcttcccctatggtgatgcaagtaaattcgccgagcacgtcttcagaacttttgacgccaatggcgacggcaccatcgacttcagagagtttattattgccctgtctgttacgagccgcggaaaactagagcaaaaattaaaatgggcctttagtatgtatgatctggacggcaacggttacatatcgaaggccgagatgctcgagatcgtgcaggctatctacaagatggtatcctcagtaatgaaaatgccagaggatgagtccacaccagagaaacggacagaaaaaatattccgccagatggataccaaccgcgacgggaaactctctctggaggaatttatcagaggggcaaagagtgacccctctatcgtgaggctcttgcagtgcgatccttccagtgcaggacagttctag

SEQ ID NO: 232404 - DNA, 582 bp, synthetic construct
  misc_feature 1..582: note = Description of Artificial Sequence: Synthetic coding sequence
  source 1..582: mol_type = other DNA
atggggaagcagaactcgaagctgaggccagaggtcatgcaggacttgctcgagtccacggacttcaccgagcacgaaattcaagagtggtacaagggcttcctccgggattgtccctccggacacctgtctatggaggagtttaagaagatttacgggaacttctttccgtacggggatgcatccaaattcgcagagcacgttttcagaacgttcgacgctaatggggatgggacgatcgattttagggagttcattattgcgctatcagtcacctccagagggaagctcgagcaaaaacttaaatgggccttctcaatgtacgatttagatggaaacgggtacatcagtaaagccgagatgctggagatcgtccaggccatctacaaaatggtctcttccgtcatgaaaatgccagaggatgagagcacccccgagaaacgcacggaaaaaatttttcgccagatggacaccaaccgggatgggaagctctcgttggaggaattcattaggggcgctaagtccgatccctctattgtgagacttctgcaatgtgacccaagctcagccggtcagttctag

SEQ ID NO: 232405 - DNA, 582 bp, synthetic construct
  misc_feature 1..582: note = Description of Artificial Sequence: Synthetic coding sequence
  source 1..582: mol_type = other DNA
atgggcaaacagaacagcaaactcagacctgaagtaatgcaggacctgcttgagagtactgatttcacagagcacgagattcaggagtggtacaagggatttttacgcgattgcccctctggccacttgtcaatggaagagttcaaaaaaatctatggcaattttttcccttacggagacgcctcaaagtttgctgaacatgtgttccggacatttgatgctaatggggatggcacaatagacttcagggagtttatcatcgccctgtccgtcacgagtcggggaaagctggagcagaagctgaaatgggccttttccatgtacgatctagatggtaatggttacataagcaaagctgagatgctggagatcgtgcaggccatttataagatggtgagctcggttatgaaaatgcccgaggatgagtccacccctgaaaagcggacggagaaaatttttcgccagatggatactaaccgggacggtaagctgtccctcgaggagttcattaggggggctaaatcggacccatctattgtccgcttgcttcaatgtgacccctcaagtgcgggtcagttctag

SEQ ID NO: 232406 - DNA, 3966 bp, synthetic construct
  misc_feature 1..3966: note = Description of Artificial Sequence: Synthetic coding sequence
  source 1..3966: mol_type = other DNA
atgggtgcccctttcgtgtgggccctgggtctactgatgctgcagatgttactgtttgtagccggtgagcaaggcacacaggatatcaccgacgcttccgaacggggactccacatgcagaagttgggttccggttcggtgcaggcagctttggccgaactagtagctctcccttgtctgttcacactgcagccaagacccagtgccgcacgggatgcccctcgcatcaaatggaccaaggttcgcacggcgtcaggtcagcggcaagatttaccaatcttggttgccaaagacaatgtggtgagggtggccaagagctggcaagggcgagtgtctctgccttcctatccacgtcgtagagccaatgcaaccctgttgttggggcctctgcgggctagtgattctggcctatatagatgccaagtagtccggggtattgaagatgagcaagatctggtgccactggaggtgaccggggtcgtctttcattacaggtccgcacgagaccggtatgcacttacctttgccgaagcgcaggaagcctgccgcctaagtagcgcgattattgccgcacccagacatcttcaagccgcattcgaggatgggtttgacaactgcgacgctggatggctcagcgatcggactgttaggtaccccattacccagtccagacctgggtgctacggcgaccgatcctcactccctggagtccgatcatacggtcgccgaaatccccaggagctgtatgatgtctactgcttcgccagagagctcggtggagaggttttttatgtggggccagccaggagattgacactggccggtgcccgagcccagtgtaggaggcagggcgctgcactggcctctgtgggccaactgcacctggcctggcatgaaggtctcgaccagtgtgatccaggatggctggcagacgggagcgtgcggtatccaattcagaccccccgtcgacgctgtggaggccctgctcccggtgtgcgcacagtgtataggttcgcgaataggacgggattcccttcccctgctgagaggttcgacgcctactgctttagagctcaccacccaacatcccagcacggtgacctcgaaactccgagctctggagacgaaggcgaaatactgagcgccgaggggccacctgtgcgggagcttgagcctaccttagaggaggaggaagtggttactcctgactttcaggagcctctcgtaagctctggggaagaagagaccctgatcctggaggagaagcaagaatcgcagcagactctgtctcctactcctggagatcccatgctggctagttggcctaccggagaggtgtggctgagcactgtggccccatcccctagcgacatgggcgctggcaccgcggctagcagtcacacagaagttgcacccaccgatccaatgccaaggcgaagaggcagatttaagggtctcaacggacgatacttccagcagcaagaacccgaaccaggtctacagggaggaatggaagccagtgctcagccccctacatcagaggccgctgtgaatcaaatggagcctcccttggcaatggcagtgacagagatgctggggagcgggcagtcccgatcaccgtgggccgaccttactaacgaggtggacatgcctggggctggatctgctgggggtaagtcctctccggaaccgtggttgtggccccctactatggtgccaccctccatcagtggccattcacgggctccggttcttgagctggaaaaggccgaaggcccaagcgcccgtcctgcaaccccggatctcttctggagccctctggaagccaccgtgagcgctccctctcctgctccctgggaggcatttcctgtggctacctctccagacctccccatgatggctatgctgcgtggcccaaaggagtggatgcttccccacccaactcccatttccactgaggctaaccgcgtggaggcccacggggaggcaacggctacagctcccccatccccagccgcagaaacaaaggtgtactctctgccgctgagtttgactccgactggccagggcggagaagctatgcctactactcctgagtcaccgcgtgccgacttccgcgaaactggcgaaaccagccctgctcaggttaataaggcggagcacagttcaagtagtccctggccttccgtgaacagaaacgttgcagtgggattcgtgcctactgaaaccgccacagaacctacgggtctgaggggtataccgggttcagaatcgggagtgttcgacacagctgaatctcccacaagcggattacaagctaccgtggatgaggtgcaagacccatggccatccgtatattctaaagggttggacgcctccagtccttctgctcccctgggctccccgggagtctttttggtgcctaaagtgacgcctaacttggaaccatgggtggcaacagacgagggccctactgttaaccccatggactcaacagtcacgcccgcaccatccgatgcctctgggatatgggagcccggatctcaagtgttcgaggaagccgagagcacgacattgtctccacaggtcgcacttgatacgtctatcgttaccccactcactaccttggaacagggggataaagttggcgtgcccgcaatgtcaaccctcggtagcagcagctcccagcctcatcctgaacccgaagaccaggtagagacacaggggacttcaggcgctagtgtgcccccacaccaatccagtcccctaggcaaacccgctgttcctccaggtactcccacagctgccagcgtcggggagtcagccagtgtgagttccggcgaacccacagtgccctgggatccctcctcaacactactgcctgtgacgctggggatcgaggatttcgagctcgaggtgctggctggctctcctggggtcgagtcattctgggaggaggttgccagtggcgaggagcccgcactgccaggcactcctatgaatgccggagcagaggaggtacactccgatccttgtgagaataacccttgcctacacggtgggacatgcaatgccaatggcactatgtacgggtgcagctgcgaccaggggttcgccggtgagaactgtgagattgatatcgacgactgtctgtgttcaccctgcgaaaacgggggtacctgcatcgatgaggtcaacggattcgtgtgcctgtgtctcccatcatacgggggatctttttgcgagaaggatactgagggctgtgatagaggatggcataagtttcaggggcattgttaccggtatttcgcccatcggagggcatgggaagatgctgagaaggactgcagacgacggagcggccatctgacatccgtgcacagtccagaagagcattcatttattaacagcttcggccatgaaaacacatggattggccttaatgacagaatcgtggagcgggattttcagtggactgacaatacaggcttgcagtttgaaaattggcgtgaaaaccaaccagataatttcttcgccggaggcgaggactgcgtcgtgatggtcgcccacgagtccggtaggtggaacgatgttccttgcaattacaaccttccttacgtttgtaagaaaggcactgtgctctgcggccctccccctgccgttgagaacgccagcctcataggtgccaggaaggctaagtacaatgtgcacgcgaccgtgcgctaccagtgtaacgaagggttcgcacaacaccatgtcgctacaattcggtgtagatctaacggcaaatgggatagaccgcaaatcgtgtgcacaaaacccagacgatcacaccgaatgaggaggcatcaccatcaccatcagcatcaccatcaacatcaccatcataaatcgcgcaaggagagacgcaagcacaaaaaacacccgacggaggactgggaaaaggatgagggcaacttctgttag

SEQ ID NO: 232407 - DNA, 2319 bp, synthetic construct
  misc_feature 1..2319: note = Description of Artificial Sequence: Synthetic coding sequence
  source 1..2319: mol_type = other DNA
atgcctggcgcagggtcagccggaggaaaatcttctcccgaaccatggctgtggcctcccactatggtgcctccatctatcagtggtcactcacgagccccagtattggagctagagaaagcagaagggcctagcgcccgtcccgctacccctgacctgttctggtcccccctggaggctacggtttcagccccttctcccgctccttgggaggctttcccagtcgccacctcaccagaccttccgatgatggccatgttgcgtggtcccaaagagtggatgttacctcaccctaccccgattagcaccgaggctaatcgcgttgaagcgcatggagaagcaacagctacagcccctccatctcccgcagcggagacaaaggtgtacagtttgccactttcccttacacctacaggacagggaggagaagccatgccgacgaccccagagagtcctcgggctgacttccgagaaacaggcgagacatcccctgcccaggtcaacaaagccgaacactcctccagtagcccttggccttctgtgaaccggaatgttgccgttggatttgtgcctactgagacggctacagaacccaccgggctgcgcggaataccgggttccgagagcggagtgtttgacacagccgagtcacccactagtggcctgcaagcgaccgtagacgaggtgcaggacccatggccgtctgtttactctaaggggctcgacgccagctcaccctcagccccactgggatcgccaggcgttttccttgtaccgaaagtcacacctaacctggaaccctgggtcgctaccgacgagggccctacagtcaatcctatggattctaccgttactcccgcaccatcagacgcatcaggcatatgggagccaggaagccaggtgttcgaggaagccgaatctaccactttgagcccacaggttgcactggataccagcatcgtgactccactcactaccttggagcagggtgataaggtgggagtgccggctatgtccactctcggaagcagcagcagccagccacaccccgagcccgaagatcaagtcgagacacagggcacctccggcgcttcagtgcctccccaccagtccagccctctcgggaaacctgcagtccccccaggaacacccacggccgctagtgtaggggagtccgccagcgtgtcctctggggagcctacagtgccctgggatcccagtagtactcttctacctgtgacgctgggaattgaagactttgagctcgaggtacttgctgggagtcccggtgtggaatcattctgggaagaggtggcctctggggaagaacctgcactgccgggtacacctatgaacgctggggctgaggaggttcactcagatccatgtgagaacaacccttgcctgcacgggggaacctgcaatgcaaacggaaccatgtacggctgctcctgcgaccagggctttgctggtgagaattgcgagatagatatcgacgattgtctgtgtagtccctgcgaaaacgggggaacctgtattgacgaagtgaacggattcgtctgtctgtgcctgccttcctatggcggatccttttgtgaaaaagataccgagggctgcgatcggggttggcataagttccagggccattgctatcggtacttcgctcacagaagggcatgggaggacgcggagaaggattgtcggcgacgaagcggccacttgactagcgtgcatagcccagaggagcactcctttatcaatagctttggccatgagaacacgtggatcggtctcaacgatcgcatcgtcgagagagatttccaatggaccgataacacgggcctccagttcgaaaattggcgggagaatcagccggacaatttcttcgcgggaggagaggactgtgtcgtaatggtggcacatgaatcagggaggtggaatgatgttccctgcaattacaacctcccctatgtgtgcaagaagggaactgtgctatgcggccctcctcctgctgttgaaaatgcttctctgattggagcacgcaaagcgaagtataatgttcatgctactgttcggtatcagtgcaacgaaggcttcgcccagcatcatgttgctacaattagatgccgctccaatggaaaatgggatcgccctcaaattgtatgcactaaacctcgacgaagtcataggatgcgacgccatcaccaccatcatcagcaccaccaccagcaccaccaccataaatcccgcaaggagcgtcgcaagcacaagaagcacccgacagaagactgggagaaagacgagggcaatttctgctag

SEQ ID NO: 232408 - DNA, 4008 bp, synthetic construct
  misc_feature 1..4008: note = Description of Artificial Sequence: Synthetic coding sequence
  source 1..4008: mol_type = other DNA
aggcctccgagggacgcttcagaactgggagctagaagccggatgggcgctcctttcgtatgggcattgggcctattgatgttgcagatgctcttgttcgtggcaggagagcaggggacacaggatattactgatgcctcagagcgaggcttacatatgcagaaacttggcagcggatcagtacaagcggcactggcggaactggtggcgcttccctgccttttcactttgcagccacgacccagtgctgccagagacgcacccaggataaagtggaccaaggtgcggactgccagcggtcagaggcaggatctgcccatccttgtagcaaaggataacgtcgtcagagttgcaaagtcatggcagggaagggtcagtttaccctcctatccgaggcgcagagcaaatgccacacttctgctagggccactcagagcatccgactctggactatacaggtgccaggttgtgagggggatcgaagatgaacaagacctcgtccccctcgaagtcaccggggtggtgttccactatcggtctgcacgagatagatatgccctgacgttcgctgaagcacaggaggcctgccgcctgtcgagtgccatcatcgctgccccaaggcaccttcaggcggcatttgaggatggattcgataactgtgacgcagggtggctctcagacaggacggtcagatatcctatcacccagtccagaccgggatgttacggtgacaggagtagccttcctggggtaaggagctacggaaggagaaacccgcaagaactgtatgacgtgtactgcttcgctagggagctggggggagaagtcttctatgtaggcccagccaggcgcctgacactggctggtgcacgcgctcagtgcaggcgccagggagccgctctcgcttcagtgggacagctgcatctggcttggcacgagggcttggatcagtgcgacccgggatggttagcagacgggtcagtgcggtatcctatccagactccccgtagacgctgcggcggacctgcgccaggcgtacggacggtctatcgatttgccaacaggactggattcccaagcccggcagagcgttttgatgcttattgctttagagcccatcatcctaccagccagcacggggatcttgagacaccaagcagtggagacgaaggagagattttgtctgccgaaggaccacccgtacgcgagctggagcctaccctggaggaggaggaagtagtgacccccgatttccaagaacccctcgtaagcagcggggaggaggagaccctgatactggaggaaaaacaggaatctcaacagactctatctcccactcccggagaccccatgctggctagctggccaacaggggaggtctggctgtccacggtcgctccctcaccttctgacatgggagcgggaaccgcggctagcagtcataccgaggtggctcccacggacccaatgcctcgtaggcggggaagatttaagggattgaatgggagatacttccaacagcaggagcccgaaccgggattgcaggggggaatggaagcctccgcacagccacccacaagcgaggccgctgtgaatcagatggagcctccactggccatggctgtgactgagatgctcggttccggccaatccaggagcccttgggccgacctcactaatgaagtggacatgccaggagccggttccgccggagggaagtcttcacccgagccgtggctctggccccctaccatggttcccccttccatctctgggcactcccgagccccagtgctcgagcttgaaaaagcagaggggccttctgccagacccgcaactcccgacctgttttggtcacctcttgaagccactgtttctgccccaagtcctgccccttgggaagcgttcccagtggctacaagccccgatcttccaatgatggcaatgttgcgtgggcctaaggagtggatgttaccgcatcctacccccatttctactgaagcaaaccgtgtagaagctcacggggaggctactgcaacagctccaccctccccagccgctgagacaaaggtgtacagtcttcctctgtctctaacacccaccgggcaaggcggagaggcaatgcctactacaccggaatcaccccgtgccgatttccgtgagaccggagaaacttcccctgctcaggtgaacaaggccgaacacagtagctcttccccctggccatctgtcaacaggaacgttgcagtcggtttcgttcctactgaaacagctacagagccaaccgggctgcggggaattccaggatctgagagcggggtgttcgacactgccgagagccctacctcgggtctgcaggcgacagttgacgaggtgcaggatccctggccttctgtgtacagcaagggtctcgacgcctcaagtccttctgcgcctttgggtagtccaggcgtgtttttagtcccaaaagtcacccccaatctcgaaccgtgggtggctaccgacgagggacctactgtgaatccaatggactccacagtgacaccagcgccttctgatgcctcgggaatttgggaaccaggaagtcaggtgttcgaggaggccgagtcgacaacccttagtcctcaggtggcactggacacatcgatcgtcacccccctgactacactggagcagggggataaggtgggggtgccagcaatgagcacacttggatcgtccagctctcagccccaccccgagccagaggatcaggtggagacgcagggaacaagtggtgcatccgtgccccctcatcagagctcccccttaggtaagcctgccgtgcctccaggaacccctacggcagcaagtgtaggcgagtctgctagtgtgtccagcggggagccgacagtgccctgggatccttcctctacacttttgccagtcacccttggcattgaggactttgagttagaggtgcttgccggaagtccaggtgtcgaatctttttgggaagaggtcgcttctggcgaagaacccgcactgccagggacccctatgaacgccggagcagaggaggtccatagcgatccatgtgagaataatccgtgtctccacggtggaacttgtaacgccaacggaaccatgtatgggtgctcatgcgaccaaggttttgctggagaaaactgcgagatcgatattgacgactgcctgtgctccccctgcgagaacggcggaacatgtatcgacgaggtgaacggtttcgtatgcctctgcttgcccagctacggcggttccttttgtgaaaaagacactgaagggtgtgaccgcggatggcataagtttcaaggccactgttatcggtatttcgctcaccgtcgcgcatgggaggacgctgagaaagattgccgcaggagatctggccaccttacgtccgtccatagcccggaggaacacagctttattaactcgttcgggcacgagaatacatggataggactgaatgaccgcatcgtagagcgtgacttccagtggacagacaatacaggcctgcagtttgagaattggcgggaaaaccagccagataacttcttcgccggaggcgaggattgtgtggtgatggtggcacacgaatctggccgatggaatgacgtcccatgtaattacaacctgccatatgtgtgcaaaaaaggaaccgtgctgtgtggaccaccccctgcagtggagaatgcgtcactgatcggagccagaaaagccaagtacaatgttcatgccacagtgcgctaccagtgtaacgaggggttcgctcagcaccacgttgccacgatacgctgtcgcagcaatggtaaatgggaccgacctcaaatcgtgtgtaccaagccacggaggagccaccggatgcgcaggcaccaccaccaccaccaacaccaccaccagcatcaccatcataagtctcgaaaggaacgtcgaaaacataaaaagcaccccaccgaggactgggagaaggatgagggaaatttctgttag

SEQ ID NO: 232409 - DNA, 2190 bp, synthetic construct
  misc_feature 1..2190: note = Description of Artificial Sequence: Synthetic coding sequence
  source 1..2190: mol_type = other DNA
atgtcctgctgcgacttggctgccgcaggtcaactggggaaggcgagcattatggcttcagactgtgaacctgcattgaaccaagctgagggccgaaatcccactttggaaagatatcttggcgctctgcgcgaggccaaaaacgattcggaacagtttgcggcactgctgctcgtaactaaggctgtgaaagccggagacatcgacgcaaaaacacggagacggattttcgacgcggtgggcttcacgtttccaaataggctgctcactacgaaagaggcgcctgacggatgcccggaccacgtcctgagggctctgggggttgcactgctggcttgcttttgctctgaccctgagcttgccgcacatccccaggtgctgaacaagattcctatcctgtcaacattccttaccgcaagaggagacccggacgacgcggctagacgcagtatgatagacgatacctaccagtgtttgacagcagttgccggaacaccgagaggtccccgacacctcattgccggaggcaccgtgagtgctctgtgccaggcatatctcgggcacggatatgggtttgaccaggccctggctctgctcgtcggcctcttggcagccgctgagacccaatgttggaaagaggctgaaccagacttgctggccgtcctccgcggactgtctgaggatttccagaaagcggaagacgcctccaagttcgaactctgccagctgttgccactcttcctcccacctacaactgttcctccagagtgctatcgcgacttacaagccggtttggcaaggatcctgggatctaaactctcaagttggcagaggaatcctgccctgaaactggctgccaggctcgcccatgcctgtggctcagactggattcctgctgggagctctggctctaaatttttggctctcctagtgaacctggcgtgcgttgaagtgcggctagctttggaggaaaccggaactgaggtgaaagaagacgttgtgaccgcatgttatgcactgatggaactcggcattcaggagtgtacccgatgtgagcagagcctgcttaaggagccacagaaggtgcagctcgttagcgttatgaaggaagcaatcggagcagtgatccactacctgctgcaggtgggtagcgagaagcagaaagaaccattcgtgttcgcctctgtgaggatactgggagcgtggctcgctgaggagacatcttctttacgcaaggaggtgtgtcagttgctgccatttcttgtgaggtacgccaaaaccctgtatgaggaggcagaggaagctaatgatctgagccaacaggtcgcaaaccttgccatctcgccaaccacccctggtcccacctggccgggtgacgccctgcggctcctgcttccgggttggtgtcatctgactgtggaagacggaccgagagagatccttatcaaggagggcgctccaagcctgctgtgcaaatactttttgcagcagtgggagttgactagtcccggacatgatacatccgtcttgcctgactccgtggagataggactgcagacttgttgtcacattttcctgaatctggtcgtgactgctcctgggctgattaaacgagatgcttgcttcacctccctgatgaacactcttatgacatctctgccagcacttgtccagcagcaagggaggctgttgctagctgctaacgttgctaccttggggcttctgatggcgaggctcctaagcacatctccagcactacaaggcacccctgcttcccgaggattctttgccgctgccatccttttcctgagtcagagtcacgtggcccgagccacaccaggtagtgaccaggctgttctggcgctgagccccgaatatgagggcatctgggctgatctgcaggaattatggtttctgggaatgcaggctttcacaggttgcgtacccttgctgccatggttggctcccgctgccctaaggagtcgatggccacaggagctgctccagctgctgggaagtgtaagccccaactctgttaaacccgagatggtagccgcttaccagggagtattggtcgagcttgcgagagccaaccgattgtgcagagaagctatgcgccttcaggcgggtgaggagaccgccagccactataggatggccgcattagaacagtgtctgtccgagccatag

SEQ ID NO: 232410 - DNA, 2190 bp, synthetic construct
  misc_feature 1..2190: note = Description of Artificial Sequence: Synthetic coding sequence
  source 1..2190: mol_type = other DNA
atgtcctgttgtgatctcgctgcagccggtcaactaggcaaggcctccattatggcctccgattgcgagccagcccttaatcaggccgaaggccgtaacccaactctagagcgatacttgggggcactaagggaagccaaaaacgattcagagcagttcgcggctctgctcctggtgaccaaagctgttaaagccggagacatagatgcaaaaacaaggaggcggatatttgacgcagtgggctttacattccccaacagactgttaacaactaaagaggctccagatggctgtcccgaccacgttctgcgcgcactgggtgttgccctgctcgcctgcttctgctccgatcctgagctggctgcgcacccacaggtgcttaataagatacctatcttgtccacatttcttacagcccgaggagatcctgatgatgccgcaagaagaagcatgattgatgatacctatcaatgtctcacagccgtcgcaggcacccctaggggcccacgccaccttattgccggaggtaccgtgtcggctctgtgtcaggcgtacctgggtcatggttacgggttcgatcaggccctagccctgctggtggggctgctcgcagccgctgagacacagtgctggaaagaagcggaacctgatcttctcgctgtattgcgagggctgtcagaagattttcagaaggcagaagacgcaagcaagtttgaactttgccagctgctacctctgttcttgcctccaaccactgtcccacccgaatgttaccgcgacctacaagctgggctcgccaggatcttaggcagtaaactgtcatcctggcagcggaacccggctttgaaacttgccgcaagactcgcccacgcgtgcggcagcgactggattcctgccggttctagcggtagtaagttcctggcattgctcgtgaacctcgcctgtgttgaggtgcggctcgcgctggaagagaccggcacggaggtgaaggaagacgtggttaccgcctgttatgctctgatggagctgggaattcaggagtgcacgcgctgtgagcagtctctccttaaggagccacaaaaagtgcagctcgtctctgtgatgaaggaagctattggtgccgtcatccactatctgcttcaagtgggctctgaaaagcaaaaagagcccttcgtgttcgcgtccgtgcggatactcggagcatggcttgccgaggaaaccagctccttgcggaaagaagtatgccagctcttgcctttcttggttcgctacgccaaaacactctacgaggaggcagaggaggccaatgatttgtcccagcaggtcgccaatcttgctattagccccaccacacccggaccaacttggccaggtgatgcactgcgactcctcctcccagggtggtgtcacctcacggtcgaagacggacctagagaaattctgatcaaagaaggggctccaagcttactttgcaagtatttcttacagcagtgggagctaaccagccccggtcacgatacctccgttctgcccgattccgttgaaataggcctccagacgtgttgccatatctttcttaacctggtggttacagcacctggtctgattaagcgagacgcttgcttcacttcactgatgaacacactgatgacaagtctgcccgcattagtgcaacagcagggtagattgctgcttgctgcaaatgtggccacattaggactgctcatggcacgtctgctatccacttctccagctctccagggcaccccggcaagccggggattctttgccgctgctatcttatttctgagccagagtcacgtagccagagctactcctgggtcggaccaggcggtgctagctcttagtccagagtacgaaggaatatgggcggacttacaggaactgtggtttttaggcatgcaagctttcactgggtgcgtgccgctacttccttggctcgctccagctgcgctgaggtcaaggtggccacaggagctcctgcagcttttgggatccgtgtcaccgaacagcgtcaagccagagatggtggccgcttaccaaggcgtgctggtggaactggcccgagcaaaccgactgtgtcgcgaggcaatgagactgcaggccggtgaggaaactgcttcccactataggatggctgcattggaacaatgtctgtccgaaccctag

SEQ ID NO: 232411 - DNA, 2139 bp, synthetic construct
  misc_feature 1..2139: note = Description of Artificial Sequence: Synthetic coding sequence
  source 1..2139: mol_type = other DNA
atggcctctgactgtgagcccgcattgaatcaagccgagggacggaatcctaccctggaacggtacctcggggctctccgtgaggctaagaacgactccgagcagttcgccgcattactgctagtcactaaggccgttaaagcaggcgacatcgacgcaaagacgagacggaggatctttgatgccgtaggtttcacattccccaatagactgctgaccactaaagaggccccagacgggtgtcccgaccatgtgctgcgagccctgggtgtggcgttgctggcatgcttttgctctgatccagaactagccgcacatccgcaagtgttgaacaagatccctatcctatcaacattcttaacagcccgaggagacccggacgacgctgccaggagaagcatgattgatgatacataccagtgccttacagccgtggcaggcacccctcgcggacccagacacctcatagccggagggacggtgagcgcgttgtgccaagcttatttgggccatgggtatggatttgatcaggctctggcacttcttgtgggactactcgccgcagctgaaactcaatgctggaaggaggccgagccagacctgctggccgtcctgaggggcctgtcagaggattttcagaaggccgaggatgcctctaagtttgagttgtgtcagttgctgcctctatttctgcctccaacgacagtgcctccagagtgctatagagatctgcaggccggtctggcacgtattctgggtagtaagctgtcaagctggcaacgcaaccctgctctgaagctcgcggctcggcttgcccatgcttgtggatcagattggatccccgcagggtcttctggaagtaagtttctggcattgctggttaacctggcctgcgttgaggtccggctcgccctggaagaaaccggcacagaagttaaggaggatgttgtcacagcatgttatgccctgatggagctcggaatacaggagtgcactagatgtgaacagtccctgctcaaagagcctcagaaagtgcagctggtgtccgtgatgaaggaggccatcggtgccgtgatccactatctgctgcaggtcggctctgagaaacaaaaggagccctttgtgttcgcatcggtcagaatcctgggtgcttggttggcagaagagacgtcttccctgagaaaggaggtgtgtcagctcctgccctttctggtccggtatgctaaaacattgtacgaggaggcagaagaggccaacgatctgtcccagcaggttgccaatctggctattagtcccactaccccaggccctacttggcctggggacgctctccgattacttttgcccggatggtgccacctcacggtggaggatgggcctagggagattctcataaaagaaggtgctcccagtctgctgtgcaaatacttcttgcagcagtgggagctcaccagtccgggacacgacaccagcgtgctcccagactcagtggaaattggcttgcagacatgttgccacatctttctcaatttagttgttaccgcccctggacttataaagcgcgatgcatgcttcacgagtctgatgaataccctcatgaccagcctgcccgcactcgtgcagcagcaaggaaggctccttttggctgcaaacgtcgctacattgggcctgctcatggcaaggctcttaagcacaagcccagccttgcagggcacacccgcatcacggggattttttgcggctgcaatactctttctgagtcagtcccatgtggctcgggctaccccaggtagcgatcaggcagtactggccctgtcgccagaatatgaagggatctgggccgacctgcaggagctgtggtttcttggcatgcaagcctttactggatgtgtcccactgctcccttggcttgcccctgccgctctacgcagtcgatggcctcaagaactgctgcagctgctggggtcagtttcacccaattctgtgaaacctgagatggtcgccgcataccagggcgtgttggtggagctggccagggcaaaccgtctgtgcagagaggctatgcgtcttcaggccggagaggaaaccgcttcccactacagaatggcagcactggagcagtgtctgtctgaaccatag

SEQ ID NO: 232412 - DNA, 531 bp, synthetic construct
  misc_feature 1..531: note = Description of Artificial Sequence: Synthetic coding sequence
  source 1..531: mol_type = other DNA
atgccacacagctttcgatacttagcagctctgcaaggcacaccagcctctagagggttctttgcagctgcgatcctgtttctctcccagtcccacgtagccagagccactcccggtagtgaccaagctgtgctcgcccttagtccagagtatgaggggatttgggctgacctgcaggaactgtggttcctagggatgcaggctttcactggatgtgtccccctgctgccatggcttgccccagctgcactgcgctcacgttggccacaggagctcttgcagctcttaggaagccagccgcagctgtgccaagccagagatggaggcaggctttccgggtgtccaggcggagccggagccggacagcccgcagtgccaggtggtcatgaggctgcaggagggaggggagatggccagccactgccacatggatgcctgggcgctgtcccagtgcgagcactcaggggcgttcatagagggcagacccagggacgtgccgagcgggagggcggacgccgacacttgccttag

SEQ ID NO: 232413 - DNA, 582 bp, synthetic construct
  misc_feature 1..582: note = Description of Artificial Sequence: Synthetic coding sequence
  source 1..582: mol_type = other DNA
tgaagcagtctcaggaaagaggtttgtcaattgctcccattcttggtgagatacgctaagaccctctatgaagaagctgaagaggccaacgacctctctcaacaggttgccaacctcgcaatttctcctaccacacccggtccaacctggcccggagatgcactgcgcctcctgctcccaggctggtgccatctgaccgtcgaggacgggccacgtgagatccttattaaagagggtgccccatcccttctctgcaagtattttctgcagcagtgggagcttaccagcccaggccatgatacctctgttctgcctgacagcgtggagatcggcctccagacttgttgccacatcttcttgaatcttgtggtaacagctcctggtctgattaaaagggatgcgtgttttacaagtttaatgaacactctgatgactagcctgcctgcattggtacagcagcaagggagactgctgcttgccgctaacgtcgccacactgggacttttgatggcccgtctactctcgacatcacctggttcaattagctctcagttgcccggagcagagcatatgccatgctag

SEQ ID NO: 232414 - DNA, 735 bp, synthetic construct
  misc_feature 1..735: note = Description of Artificial Sequence: Synthetic coding sequence
  source 1..735: mol_type = other DNA
atggccagcgattgcgaaccagcgctcaatcaggcggagggaagaaatcccacgcttgaaagatacctgggggctttaagagaagccaaaaatgattccgaacagttcgctgcattgctgctggtaacaaaagctgtcaaagcgggtgacatcgacgcgaagacaagaaggaggatcttcgacgccgtcggttttacctttccaaaccgtctgctgacgaccaaagaggcacccgatggatgtcccgaccacgtactgcgggcactgggcgtggctcttctggcgtgtttctgttctgacccggagttagcagcccaccctcaggttctcaacaaaattcccatactaagcactttccttacagccaggggggatcccgacgacgccgctcgtcgtagcatgattgatgatacataccaatgtctgactgccgtcgctggcactcccagaggccctaggcatcttattgcgggaggcacagtgtcagctctgtgccaagcgtacctcggccatggttacggatttgatcaggctcttgcgttgctcgtgggtctgctggcggcagccgagacgcagtgctggaaggaagctgaaccggaccttctggccgtgctgcgaggtctgtctgaggatttccagaaggcagaggatgcaagtaagtttgaactttgtcagctgctccctttatttttgcctcccactaccgtgcctcctgagtgctaccgggatctgtag

SEQ ID NO: 232415 - DNA, 1791 bp, synthetic construct
  misc_feature 1..1791: note = Description of Artificial Sequence: Synthetic coding sequence
  source 1..1791: mol_type = other DNA
atggagccagagttggccgcacaaaagcaacccaggccccgtcggaggtctcgcagggccagcgggcttagcaccgagggagccactggccctagcgccgacacatctggcagtgaattggatggtagatgcagtcttcgtcggggatcctcttttacctttctgacgcctgggcctaactgggacttcacactaaaacggaaacggcgagaaaaggatgatgacgtggtgtccctgtcttctctagatctgaaagagccttccaataagcgcgtgaggccactggccagggttacctccttggcaaacctcatttcacctgtgaggaacggggcagtccgcaggttcggccagaccattcagtcattcactcttcggggtgaccataggagccccgcaagtgcacaaaaatttagcagtcgcagcactgttcccacccccgcaaagaggaggtcaagcgccctctggagcgagatgctcgacataaccatgaaagaatccctgacaacacgggagattcgacgtcaggaggctatctacgagatgtcgaggggagagcaagatcttatagaagatttgaaactggcccgaaaggcctaccatgatcccatgctgaagctgagtatcatgagtgaagaggagcttacgcatatttttggcgatctcgactcctatatccccttgcacgaggacctcctgacgcggataggagaagccaccaaacctgacgggacagtcgaacagataggccatattctcgtctcctggcttcctcgattgaatgcctaccgtggctattgtagcaaccagctggccgcaaaagccctcctagaccagaagaaacaggacccaagagtccaggacttcctccagcgttgtctggagtcgcccttcagcaggaaactcgacctgtggagcttcctagacatccccagaagccgactggtcaaatacccactgttgctgaaagagatcctgaaacatacacccaaagagcatcctgacgtccagctgctggaggatgcaatattgataattcaaggggtgctatcagatatcaatctgaagaaaggagagagcgagtgtcagtattacatagacaagctcgagtacctggatgaaaagcagagggaccctagaatcgaggccagcaaggtgctgctctgccacggcgaactgaggtcgaaaagcggccataaactgtacatttttctgttccaagatatcctggtgttaactagacccgtgacccggaatgagagacacagttatcaggtttaccggcagcccatcccagtacaggagttagtgctggaggatttacaagatggtgatgttcgcatgggtggaagcttccggggtgccttcagcaattcagagaaagctaaaaatattttcaggattcgcttccacgacccctcaccggcacagtcacacaccctgcaggctaatgatgtttttcacaaacagcagtggtttaattgtatcagagcagctattgcacccttccagtcggccggatctcccccagagctccagggcctccccgagctgcacgaagaatgtgagggtaatcacccctcagccagaaagctgactgcgcagaggagggctagtacggtcagttccgtaacgcaggtggaggtcgacgaaaatgcttaccggtgcgggtctggaatgcaaatggccgaggattctaagtccttaaaaacacatcagacccagcctgggattcgccgagccagggacaaagcactgtctggaggcaaacgcaaggagaccctggtgtag

SEQ ID NO: 232416 - DNA, 483 bp, synthetic construct
  misc_feature 1..483: note = Description of Artificial Sequence: Synthetic coding sequence
  source 1..483: mol_type = other DNA
atggttgctcacgacgagacaggaggcttactgccaatcaaaagaacaatccgcgtgctagacgtcaacaaccaaagtttcagagaacaagaggaattaacccacatcttcggagatttggatagttatatccctctgcacgaggatctgctcacccgaatcggtgaagcaaccaagcccgacggaactgtggaacagatcgggcacattcttgtgagctggctgccccgactgaacgcctaccggggatattgctctaaccagctggctgccaaagctctcctagaccaaaaaaaacaagaccctagggtgcaggactttctccaaaggtgtctcgaatcccctttcagccggaagttagacctgtggagcttcctggatatccctaggtcccggctcgtgaaatatcctctgctgctgaaagaaattcttaagcacaccccaaaagagcatcccgacgtgcagttgcttgaagacgcctag

SEQ ID NO: 232417 - DNA, 1629 bp, synthetic construct
  misc_feature 1..1629: note = Description of Artificial Sequence: Synthetic coding sequence
  source 1..1629: mol_type = other DNA
atggtggcgcacgacgagactggaggcctgctccctataaagaggaccattcgcgtacttgatgttaacaaccagtcattccgggagcaagaagagccctcaaataagcgggtgagacctctggccagagttacctcactggccaatctgattagtcctgtccggaacggcgcagtgagaaggttcggccagaccatccagtcgttcacactccgcggagaccaccgtagcccagcctcggcccagaagttttcttctcggagcacggtaccaacccccgctaaacgcagatcctccgccctgtggagcgaaatgctggacattactatgaaggagtctctgacaacacgagaaatccgacgacaagaggcgatctatgagatgagcaggggggagcaggatctgatcgaagacctgaagctcgccagaaaggcataccacgaccctatgctgaaactttctatcatgtcagaggaggaactgacgcatattttcggcgacctagattcttacatcccactacacgaggacctgttgactcgcatcggtgaggctaccaagccagatggcactgtcgagcagatagggcatatattggtatcatggctgccccgactcaatgcgtatcgcggatattgttccaatcaactggcagccaaagccctgttagaccagaaaaagcaggatccgagagtacaggacttcctacagagatgcctcgaaagcccattctccagaaagcttgatctgtggtctttccttgatattcctcgatccagattggtgaaataccctttgctcctgaaggaaatcctgaaacacactccaaaagaacatccggatgtccagctgctcgaggacgccattctgattatacaaggtgtgctttctgacattaatctcaaaaaaggcgagagcgagtgtcagtactacatagataagctagagtatctggatgaaaaacaacgcgaccccagaattgaagccagcaaggtattgctgtgccacggggaattgcggtctaagtctggccacaagttgtatatttttctttttcaagatattcttgtgctcacacgtccagttacaagaaatgagaggcattcttaccaggtgtacaggcaaccaatccctgttcaggagctggtacttgaagatctgcaagacggggacgtgaggatgggcggaagtttccggggagcctttagtaatagcgagaaagctaagaacatcttccggataaggttccatgatccctccccagcgcagtcccatactctccaggcaaacgatgtctttcataagcaacaatggtttaattgtatcagggcggcaattgccccatttcagtccgcgggatctcctcccgagctccagggcttacccgagctgcatgaagagtgcgaaggaaaccacccttcagcaaggaagttaacagcccaaagacgagcctccacagtatctagtgtaacacaggttgaggtggatgagaacgcgtatagatgcggatccggaatgcagatggctgaggactccaagtcactgaagacacaccaaacccaaccaggtatcagaagagctagagataaagccttgtccggaggcaaacgaaaagaaacattggtttag

SEQ ID NO: 232418 - DNA, 483 bp, synthetic construct
  misc_feature 1..483: note = Description of Artificial Sequence: Synthetic coding sequence
  source 1..483: mol_type = other DNA
atggtcgcacatgacgagacaggtggactgctccccataaaaaggactatccgggttctagatgttaataatcagtccttcagagagcaggaagaattgacacacatcttcggcgacctcgactcctacatccccctccatgaggacctcctgacaaggatcggagaagcaacaaagcccgacgggacagtggagcagatcggccatatcctcgtgtcttggctaccaagactaaatgcctacaggggatactgcagcaaccagctggcagcaaaggcgcttctggatcagaaaaagcaagacccgcgagtacaagactttttacagaggtgtctggagtcgccattcagtcgaaagctggacctgtggtccttcctcgatataccacgtagccggctggttaaataccccctgctccttaaggagatcttgaagcacacccctaaggagcatccagacgtgcaactgctcgaggatgcatag

SEQ ID NO: 232419 - DNA, 1248 bp, synthetic construct
  misc_feature 1..1248: note = Description of Artificial Sequence: Synthetic coding sequence
  source 1..1248: mol_type = other DNA
atgtcccggggagaacaggacctgattgaggatctgaagctagccaggaaggcctatcatgacccgatgctgaagctgagtataatgtctgaagaggagttaacacacatcttcggcgatctggattcttacatacctctccatgaggacctgctgacaagaatcggtgaggcgacgaaacctgatggtaccgttgaacaaatcggccatatattggtgtcttggcttcctagattgaacgcctaccgcggttattgcagtaatcagctggccgctaaagccctcctcgaccaaaagaagcaggatccaagagttcaggattttctacaacggtgtctggaatcaccttttagtcgtaagctagacctgtggtctttcctggatatacccagatcccgactcgtgaagtaccccctcttgctgaaggagatcctgaaacatacacctaaggaacaccccgatgtgcagttgctcgaggatgctattctcattatccaaggggtgctgtccgatatcaacctcaagaaaggtgagtccgagtgtcagtattacatcgacaaactggaatatctcgacgaaaaacagcgtgacccccgaatcgaggctagtaaggtcctgttgtgtcatggtgagctccgctccaaaagtggtcacaagctgtatatttttctcttccaggatatactcgtcctcaccaggccagtgacccgaaatgagcgccactcctaccaggtctatcgccagcctataccagtacaggaactcgtcctggaggacctccaggacggtgacgtaaggatggggggatctttcagaggcgcattctccaattcggaaaaggctaagaatattttcagaattcgatttcatgatccctcaccagcccaatctcataccctgcaggccaatgacgttttccataagcagcagtggttcaattgtatcagagccgcaattgctccattccagtcagctgggagcccccctgaactacaagggctccctgaacttcacgaggaatgcgaaggaaaccacccctctgcgcgtaaactgaccgcacagcgtcgggcttccactgtaagctccgtgacacaggtggaagtggatgaaaatgcctatcggtgtggctccgggatgcagatggcggaggactctaagtcactcaagacccatcaaactcagccaggtattaggagggcgagagacaaggcgctgagtggcggtaagcgcaaggagaccctggtttag

SEQ ID NO: 232420 - DNA, 3063 bp, synthetic construct
  misc_feature 1..3063: note = Description of Artificial Sequence: Synthetic coding sequence
  source 1..3063: mol_type = other DNA
atgatgtccttcggcggagccgatgctctgctcggagccccattcgcccctctgcatggagggggaagcctgcactacgcgttggcccgaaagggcggagcaggtgggaccagatctgctgcaggctccagctcaggcttccacagttggaccaggaccagcgtgtcctccgtctccgcttctccatctcgatttaggggagctggagcagcatcatccaccgacagtctcgacaccttgtccaacggacccgagggatgtatggttgccgtggccacgtctcgttcagagaaagagcagctacaggcgcttaatgaccgcttcgccggttatatcgacaaggtgcgacagttggaagcgcacaatcgaagcctggaaggggaagcggctgccctgagacagcagcaggctggcagaagcgctatgggcgaactttatgagcgcgaggttcgcgagatgcgaggcgctgttcttcgcttaggagccgctcgtggacagctgagactcgagcaggaacacctcctggaggatatcgcccacgtccgccagcgattggatgatgaagccagacagcgtgaggaagcagaggccgcagctagagccctggccagatttgcccaagaagctgaagcagcaagagttgatctccaaaagaaggcccaggccctgcaagaggagtgcggatatctgcggaggcaccaccaggaggaggtcggcgagttgttaggtcagatacagggcagcggggctgcgcaggcccaaatgcaggctgagacccgtgacgccctgaaatgcgacgtaactagtgctctgcgggaaatcagagcccagctagaaggccacgctgtgcagtctacactccagtcggaggagtggttccgggtcaggctggaccgcctgagcgaagccgctaaggtaaacaccgatgccatgcgctcagcccaggaggagatcacagagtatcgccgacagctccaggcacgcacgaccgagcttgaggctctcaagtccaccaaagattccctggaaagacagcggagcgaactggaggatcgccaccaagccgacattgcatcttatcaggaagcaatccaacagctggacgcagagctgcggaacacaaagtgggaaatggctgcacagctgcgagaataccaggatctcctgaacgtaaaaatggccctggatatcgaaatcgcggcatatcgaaagctgttggagggcgaggagtgtaggattggtttcggccctatcccattttccctccccgaaggcctgcccaagatccccagcgtgtccactcacatcaaagtgaaaagtgaagagaaaatcaaagttgtcgagaaaagtgaaaaggagacggtgatcgtcgaggaacagactgaggaaacccaggtgaccgaagaggtgacggaagaggaggagaaggaagccaaggaggaagaggggaaagaggaagagggcggtgaagaggaggaggcagaaggtggcgaggaagagacgaagagtccacctgctgaggaagctgctagcccggagaaagaagcaaaatcccccgtgaaagaggaggctaagtctccagctgaggcaaagtcaccagagaaagaagaggccaaatctcccgctgaggtgaaatcccccgaaaaggctaaatcccctgcaaaggaagaagccaaatcccctccagaggcaaagtctccagagaaagaagaggccaaaagtcctgcagaggttaaaagcccagaaaaggctaagagcccagcaaaggaagaagctaagtcacccgcagaagccaagtccccggagaaggcgaaatctcccgtgaaggaggaggcaaagtcccctgccgaggcgaaatcacccgttaaagaggaggccaagagtcctgccgaggtgaagtctcctgaaaaagccaagtctccgaccaaggaggaagcaaaatcccccgagaaggcaaagagcccagaaaaggaagaggcaaagtccccagaaaaggctaagagtcctgtcaaggcagaagcaaagtcacccgaaaaggctaaaagccccgtgaaagccgaagctaaaagccctgagaaggctaaatcacctgtgaaagaggaagctaagtcccctgagaaagcgaagtcacctgtgaaagaagaagcaaagagcccagagaaagcaaaaagccccgtgaaagaggaagcgaaaacaccggagaaggccaagagtccagtaaaggaggaagccaaatccccagagaaggcaaaatcccccgagaaagcaaaaacactggacgttaagtcgcctgaagccaaaactcccgctaaggaggaggctagatctccagccgacaaattccctgagaaggcgaaatctcctgtcaaagaggaggtgaagtcacccgaaaaggcaaagtctccgctcaaggaggacgctaaggcgccagagaaagaaatcccgaagaaggaagaagtgaagagccctgttaaagaagaggagaaaccccaggaagtgaaggttaaggaacctcctaaaaaagccgaggaggagaaagcgcctgcaaccccaaagactgaggaaaagaaggatagtaagaaggaagaggcccctaaaaaggaggcacctaagccaaaagtggaagagaagaaggaaccagcggtcgaaaagcccaaggagagcaaagtcgaggccaagaaagaggaagcagaggacaagaaaaaggtccccaccccagaaaaggaagcacccgcaaaagtggaggtgaaggaggatgcaaagccgaaagaaaaaaccgaagtcgctaaaaaagagccagacgatgcgaaagccaaagagcccagtaaaccagccgaaaagaaggaggccgctcctgaaaaaaaggacaccaaagaagaaaaagccaaaaaacccgaagagaagcctaagacggaggccaaggccaaggaggacgataagacattgtctaaggagccaagcaagccaaaggccgaaaaagcagagaaatccagttccacagatcagaaagatagcaaacctcccgagaaagccaccgaggacaaggctgctaaaggcaagtag

SEQ ID NO: 232421 - DNA, 2916 bp, synthetic construct
  misc_feature 1..2916: note = Description of Artificial Sequence: Synthetic coding sequence
  source 1..2916: mol_type = other DNA
atgatgtcatttggtggagctgacgcccttctgggcgcaccgtttgcccctctccacgggggtggctcgctgcattatgctctcgcacgtaaaggaggggctggaggcaccagaagcgcagctggaagtagtagcggattccactcttggactcggacttccgtaagctccgtctcagcaagtccgagcaggttccgcggagcgggtgcagcgtcttccaccgatagtctggacacgctttctaatggtccagaaggctgtatggtcgcagtcgccacgtccaggagtgagaaagagcagttgcaggcattgaatgataggttcgcaggctatatcgacaaagtccggcagctggaggcccacaatcggtccctggagggcgaagccgctgctctgaggcagcagcaggctgggcgaagtgccatgggggagctctatgaaagggaggtcagggaaatgaggggtgctgtgctgcggctgggcgctgctcggggacagctgcgactggaacaagagcacttgctggaggacatcgctcacgtccggcagaggttggatgacgaagctagacaacgcgaggaagccgaggctgcagcccgtgctctggcaagatttgcccaggaggccgaggcagccagagtcgacctgcagaagaaagctcaagcactgcaggaggagtgtggctatctgcgtcgtcaccaccaggaggaggtcggcgagctgctgggacagatccaggggagtggcgcagcccaggcccaaatgcaggcagagacaagggacgctctgaagtgtgacgtgaccagtgcactgagagaaattcgggcacagctggagggacacgctgtgcagtctactctgcagagcgaggagtggttccgcgttaggcttgaccggttaagtgaggctgccaaagtcaacaccgatgccatgaggtcagcccaggaagaaatcacggaatatcgtaggcaacttcaggcaaggacaaccgaactcgaagcgctcaaatcaactaaggacagcctcgagcggcagaggtctgagttggaagaccggcaccaggctgatatagcctcataccaggaagccatacagcagctggatgctgagttgcggaataccaagtgggaaatggcagcccagctgagagaataccaggacctgcttaacgtgaagatggcattggacatcgagattgctgcttatcgcaaactgttggagggcgaggagtgcagaatagggttcggcccaattccattctcactgcctgagggcttgccaaaaataccatcagtcagcacacatataaaagtgaagtctgaggagaagattaaggtcgtggaaaaatccgaaaaagaaaccgtcatcgttgaggaacaaaccgaggagactcaggtgaccgaagaggtcacagaggaggaggagaaggaggccaaagaagaggaaggcaaagaggaggagggtggcgaagaggaagaggcagagggtggtgaggaggagaccaagagccccccagccgaggaagccgcttcgcctgagaaagaggccaaatctcctgttaaggaggaagccaaaagccccgctgaagctaagtcccctgaaaaagaggaagccaagtctcctgccgaagttaagagcccagagaaggcaaaatctccagcaaaggaggaggccaagagtccgccagaggccaagagtcctgagaaggaggaagctaaatctcccgctgaagtcaaatcacccgagaaagccaagagccccgctaaagaagaggctaagtctcccgctgaggctaaatcccctgagaaagcaaagagcccagtcaaggaggaggccaagagcccggcagaggcaaaatcccccgtgaaagaagaggccaaatcccctgcagaggtaaaatctccagaaaaggccaagtctcctaccaaggaagaggcaaagagtccagaaaaggcaaaatcaccagaaaaggaggaagcgaaaagccccgagaaagccaagtcgcctgtaaaggccgaagccaaatcgcccgaaaaagccaaatcacccgtgaaagctgaggccaagtcaccagaaaaggctaaaagccctgtcaaagaggaagccaagagtcccgagaaggcgaagtctcctgtgaaagaggaggccaagtctcctgagaaggctaagtcacctgtgaaagaggaagctaagacgccggagaaggcaaagagcccagtgaaggaggaggctaaatccccagaaaaggccaaatctccgttaaaggaagatgccaaagctccagaaaaggaaatcccaaagaaagaagaggtcaagagcccagtgaaggaggaagagaagcctcaggaggtgaaggtgaaagagcccccaaaaaaggctgaagaggagaaggcaccagccacccccaaaacagaagaaaagaaagatagcaaaaaggaagaggctcctaaaaaggaggctccgaaaccgaaagttgaggagaagaaggaacctgcggtggagaaaccaaaagaatccaaagtagaggccaagaaggaagaggccgaggacaagaagaaagtgccaacacctgagaaggaagcccctgctaaggtcgaggttaaggaagatgcaaagcccaaagagaagaccgaggtagcgaaaaaggaacctgacgatgcaaaagctaaggaaccctcgaagcctgccgagaaaaaagaggctgccccagagaaaaaggacaccaaggaggagaaagccaagaagcccgaggaaaagcctaagacggaagccaaagctaaagaggatgacaaaacgctctctaaagaaccaagcaagccgaaagcggaaaaagcagaaaaatcctcttccaccgaccaaaaagacagtaaaccacctgaaaaagctacggaagataaggccgctaagggtaagtag

SEQ ID NO: 232422 - DNA, 930 bp, synthetic construct
  misc_feature 1..930: note = Description of Artificial Sequence: Synthetic coding sequence
  source 1..930: mol_type = other DNA
atggatgacaaagccttcacgaaagagttagatcagtgggtggaacagctcaatgagtgtaaacagcttaatgagaatcaggtccgaaccttatgcgagaaggccaaggagattttaactaaagaaagcaatgtccaagaggtgcgctgccctgtcaccgtgtgcggagacgtgcacgggcagttccatgacctaatggaactcttccgaattggcggaaagtcccccgacacaaactatctctttatgggagattacgtggatcgcggttactattccgttgagacagtcaccttactagtcgcgctcaaagtgcggtatccagagagaatcaccattctgcggggtaatcacgagagtagacaaatcacacaagtgtatgggttctatgacgagtgcttgcggaaatatggcaatgccaacgtctggaagtattttactgatttattcgattacttgcccctgaccgccctggtggatggacagatcttttgcttacacggagggctctctccgtcgattgacactctagaccacattcgggcattagaccgacttcaagaagttccgcatgaggggcctatgtgcgaccttctgtggtctgacccagatgaccggggagggtggggtatctctccacgcggagccggatatactttcggccaggatatcagtgagacttttaaccatgctaacgggctaactttggtctcccgcgctcatcagttggttatggagggctacaactggtgccatgaccggaacgtcgtgacgattttttcagccccaaattactgctacaggtgtgggaaccaggctgctataatggagcttgacgacaccctgaagtactcttttctgcagtttgatcccgcaccccgacgcggagagccccacgtcacacgaagaactccagactacttcttatag

SEQ ID NO: 232423 - DNA, 1623 bp, synthetic construct
  misc_feature 1..1623: note = Description of Artificial Sequence: Synthetic coding sequence
  source 1..1623: mol_type = other DNA
atggccagacacctgagggagtaccaagacctcctgaatgtcaagatggcactggatatcgagatcgcagcgtaccgcaagctgctggagggagaggaaacgagattctccacattcgccggaagtatcacaggcccattatacacacatcgccctcccattactatctcctccaaaattcaaaagccgaaagtggaagccccaaagttaaaggtgcagcataaattcgttgaggaaatcattgaagaaactaaagtcgaagacgagaagtccgagatggaggaagcattgacagctattactgaagagctggctgtgtcaatgaaggaggaaaagaaggaagcagctgaggaaaaggaggaagagcccgaggccgaggaggaggaagtggccgctaagaaatcacccgtgaaggcaactgccccagaagttaaagaggaggaaggcgaaaaggaggaagaggaagggcaggaggaagaagaggaagaggatgagggggctaaatccgaccaggcagaggaagggggtagcgagaaagaaggatcatccgagaaggaggaaggagagcaggaagaaggagagaccgaggccgaagctgaaggggaagaggctgaggccaaggaggagaagaaggtcgaggagaagtcagaagaggttgcaacgaaggaggagttggtggcggacgctaaggtggagaaacccgagaaggctaaatcacctgtccccaagtccccagtagaggaaaaagggaaatcaccggtgccaaaatcgcccgtcgaggagaaaggaaagtctcccgttcctaagtctccagtagaagagaagggaaagagccccgtacccaaatctcctgtggaggagaagggcaaaagtccagtctcaaagagccccgtggaggagaaggcaaagtcgcctgtgccaaaaagcccggtggaggaggctaagtctaaggcggaggttggcaagggggaacagaaggaggaggaggaaaaagaggtcaaggaagccccaaaagaggagaaggtggaaaaaaaggaggagaaacctaaagatgttcctgagaaaaaaaaagcagagagccctgtcaaggaagaggctgtcgccgaggtggtcacaattacgaagtcagttaaggttcaccttgagaaagaaactaaggaggagggcaagccgttgcagcaggaaaaagaaaaagagaaggcgggaggcgagggaggtagcgaagaagaaggttcggacaagggcgctaaaggctcaaggaaagaagacatcgctgtgaacggcgaggtggaggggaaagaagaggtggagcaagagacaaaagaaaagggtagcgggagggaggaagaaaaaggtgtagtgacaaacggtctggatctctctcccgcagacgagaaaaagggtggtgataagtctgaggagaaggtggtggttactaagacggtagaaaagattacgtccgagggaggcgatggagccacgaaatacattacgaagtcggtaaccgttactcagaaggtcgaagagcatgaggagacctttgaggaaaagcttgtgagcacaaagaaggtggagaaggtcaccagccatgcaatcgtaaaggaagtgacgcagtctgactag

SEQ ID NO: 232424 - DNA, 2634 bp, synthetic construct
  misc_feature 1..2634: note = Description of Artificial Sequence: Synthetic coding sequence
  source 1..2634: mol_type = other DNA
atgtcatacaccctggattccctgggaaatccaagcgcctataggcgtgtcaccgaaacacggagctctttcagtagagtgagcggcagtcccagctccggatttagaagtcaatcttggagtcggggtagcccgtccacagtatccagctcttataagcgtagcatgctggcacctcgattagcttattcttccgcaatgctctcctcggcagagtcttccctggacttttcccagtccagtagcctgttaaatggtggctccggcccaggcggagattacaagctatctagatccaacgagaaagagcagctccaaggtctcaacgaccgattcgccggatacatcgagaaggtgcattatttggagcagcagaataaggagatcgaggcggagattcaggcattgcgacagaagcaggcttctcacgcccagttgggcgatgcttacgatcaggaaattagagaactgagagccactctggagatggtcaatcacgagaaggctcaggtccagttggattccgaccatctggaggaagatattcaccggctgaaagagagatttgaggaagaggcacggcttagagacgatactgaagccgctatccgggctctgcgcaaggatatcgaggaggcctccctggtgaaagtagaactagataaaaaggttcagtccctccaggatgaagtggctttccttcggtcaaaccatgaggaggaagtggccgatttgctggcacagatccaagcttcccacatcaccgtggaacgaaaggattacctgaagactgatattagtaccgccttaaaagaaattagatctcagctggaatcccactccgaccaaaacatgcatcaggccgaggagtggttcaaatgtcgatatgccaaactgactgaggccgctgaacagaataaggaggctattcgaagcgccaaggaggaaatagctgagtacagacgccagctgcagagtaaatctatcgaactcgaatccgtgcggggtaccaaagagtcgcttgagcggcaactttctgatatcgaggaacgccataatcacgatctctcttcttaccaagacaccatccagcagctcgagaacgaactccgtggaacgaagtgggagatggcccgacacttgcgagaatatcaggatctcctcaatgtgaagatggctttggatatcgagatcgccgcatacaggaaattactggagggagaagaaactcgcttttcaacatttgccggtagcatcaccggcccactgtatacccatagaccacctatcaccatatcaagcaaaattcagaagcccaaagtagaggctccaaagcttaaggtacaacacaagttcgtggaggaaatcattgaagaaactaaggttgaggatgagaaatcagaaatggaagaggcgctcacagcaatcactgaagagctcgctgtctccatgaaggaagaaaaaaaggaagcagctgaggaaaaagaggaagagccagaggccgaagaggaagaggtagctgcaaagaagtcacctgtcaaagcaactgccccagaagtgaaggaggaggaaggggagaaggaagaagaagagggtcaggaagaagaagaagaagaagatgaaggggctaaatccgatcaagcagaagaggggggatcagagaaggaggggagttcggaaaaggaagagggagagcaagaagagggggagacggaggccgaggccgagggagaggaggccgaggcgaaagaggaaaaaaaagtagaggagaaaagcgaggaagtcgccacaaaggaggaattggtggcagacgctaaggtggaaaaacctgagaaagctaagagccccgtgcctaaaagtcccgttgaagagaagggcaaatctcctgtctctaagagtcccgttgaggaaaaggcaaagtccccagtgcctaaaagtcctgtcgaggaagccaaatccaaagctgaagtgggtaagggcgaacaaaaggaggaggaggagaaggaagtgaaagaggccccaaaagaggagaaagtcgaaaaaaaggaggagaagcctaaggatgttccggagaaaaaaaaagccgagtcccccgtgaaggaggaggccgtggccgaggtggttacaattaccaagtctgttaaggtgcacctggagaaggagactaaagaagaaggcaaaccgctccagcaggaaaaggagaaagagaaggccggaggagaggggggaagtgaagaggaaggaagcgataaaggagcaaaaggctcccggaaagaagacatcgctgtgaatggagaagtggaagggaaagaggaagttgaacaagaaactaaggagaagggcagcggacgggaggaggagaagggagtggtgaccaatgggttggacctttctcccgcagacgaaaaaaaagggggtgacaagagtgaggaaaaggtcgtcgtgactaaaaccgtcgaaaaaattacctccgagggcggtgacggggctactaaatatattaccaaatcagtaaccgttacccagaaggttgaggaacacgaggaaacctttgaagagaagctggtatccactaagaaagtcgagaaggtgacttcacatgcgatcgtgaaggaggttacccagtcagattag

SEQ ID NO: 232425 - DNA, 1071 bp, synthetic construct
  misc_feature 1..1071: note = Description of Artificial Sequence: Synthetic coding sequence
  source 1..1071: mol_type = other DNA
atgaccaaaagctacagtgagagcggacttatgggggaaccgcagccacagggacccccttcttggactgacgagtgcttatcatcccaagatgaggagcacgaagccgacaaaaaggaagacgacctcgaaacaatgaatgccgaagaggacagtcttcgaaacgggggtgaagaggaagacgaggatgaggatctggaggaagaagaggaagaggaggaagaggacgatgaccagaaaccgaagcggagagggcctaaaaaaaaaaagatgaccaaggcccgactcgagcgatttaagttgcggaggatgaaggcaaacgccagggagcgtaatcgcatgcatggcctcaacgcagccctcgataatctgcgaaaagtggtgccttgctacagcaagactcaaaaactgtctaaaatcgagactctcagactggcaaagaactacatttgggccttatccgagatactccgctctgggaaatctcccgaccttgtcagcttcgtgcaaacactttgtaagggtctatctcagcccacaacgaatctggtggccggttgcctgcaactgaatccaagaacctttctgccagagcagaatcaagatatgccaccacacttaccaaccgcttctgcaagttttcctgtacatccctactcttaccagagtcccggactcccttcccccccatacgggaccatggacagtagccatgtgtttcacgtcaaacccccaccccacgcttatagcgcagccttggaaccattttttgagtcacctctgaccgactgcacctccccatcattcgacggcccactgagtcccccactgtctattaatggcaacttttctttcaaacacgaaccaagcgccgagtttgaaaaaaattacgcttttaccatgcattatccggctgcaaccctcgcaggagcacaaagtcacggctctattttttctggcaccgccgctcctaggtgcgagatccctatagacaatattatgtcatttgactcgcacagccatcacgaacgcgtcatgagtgcgcagttaaatgccatctttcacgattag

SEQ ID NO: 232426 - DNA, 1149 bp, synthetic construct
  misc_feature 1..1149: note = Description of Artificial Sequence: Synthetic coding sequence
  source 1..1149: mol_type = other DNA
atgctgactagactgttcagcgaaccaggacttctctctgatgtgccaaaatttgcaagctggggagatggcgaagacgacgagcccagatctgataagggagatgcacctccacctcctccccctgcaccaggtcccggtgcacccggtccggcaagggccgctaaaccagtcccactgcggggagaggaggggactgaagctaccctggcagaagtaaaagaggaaggcgaactgggcggagaggaggaggaagaagaagaagaggaagagggactggatgaggctgaaggcgagcgacccaagaaacgaggtcccaaaaaacgcaagatgactaaagcacgactagagagaagcaagctccgcagacagaaggcaaatgcaagagagcggaatcggatgcatgatctgaatgctgcccttgataatctccggaaggtggtgccctgctattccaagacccagaaacttagcaaaatagaaactctccgtcttgcgaagaattacatctgggcgttgtccgagatcttgcgctctgggaaacgacccgacttggtgagctatgtgcagaccttgtgtaaggggctgtctcagccaacaacaaatttagtagccggatgtttacagttgaactcgcggaattttttaaccgaacagggcgcagacggcgcaggcagatttcacggcagcggaggaccatttgctatgcatccttatccctatccatgttcacggctcgcgggtgctcaatgccaggccgcagggggactgggaggaggagccgcacatgctttacgcactcatggttactgtgccgcatatgagaccctctacgctgctgccggaggcggaggtgcctctccggactacaactcatcggaatacgaggggccactctcaccccctctgtgtttaaatggcaactttagtctgaagcaggattcaagcccagatcatgagaaatcttatcattactcaatgcattactcagcattgccaggctcccgtccaaccggacacggacttgtgtttggtagctcagccgtgcgtggaggcgtgcattccgagaatctgttgtcctacgacatgcatcttcaccacgacaggggtcctatgtacgaggaactaaatgccttcttccacaactag

SEQ ID NO: 232427 - DNA, 996 bp, synthetic construct
  misc_feature 1..996: note = Description of Artificial Sequence: Synthetic coding sequence
  source 1..996: mol_type = other DNA
atgagcaaaactttcgtcaagtccaaagagatgggtgaattagttaacacaccaagttggatggacaaagggctgggctcccagaatgaagttaaggaagaggaatcccggcctgggacttatggaatgctatcttctctgacggaagagcacgactctattgaggaagaggaggaagaagaagaagacggagaaaagcctaagagacgcggtccgaaaaaaaaaaaaatgacaaaagccaggcttgaacggttccgtgcgaggcgcgtgaaggccaatgctagggagcgaacaaggatgcacggactgaatgatgcgttagacaacctaagaagagtcatgccctgctactccaaaacgcagaaactttccaaaatcgagacactgcggctggctagaaattacatatgggcccttagcgaagtccttgagaccgggcagactcctgaaggtaagggtttcgtggaaatgctctgtaaaggcctgagccagccaactagcaatctggtggccggatgcctacagctcggtccacagagcgtactgttggagaaacatgaagataagtccccaatctgcgattccgctattagcgtacataacttcaattaccagagccctggactcccctcgcccccttatggccacatggagacccatctgttacacctcaagccccaggtcttcaagtcactgggcgaatcaagtttcggatcgcacctgccggattgctctactcctccgtatgaagggcctctgacgccacccttgtccatatccggcaatttttcattaaagcaggacggtagccccgacctggagaaatcctattctttcatgccccattatccctccagctccctcagcagcggccatgtgcacagcacgcctttccaggctgggacccctcggtatgacgtccccattgatatgtcgtacgacagttatccccatcatggcatagggacacagcttaacaccgtattcactgaatag

SEQ ID NO: 232428 - DNA, 1014 bp, synthetic construct
  misc_feature 1..1014: note = Description of Artificial Sequence: Synthetic coding sequence
  source 1..1014: mol_type = other DNA
atgttgacattgccatttgatgaatctgtggtcatgcccgagtctcaaatgtgccgcaagttcagcagagagtgtgaggatcaaaaacaaattaagaaaccggaatccttctcaaagcagatcgttttgcggggaaagtccatcaagcgtgccccaggagaggagactgaaaaagaggaggaggaagaggatagggaggaagaggatgaaaatggcctgcctcgaaggaggggacttcgaaaaaaaaaaacaacaaagcttagactagaacgcgtaaagttcaggcgacaggaggccaatgccagggaaagaaacaggatgcacggcttgaacgacgccttagacaatctgaggaaggtggttccgtgctactctaagactcagaaactcagcaagatcgaaacccttagattagccaagaactatatctgggcattatcggaaattctccggatcggcaaaaggccggacctactgacctttgtgcaaaacctgtgcaagggtttgtcgcagcctaccaccaacttggtggctggctgtctccagctgaacgccaggagtttcctgatgggccagggaggggaggctgcccaccatacacgaagcccttactccactttttatcctccttaccatagtccagagctcaccactccacctgggcacggcaccctggataactcaaagtccatgaaaccatacaactattgctctgcttatgagtcattctatgagagcacctcaccagaatgcgcctccccacaatttgagggacctctgagtccccctcctattaactacaacggcatcttttctctcaaacaggaggaaacccttgactacgggaaaaattacaattacgggatgcactattgcgctgtgcctcctcggggtcctttagggcaaggggctatgttccggctgccgacggactcacactttccctacgatctccacctccggtcccagtcattaaccatgcaggatgagcttaacgccgtctttcataactag

SEQ ID NO: 232429 - DNA, 714 bp, synthetic construct
  misc_feature 1..714: note = Description of Artificial Sequence: Synthetic coding sequence
  source 1..714: mol_type = other DNA
atgcctgcacgcctggagacctgcattagcgatctagactgcgcctcttcctccggctccgacctgtctggctttctaacagacgaagaggattgcgcgcgactgcagcaggccgcaagcgctagcggccctcccgcaccagcgaggaggggggctcccaacatttcccgagcctcggaggttccaggcgcacaggacgatgaacaggaaagacgccgtcgtcgaggaagaacacgtgtgcgtagcgaagccttgctgcacagcctgcggcgttcccgacgggtgaaggcaaatgaccgggaaaggaaccgcatgcacaaccttaacgccgcactggacgctttgcggtccgtgttgccttcattcccagatgacacaaaattgaccaaaattgaaaccctccgcttcgcttataattatatttgggcccttgccgaaacattacgcctggctgaccaggggctgcccggtgggggagctagggagagactcttaccaccccagtgtgtcccctgtctgcccggacctcctagccccgctagtgacgctgaaagctggggcagcggtgccgcagccgcaagtccgctctctgacccatcctccccagctgcgtctgaggactttacctatagacctggggaccctgtcttcagcttccctagtctgcccaaagatctgctgcacaccacaccctgtttcattccctatcattag

SEQ ID NO: 232430 - DNA, 645 bp, synthetic construct
  misc_feature 1..645: note = Description of Artificial Sequence: Synthetic coding sequence
  source 1..645: mol_type = other DNA
atgactccccagccaagtggagctccaaccgtgcaggttacacgggaaacagagaggtcttttcctagagcctctgaagatgaggtaacatgtccgacctcagctcctcccagcccaacgaggactaggggcaattgtgccgaagctgaagaaggcggttgcagaggcgcacccaggaagctgcgcgctagacgcggaggtaggtcacggcctaagagcgaactcgccctcagtaaacagcggagatcgcggagaaagaaggccaatgatagagagcgcaatcgtatgcacaatttgaattccgcattagacgcactgcgcggtgtgcttccaaccttcccagatgacgcaaagctgaccaaaatagagactctccgatttgcgcacaattatatatgggccctcacacagaccttacgaattgccgatcactccctttacgcattggaaccaccagcgcctcactgtggcgagctggggtcaccaggcggatctcctggggactgggggtctctgtactcacctgtaagtcaagccggatcactgagcccagcggcatcacttgaagaacggccaggccttctgggggcaactttttctgcttgcttgtctccagggtcattggctttctcagatttcctctag

SEQ ID NO: 232431 - DNA, 456 bp, synthetic construct
  misc_feature 1..456: note = Description of Artificial Sequence: Synthetic coding sequence
  source 1..456: mol_type = other DNA
atggaacgccctgaacccgagcttatcagacagagctggcgggcagtgtcccgttcacctttggagcacggaaccgtcctcttcgcccgtcttttcgccttggagcccgacttgcttcccttattccagtacaactgtcgtcaattcagttctcccgaagattgcttgagcagccctgaattcctcgaccatatccgcaaggtcatgttggtgattgacgctgccgtgaccaacgtggaggacctgtctagtctcgaggaatacctggcttctctcggcaggaagcatagggccgtcggcgtgaagctctcatccttttctacagtgggcgagtccctgctctacatgctggaaaaatgcctaggcccagcctttacaccagccacacgggcagcttggtctcagctctacggcgcagtagtgcaagcaatgtctagagggtgggacggggagtag

SEQ ID NO: 232432 - DNA, 237 bp, synthetic construct
  misc_feature 1..237: note = Description of Artificial Sequence: Synthetic coding sequence
  source 1..237: mol_type = other DNA
atggactgttgtaccgagaacgcttgcagtaagcctgacgacgatatcctcgacatacccctcgatgaccccggagcaaacgcagccgctgccaagatccaggctagttttcgcggtcacatggccagaaaaaagataaagtccggtgagagaggacgaaagggcccaggtccaggaggccctggtggggctggggtggccagggggggtgctggagggggtccatccggtgactag

SEQ ID NO: 232433 - DNA, 237 bp, synthetic construct
  misc_feature 1..237: note = Description of Artificial Sequence: Synthetic coding sequence
  source 1..237: mol_type = other DNA
atggattgttgcacagagaatgcttgctctaagcctgatgatgacatactcgatattcctctggatgatccaggtgcaaacgccgcagcagccaagatccaggccagcttccgtggtcatatggcacgcaagaaaataaaatccggcgaaagggggaggaaggggcctggccctgggggaccgggaggcgcaggagtggccaggggcggagccggaggaggccctagcggcgactag

SEQ ID NO: 232434 - DNA, 237 bp, synthetic construct
  misc_feature 1..237: note = Description of Artificial Sequence: Synthetic coding sequence
  source 1..237: mol_type = other DNA
atggactgttgcaccgaaaatgcgtgctctaagcccgatgatgatatattggatatacccctagatgaccccggtgctaacgcagcggctgcgaagatccaggcatcatttcggggacacatggcccgaaaaaagataaaaagtggggaacgcggaagaaagggcccagggcctggagggcctggtggagctggggttgcacgtgggggagccggagggggtccctctggagattag

SEQ ID NO: 232435 - DNA, 936 bp, synthetic construct
  misc_feature 1..936: note = Description of Artificial Sequence: Synthetic coding sequence
  source 1..936: mol_type = other DNA
atggctgccctcggagtcctcgaaagcgacctcccgtctgcggtcaccctgttgaagaaccttcaggagcaggtgatggcagtgactgctcaggtcaaatcactgactcagaaggtgcaggcaggcgcttatcctaccgagaagggcttatccttcctggaggtcaaggaccagttattactgatgtatctgatggatttgacacatctgattttggataaggccagtggaggatcactccaaggccacgacgccgtgctgcggctagtggaaataagaactgtgctggagaaactgaggccgctggaccaaaagctgaaatatcagatcgacaagctcattaaaaccgccgtcaccgggagcctgtccgaaaatgacccgttgaggttcaagccccatccaagcaacatgatgtctaaactctctagcgaggatgaagaggaggatgaggcggaagatgaccagtctgaggcctccggaaagaaatcagtcaagggggtaagcaaaaagtacgtgcctcccaggctagtccccgtgcactacgacgaaacagaggctgagagggagaagaagcgtctagagcgggctaagcggcgagccctcagtagtagcgtgattagggagctcaaagaacaatattctgacgctccagaggagatacgggacgcacggcatccccacgtgactaggcagtcccaggaagaccagcatcgtatcaattacgaagagagcatgatggttagattaagcgtctctaagagggagaaaggcaggaggaagcgggctaatgttatgagctcccagctccactcactgactcacttctctgacatcagtgctcttacaggcggtactgtccatctcgatgaagatcagaaccccatcaaaaagagaaagaaaatcccacaaaaaggaaggaaaaagaaaggacagtag

SEQ ID NO: 232436 - DNA, 948 bp, synthetic construct
  misc_feature 1..948: note = Description of Artificial Sequence: Synthetic coding sequence
  source 1..948: mol_type = other DNA
atggcagccctgggagtactcgaaagcgacttgccttccgctgtgacactgctaaagaatctccaggagcaggtcatggcagttaccgctcaggtgaaatctctaactcagaaagtacaggccggagcctaccctactgaaaagggcctgagctttttagaggtcaaagaccagctcctcctaatgtacttgatggaccttacccacctgatcttggataaggccagcggcggatctctgcagggacacgatgcagtattgcggctggtggagatcagaaccgtgttagaaaaactgagacctttagaccagaaactgaaataccagatcgataagctgatcaaaaccgcagtcacaggatctttatcagagaacgatcctctgcggttcaagccccacccttccaacatgatgtcaaagctctcttccgaggatgaagaggaggatgaggccgaagatgaccaatcagaggcctcagggaagaaatctgtcaaaggcgtgagcaagaagtatgtcccccctaggctcgtgccagttcattatgacgaaaccgaggccgaaagggaaaaaaagaggcttgagagggcaaagcggcgagccttgtcctcgtccgttattagagaactgaaagaacagtactccgatgctccagaagagatccgagacgcgcgtcacccacacgtgacgcggcaatcccaagaggaccagcaccgaatcaactatgaggagtccatgatggtgagactgtctgtgtccaaaagagaaaaaggacggaggaaaagggctaatgtgatgtcaagccagcttcactccctgacccactttagtgacatatcagccctgaccggtggtaccgttcacctcgacgaggaccagaaccctatcaaaaaaaggaaaaagataccccagaaaggcagaaaaaagaagggttttcggaggagacgctag

SEQ ID NO: 232437 - DNA, 2472 bp, synthetic construct
  misc_feature 1..2472: note = Description of Artificial Sequence: Synthetic coding sequence
  source 1..2472: mol_type = other DNA
atggcactgccacgttgcacctggccaaactacgtttggcgagccgttatggcttgcctggtgcaccgagggctaggtgccccattaactttgtgcatgttgggctgcctgctccaagctgggcatgttctgtcgcaaaaactcgacgatgtagaccctctggtggctaccaactttgggaagattcgcggtataaagaaggaactgaacaacgaaatcctcggaccagttattcaattcctgggcgtgccatatgcagctccccctacaggagagagaagattccagccacctgaaccacccagtccctggagcgacattaggaatgccactcagttcgctcccgtctgtcctcagaacatcatagacggacggctccccgaagtgatgctgcccgtctggttcaccaacaatctggatgtcgtaagctcttatgtgcaggatcagtcagaggattgcctgtacctgaacatctacgtcccaactgaggacgacatcagggatagtgggggtccgaagccagtgatggtttacattcatggtggctcatacatggagggcacgggcaatctgtatgatgggtcagtgctcgcttcttacgggaacgtaattgtaattaccgtcaactaccggctaggtgtgctggggtttctcagtacgggtgaccaagcggcaaaaggaaactatggactgctggacctgattcaggccctgagatggaccagtgaaaatatcggattttttgggggagatcctttgagaattaccgttttcggaagcggagcagggggatcatgcgtaaatttattgacgctgtctcactactccgagggaaatagatggtctaatagcaccaaaggtctgtttcagcgggctattgcgcagtcgggtactgctctatcctcctgggctgtgtcattccagccagcaaagtacgccaggatgctcgctacaaaggttggatgtaacgtgagcgacacggttgaactggttgaatgcctccagaagaaaccttataaagagctcgttgaccaagacattcagccggctagataccacatagcttttgggccagtgattgacggagatgtgatccctgatgatccccaaatcctcatggagcagggggaattcctaaattacgatataatgcttggggtcaaccaaggcgaagggcttaagtttgttgagaacatcgtggattcagatgacgggatctccgcatccgactttgacttcgccgtaagcaattttgtggacaatttatacggttatcccgaaggaaaagatgtcctacgagaaaccattaagtttatgtacacagattgggccgatagacacaatcctgagactaggcgcaagacactgctggcactgtttactgaccaccagtgggtcgcacccgctgtggctaccgccgatctgcacagcaattttggctctccaacctacttctatgccttctatcatcactgtcagaccgatcaggtaccagcatgggccgacgctgcacacggtgacgaagtaccatatgtgctgggaatacccatgattgggccaaccgagttgtttccctgtaacttttctaagaacgatgtcatgctgtcagccgtggtgatgacatattggaccaactttgcaaaaactggggatcccaaccagccggttccccaggacactaagttcatccacacaaagccaaacaggtttgaggaggtggcttggacaagatattcccaaaaggaccagctgtacctgcacattggcttaaaaccacgcgtaaaagagcattacagagcaaacaaggtcaatctttggctcgagttggtcccccacctgcataacctgaacgatatctctcagtatacttcaactacaactaaggttccgtccaccgatatcaccttcagacccactcgaaaaaacagtgttccagtgacaagtgctttcccaactgcgaaacaagatgacccaaaacagcaaccaagccctttttccgtggatcagagagattacagcacagagcttagcgtcaccatagctgtcggcgcatcactgctgtttctaaatatactcgcattcgccgctttatattacaagaaggacaagaggcgccatgacgtccatcgaaggtgctccccccaacggactacaaccaacgatctgacccacgcacaagaggaggagataatgagtctccagatgaagcataccgatttggaccacgaatgtgagtcaattcatcctcatgaggtggtcctgcgcaccgcatgcccccctgattataccctcgccatgcgcaggagcccagacgacgtgccattgatgacccctaataccatcacaatgattcctaacaccatcccaggaatccagccattgcacacctttaacacttttacagggggacaaaacaacacactgccccatccacatcctcacccgcactcccactctaccacccgggtgtag

SEQ ID NO: 232438 - DNA, 2592 bp, synthetic construct
  misc_feature 1..2592: note = Description of Artificial Sequence: Synthetic coding sequence
  source 1..2592: mol_type = other DNA
atggctctccctagatgcacctggccgaattacgtttggagggcagttatggcctgtctggtacaccgaggcctgggagcacccctgaccctttgcatgctgggctgtcttcttcaagccggtcatgtgctcagccaaaagctggatgatgtcgacccccttgttgccaccaatttcggaaagatccgcggtatcaagaaagaattgaataacgaaatccttggaccggtaattcagttcttgggggtcccatatgccgcaccaccgacgggcgagcgccgatttcaaccgcctgagccaccttctccatggagtgacataaggaatgcgacccaattcgccccagtgtgccctcagaatatcatcgatggccgtctgccagaggtgatgctgccggtgtggtttacaaataacctcgatgtagtttccagctatgttcaggatcagtcagaggattgtctctatctcaacatttatgttccgaccgaggatgtaaaaaggatctccaaagaatgtgccaggaagccaggtaaaaagatatgtagaaagggcggacccctgaccaagaagcagactgacgatctcggggacaacgacggagccgaggatgaagatattagggatagtgggggtcccaaacctgtcatggtgtacatccacggcggaagctatatggaggggacagggaatttgtatgatggcagcgttctggcctcctatggcaatgtaatcgtaataacggttaattatcggttgggagtactcggatttcttagcaccggcgaccaggctgctaagggaaactatgggctactcgacctgatccaggcgctgaggtggacttccgaaaacatcgggttctttggaggcgaccccttgagaatcactgtcttcggcagcggggcaggcggttcatgtgtaaacctgctgactctttcccattactcagagggaaaccgttggtccaactctaccaagggcctctttcagagagcgattgctcagtccggaacagccctcagctcctgggcagtgtctttccagcccgcaaaatatgcccgaatgctcgctaccaaagtgggttgcaatgtgagcgataccgtggagctggttgagtgtctccagaagaagccctataaagagctggttgaccaggatattcagcctgcgagatatcacatcgccttcggacccgtcattgatggtgatgttataccagacgacccacagatactgatggagcaaggcgaatttctgaattacgatataatgctgggcgtgaaccaaggagagggacttaaattcgtcgagaacattgtggattccgacgacggaatttctgcctccgattttgactttgctgtgtcaaacttcgtggataatctgtatggttacccggaaggtaaagacgtgctgcgggaaactattaagtttatgtacacagattgggcggatagacataatcccgagaccagaagaaagaccctcctggcactgttcacagatcaccaatgggtggcaccagcagtggccactgccgatctccattctaactttggctcgcctacatatttttacgctttctaccaccattgtcagacagatcaagtgccggcatgggctgatgccgctcatggcgatgaggtgccctacgtgttggggatccctatgattgggcctactgaactgttcccatgtaacttctcaaaaaacgatgtgatgctctcagcagtggtcatgacttattggacaaactttgccaaaaccggggacccgaaccagcccgtaccgcaagacactaaatttatccataccaagccaaacagatttgaggaagtcgcatggacgcgctactcccagaaggatcagctgtatcttcatattggtctcaagcccagagttaaggagcactaccgcgctaataaggttaatctgtggctggaactggtaccccatttgcacaaccttaatgacattagccagtacacttctaccaccacaaaggtcccttctacagatattacatttagaccaacgcgaaaaaatagtgtgccagtgacttcggctttcccaaccgcaaaacaagatgatccaaagcagcagccttcacccttttccgtcgaccagcgtgactactcaactgagctgagtgtgactattgcagtcggtgcttccctcctgttcctgaatattttggcctttgccgctctgtactacaagaaggacaagcggaggcatgatgtgcacaggcggtgctctcctcagaggactaccacgaacgacctgacacatgctcaggaagaggagatcatgtctcttcagatgaagcataccgatcttgaccatgagtgcgagagcattcatcctcacgaggtggttttacggaccgcatgtcctcccgactataccttggcgatgcggagatcgcctgacgacgtccctttgatgacacccaacacgatcactatgatcccaaacacaattcccggaatccagcctctccatacgtttaacacttttacgggtgggcagaacaatacactgccccaccctcatcctcacccgcactcccactcaaccactcgtgtatag

SEQ ID NO: 232439 - DNA, 33 bp, synthetic construct
  misc_feature 1..33: note = Description of Artificial Sequence: Synthetic coding sequence
  source 1..33: mol_type = other DNA
atggccctcccgagatgcacctggccaaactag

SEQ ID NO: 232440 - DNA, 42 bp, synthetic construct
  misc_feature 1..42: note = Description of Artificial Sequence: Synthetic coding sequence
  source 1..42: mol_type = other DNA
atggcactccccaggtgtacttggccaaactacgtttggtag

SEQ ID NO: 232441 - DNA, 2472 bp, synthetic construct
  misc_feature 1..2472: note = Description of Artificial Sequence: Synthetic coding sequence
  source 1..2472: mol_type = other DNA
atggcactccctcgttgcacgtggcccaactacgtgtggcgggctgtgatggcgtgcctggtgcataggggccttggcgctccgctaactttgtgcatgctcggatgcctcctgcaggcgggtcacgtccttagccagaagctagatgacgtggatcctcttgtagctacaaatttcggtaaaatcaggggcattaagaaggagcttaacaacgagattctggggccagttatccagtttctgggagtgccatatgcagctccccctacaggtgagcgtagatttcaacccccagaacctcccagcccatggtctgatattcggaacgccacccagtttgcgccagtctgtccccaaaatatcatcgatggcaggctccctgaggtcatgctaccagtgtggttcaccaacaatctggatgtcgtgagtagttatgtgcaggaccagtctgaggactgcctttacctcaacatctatgtgcccaccgaggatgacatccgcgatagtggtgggccaaaacccgtgatggtgtatatccatgggggttcctacatggaaggaacagggaatctttatgatggcagtgtgctggcatcttacggaaacgttattgtgattacagttaattaccggctgggcgttctcggcttcctcagtacaggcgaccaagccgcaaaaggtaattacggccttcttgacctcatacaagcactccgatggactagcgagaatatcggcttttttggcggagatccactccggatcaccgtgtttggatcaggcgctggaggatcctgcgtgaacctgctcacactgtctcattatagcgaaggaaacagatggtcaaacagtacaaaaggattgtttcagcgcgctatagcacagtctggcacagctttgtcttcctgggccgtgtccttccaacctgccaaatacgctcggatgttagcaactaaggtgggctgtaatgtcagcgatacagtggagctggttgagtgtttgcagaagaaaccctataaggagctcgttgatcaggacatccagcctgcaaggtatcatatagcctttggccctgtaatcgacggggacgtcatccccgacgaccctcagatactcatggagcaaggagaattccttaattacgatattatgttaggcgtcaaccagggcgagggacttaaatttgtggagaacattgtggactccgatgacgggatcagtgctagcgattttgacttcgctgtgtcaaactttgtcgataacctctatggatatcccgaaggcaaggatgttctgcgggagactatcaaattcatgtacaccgattgggccgatcggcataatccggaaacccggaggaaaactcttctggccctttttacagaccaccagtgggtcgctcctgcggtagcaaccgctgatctccactctaattttggtagccccacctatttttacgccttctatcatcactgtcagactgaccaggtgcccgcttgggcggatgccgctcatggagatgaagtgccatacgtcttgggaattcccatgatagggccaaccgagctattcccatgtaacttctctaagaatgacgtaatgctatcagccgttgtgatgacatattggacaaatttcgcaaaaacgggggatccaaatcagcctgtgcctcaggatactaagttcatccacacaaagcccaaccgatttgaagaagtggcttggacccgctactcccagaaggatcagttgtatctgcatatcgggttgaaaccacgggtgaaggagcactaccgggctaataaggtcaatttgtggctcgagcttgtgcctcatctgcacaaccttaacgatatcagtcagtacacctcaaccaccaccaaggtgcccagtacggacattacattccgccctaccagaaagaactccgtccccgtcacttccgcctttcctacagcaaagcaggatgacccaaagcagcagccctcacccttctctgttgaccagagagattattctaccgaactgagtgtgaccatcgccgtgggagcgtcgcttctgtttctcaatatcctcgcctttgccgctctgtactataagaaggataaacggagacatgatgtccatcggaggtgttctcctcaaagaactacaactaacgacttaacacatgcccaggaggaagagattatgagtttgcagatgaagcacactgatctggatcacgagtgcgagtctattcacccccacgaagtggtcctacgaaccgcatgcccaccggactatacactggcaatgcggagaagtccggacgacgtcccgcttatgacccccaacaccatcacgatgatacctaacacaatccctgggattcagccactccacaccttcaacacgttcacaggagggcaaaacaataccctgccccatccgcacccccaccctcactcccattcgactacaagggtgtag

SEQ ID NO: 232442 - DNA, 2472 bp, synthetic construct
  misc_feature 1..2472: note = Description of Artificial Sequence: Synthetic coding sequence
  source 1..2472: mol_type = other DNA
atggccctgcccaggtgtacctggcccaactacgtctggcgggcagttatggcttgcctagtgcatagaggtctgggtgcccctctcactttgtgcatgctggggtgcctgctccaagccggacacgtactgtctcagaagctcgatgatgttgatcccctcgtagccaccaacttcggcaagatccgcggtatcaaaaaggagctgaacaatgagattctgggacctgttattcagttcctgggcgtcccctacgctgctcccccaacgggagagagaagattccagccaccagagcccccaagcccctggtcagatatccgtaacgccacccagttcgcgcctgtctgtccccagaacatcattgacggccgactccccgaggttatgttgcctgtctggttcaccaataacctggacgtggtcagcagctatgtgcaggatcaaagtgaggattgtctgtatcttaacatctatgtgcctaccgaggacgacatccgagactcaggagggcctaaaccggtcatggtgtacattcatggtggatcatacatggaaggtactggcaacctttacgacggttctgttctcgcatcttatggtaatgtcatagttatcaccgtgaactatcgcctgggggtgctgggattcctgtcaacaggggatcaggctgccaagggcaactacgggctactcgacctcattcaagcattgcgatggacatccgaaaacattggattcttcgggggagatcctcttcgtataaccgtgtttggctcgggggctggagggtcatgcgttaatctactgactttgtctcactattctgaaggcaaccggtggagcaatagcactaaaggactttttcagcgagccattgcccagagcggaacagctctgtcctcatgggctgttagctttcaaccagccaagtacgccaggatgctggcgacaaaggttgggtgtaatgtgtccgacaccgtcgaactagttgagtgtctgcagaagaaaccctataaggaattggtggatcaggacattcagcccgcaagatatcatatcgcttttggccctgtgattgacggggatgttatccctgacgatcctcaaatcctgatggaacagggggagtttcttaactatgacatcatgctgggagtcaatcagggcgagggcctcaagtttgtagaaaatatcgttgactccgacgatggaatcagtgcctctgactttgatttcgcagtcagtaatttcgtggacaacctatacggctaccccgaaggcaaggatgtgctgagggagactatcaaatttatgtacacggattgggcagacagacacaatcctgagacgcgtcgcaagaccttattggctctttttacagaccatcaatgggtggccccagccgtcgcgacagccgacctccactctaatttcggatcccccacctacttctatgctttttatcaccattgccagacagatcaagtgcccgcttgggctgatgccgctcatggtgatgaagttccatacgtactgggcatacctatgatcgggccaacagagcttttcccgtgcaacttcagtaaaaatgacgtgatgctgtctgcggtggtcatgacctactggaccaattttgccaagaccggcgaccccaatcagcctgtacctcaggacactaaatttatccatactaaacctaatcgtttcgaagaggtcgcatggaccaggtactctcagaaggaccagctgtacctgcacatcggattaaaaccgagggtgaaagagcactatcgcgctaacaaagttaatctctggctcgagctggtacctcatctccacaatctcaatgatatatcccagtacacatcaactaccactaaagtcccatctaccgatatcacctttagaccaactcgaaaaaactccgttcctgtgacaagtgcatttccaacggctaagcaagatgatcctaagcagcagccttctccattcagcgtggaccaaagagactattccacagagctaagcgttaccatcgccgtgggcgcatctctgctctttctgaacatcctggcctttgccgctctctactacaaaaaagacaaacggagacatgatgtccaccggagatgcagtccacagcgcaccactactaacgacctgacacatgcgcaggaagaagagataatgagtctccagatgaaacacacggacctggaccatgaatgtgaaagcattcacccacacgaagtggttctgaggactgcctgccccccagattacactctggccatgagacgttctcctgacgacgtgcctctaatgacaccaaatacgattaccatgatccctaataccattccaggaattcaaccactacatactttcaacacctttactgggggtcaaaacaacaccctgccacaccctcatccccatccccacagccactctacaacccgagtgtag

SEQ ID NO: 232443 - DNA, 2508 bp, synthetic construct
  misc_feature 1..2508: note = Description of Artificial Sequence: Synthetic coding sequence
  source 1..2508: mol_type = other DNA
atgtggctgctagccctgtgcctggttgggcttgccggtgcacagcgcggaggcggtgggccaggtggtggtgctccaggagggccaggcctcggacttggatcactcggtgaagagagattcccggtagtgaatactgcctatggtcgggtcaggggggtgaggagggaactgaacaacgagatcctcgggccagtcgtccagtttctgggcgtcccatacgctactcccccactcggcgctcgaagattccagccacctgaagcccctgcctcctggccgggagtacgcaacgctacaactctccctcctgcttgtccacaaaacctccatggggctctgcccgcaataatgctgcccgtgtggttcactgataatctggaggccgcagcaacctacgtgcaaaatcagagcgaggactgtctgtatctgaacttatatgtgcctaccgaggatggaccgctgacgaaaaaacgagacgaagcgacgttgaatcctccagatactgacattagggatcctgggaaaaagcctgttatgttatttctgcatggcggttcttatatggaaggtacaggaaatatgtttgatgggtccgttttggcagcctacggcaacgtcattgtggccacgctaaattacaggctaggagtcctaggatttcttagtaccggcgaccaggcggctaaagggaattatggccttctagaccaaatacaagccctccggtggctgtccgagaatatcgcacatttcggcggagaccctgaaaggattaccattttcgggtcaggagctggggcttcgtgtgtgaacctactgattttgtcccatcatagcgaaggtttgttccagaaagccattgcgcaatcaggaaccgctatttctagttggagtgtcaattaccagcctcttaagtataccagattgctggctgccaaggtaggctgtgatagggaggacagcgccgaggccgtggaatgcctcaggaggaagcctagtcgtgagctggtggaccaagacgtgcagcccgcaaggtatcacatagcttttggacccgtagtggatggcgacgtggtccccgatgatcccgagatcctaatgcaacagggtgagtttttgaattatgacatgctgattggggttaaccaaggtgagggtttgaagtttgtggaagattccgcagagtctgaagacggggtctcagcgtccgcctttgactttacagtatcgaatttcgtggacaacttgtacggctaccctgaagggaaggatgtgctccgcgagaccatcaagttcatgtatacagattgggccgatagggacaatggcgagatgagaaggaagaccctcctggccctgttcaccgaccaccaatgggtggctcccgctgttgcgactgctaagcttcatgcggactaccagagtcccgtgtacttttacacattctaccatcactgtcaggccgaaggaaggcctgaatgggctgacgcagctcacggtgacgaactgccttatgtctttggcgtcccaatggtgggtgcgactgacctcttcccatgtaacttttctaagaacgatgttatgctgagcgccgttgtcatgacctattggaccaatttcgccaaaactggggatccgaatcagccagtgccccaagacacaaagtttattcataccaagcccaatagattcgaggaagtggtgtggagcaaattcaattccaaagagaaacagtacttgcacatcggattgaagccaagggtccgcgataattaccgggcaaacaaggtggccttttggctggaactggtgccacacttgcataatctgcacacagagctgtttaccacaaccacacgcctccctccctatgcaacgagatggccgcctaggcctcccgcaggtgcccctggtactagaaggcctccaccaccagccacactaccaccggagcccgagcccgaacccggtccccgtgcatacgatagattcccgggagattccagagactatagcacagaactgagtgttacagtagcagttggggcatctcttctctttcttaatatccttgcattcgccgcactatattacaagcgcgacagacggcaggagttgcgctgtagaaggttgtctccaccaggcggatcaggcagtggtgtgccaggaggaggtccgctgctccctgccgcaggtagggagttaccgcctgaggaggagttggtttcgctgcagcttaagcggggagggggagtgggagcagacccagcagaggcccttcgccctgcctgcccacccgattacactcttgcactgaggagggcgcctgatgacgttcccttgttggcgccaggcgcactgaccctcctgccatcagggctggggccaccaccccctcctccacctcctagcttgcacccgtttgggccatttccacctccgccacccaccgccacctctcataacaacaccttaccacacccacatagcaccactcgcgtgtag

SEQ ID NO: 232444 - DNA, 2547 bp, synthetic construct
  misc_feature 1..2547: note = Description of Artificial Sequence: Synthetic coding sequence
  source 1..2547: mol_type = other DNA
atgtggctgagactgggaccgccttctctaagtctgagcccaaagcctacagtgggtcgatcactgtgtttaaccttatggtttttaagtctcgccctgagggccagcacgcaagcgccagctccaaccgtcaacacccattttggcaaacttcgcggagctcgagtacccctgccctccgagatcctgggcccagtggaccagtatctcggggtgccgtacgccgctccccctattggcgagaaacggttcctgccacccgaaccacccccatcatggtcgggtattagaaacgcaacacactttcccccagtgtgtccgcagaacatccacactgctgtccctgaggtgatgttgcccgtgtggtttaccgcaaacctcgacatcgtggctacttacatacaggagcccaacgaggattgcctatacctcaacgtgtacgtgcctacagaagatgtcaaacgcatctccaaggagtgtgccaggaagcctaacaagaaaatatgccggaaaggtggcagcggcgctaagaaacagggagaggatctagctgacaacgacggagatgaagacgaggatatcagggacagtggggcaaagcccgtgatggtctacatccacgggggatcatatatggagggaacaggcaacatgattgacggctccatcttggccagttatggcaacgtcatcgtgatcaccctgaactatagagtgggggttctgggcttcctaagcacgggggaccaggcggcaaaaggaaactacggactgctcgaccagattcaggcattgcgctgggtgtctgagaatatagccttttttggaggcgaccccaggcggatcactgtttttggctctggcattggagcctcctgtgtcagccttctcaccctgtctcaccatagcgagggcttattccaacgggctataattcagtccggtagcgcactgtcctcttgggccgtgaattatcagccagtcaaatacacaagcctgttggccgacaaagttggctgtaatgtgcttgacaccgtggatatggtggattgcctccgccaaaaaagcgcaaaggaactggtagagcaggacattcaaccagccagataccacgtcgcattcgggccagtcatcgacggcgacgtgatccccgacgatcctgaaattctgatggaacaaggggagttcctgaactacgacattatgttgggcgtgaatcagggagagggcctgaaatttgtagagggggttgttgaccctgaggacggagtgtctggtactgactttgattactcagtgagtaatttcgtagacaacctgtatgggtaccctgagggaaaggacacgctacgagaaacgataaagttcatgtacactgactgggcagatcgagacaatcccgaaaccagaaggaagacacttgtggccctgttcaccgatcatcagtgggtggaaccctccgtcgtgacggcggacctgcacgcacggtatgggagtcctacatacttttacgctttttatcaccactgtcagagtttgatgaaacccgcttggtccgacgcggctcatggcgacgaggtgccttatgtgtttggtgtgcccatggtcggtccaaccgaccttttcccttgtaactttagcaagaacgacgtcatgctgtccgcagtggtaatgacttactggaccaatttcgcaaaaacgggcgatccaaataagcctgtgccgcaagacactaaatttattcacacaaaagccaatcgatttgaggaagtggcctggagtaagtataatcctcgcgaccaactttatttgcacatcggcctcaaacctcgggtgcgcgaccactatagagcaactaaagttgccttctggaagcacttagtgccgcacctctataatctccacgacatgtttcattatacttccacaaccacaaaggtgcccccacctgacacaacccattcatcacatatcacgaggcgccctaacggcaagacctggagcacaaaacgacccgcaatctcgcccgcttacagcaatgagaacgcacaagggtcatggaatggtgatcaggatgcagggcctctactagtagaaaaccctagagattacagcactgagttgtcagtcacaatcgccgtcggagcctccctgttattcttgaacgtgttagccttcgcagccttatactaccgcaaagacaagaggcgccaggaaccgctcagacagccctcaccgcaacgaggcgctggggctcctgagctgggcgctgcccctgaggaggaactcgccgctctgcagcttgggcctacccatcacgagtgtgaagccggtcctcctcacgacacactgcgtctgacagccctccccgactacacactgacacttaggagaagtcctgatgacattcccctcatgacacccaacacaatcacaatgatccccaattccctcgtgggattgcagaccctccatccatataacaccttcgctgcagggtttaactccaccgggttgccgcatagtcacagcactactcgcgtgtag

SEQ ID NO: 232445 - DNA, 2487 bp, synthetic construct
  misc_feature 1..2487: note = Description of Artificial Sequence: Synthetic coding sequence
  source 1..2487: mol_type = other DNA
atgtggcttcggcttggcccacctagtctttcactgtctccgaagccgactgttggccgtagtctttgtctgaccctttggtttctaagtctggccttgagggcatctactcaggcccctgctccaacggtgaatacccattttggcaagcttcggggtgcacgggtacctcttccatccgagatccttgggccagtggatcagtacctgggcgtgccttacgccgctcctccgatcggagaaaagcgttttctgccccctgaaccccctccatcctggtccggaattcgtaacgctacacattttccacccgtgtgtcctcagaacatccacacggccgtgccagaagtcatgttgccggtgtggtttacagctaacctcgatatagtggcgacgtatatccaggaacctaacgaagactgtctttatttgaacgtttacgtacccactgaagatggttcgggggcaaagaagcagggagaggacctcgcagacaatgacggagacgaggacgaggacataagggattcaggcgctaagcccgttatggtatacatacacggagggtcttacatggagggaactgggaacatgatcgacggcagcattctggcctcctacggcaatgtgatcgttatcaccctgaactatagagtcggagtgctcggatttctcagtaccggagaccaggctgcgaaaggaaattacgggttactggatcagattcaagccttgcgatgggtcagtgaaaacatcgcctttttcgggggtgaccctcggcgaattactgtttttggaagcggcattggagctagttgcgtctcgctcctgaccttaagccaccacagtgaaggtcttttccagcgcgctatcattcagagtggttccgctctgtccagctgggccgtgaattatcaacctgtcaaatatactagcctgctggccgacaaagtaggctgtaatgtgttggacaccgttgacatggttgattgtcttcgccagaaatccgccaaggagctggtagagcaggatatccaacccgctaggtaccacgttgcattcggcccagttattgacggcgacgtcatcccggatgaccctgaaatcctgatggagcagggagagttccttaattacgatattatgctcggcgtcaaccagggggaaggtttaaagtttgtggagggtgtggtggatcctgaagacggtgtcagtggaactgattttgattattctgtcagtaatttcgtggacaacctttacgggtaccctgaggggaaggataccttgagagaaaccataaaatttatgtataccgactgggccgacagggataaccccgagacccggagaaaaactctggtcgctctgttcaccgatcaccaatgggtcgagccatctgtggttacagccgacttacatgcaagatacgggagcccaacgtacttttatgctttctatcaccattgccagtcacttatgaaacctgcatggtccgatgcagcccacggcgacgaggtgccctatgtgtttggagtgcccatggtgggacccaccgatttatttccctgtaacttctcaaagaacgacgtgatgctcagcgccgtggtgatgacctattggacgaacttcgcaaagacaggtgatccaaacaaacctgttccacaagacaccaagttcatacataccaaggccaaccgattcgaggaggtcgcttggagcaagtataatccgagggaccagttatacttgcatattggattgaagccacgggtgcgggatcattaccgagctactaaagtcgccttctggaagcacctggtgccacacttgtataacctacacgacatgttccattatacctccacgacaaccaaggtgccgccaccggatactacacatagctcccatattaccaggagaccaaatggtaaaacctggtctacaaaacgccctgcaatatcacccgcatatagcaacgaaaatgcacaggggtcctggaacggggatcaggatgccggaccattactggtggagaacccgagggactattctaccgagctatccgtgacaatagcggtgggagcgtcactcctattcctgaatgtgctggcattcgcggcactgtactaccggaaggacaagcgacggcaggaaccactccggcagccatccccacaacgcggagccggagctcctgagctgggcgctgcgccagaggaagagctggcggcactccaactaggtcctacccaccacgaatgcgaagctggcccacctcatgatacattaagactgactgcgctgccagattataccctgacgctaagacgcagccccgacgatatccccctgatgacaccaaacaccataacgatgatcccaaactcacttgttggcctccaaacattgcatccctacaatacatttgcagcaggctttaacagcaccgggttgccccatagccacagcacaacccgggtctag

SEQ ID NO: 232446 - DNA, 1542 bp, synthetic construct
  misc_feature 1..1542: note = Description of Artificial Sequence: Synthetic coding sequence
  source 1..1542: mol_type = other DNA
atgtggctgcggctgggacctccttctctaagccttagcccaaagccaactgtaggacgatcactctgccttaccttgtggttcttgtcactcgccctgagagccagcacccaggctcctgcgccaaccgtgaatacgcacttcggtaagctgaggggcgctagggttcctctgccgagtgaaatcctcgggcctgtggatcagtatctgggggtcccttatgcagccccacccattggagaaaaacgtttcctgcctccagagccccctcccagctggtcgggaatcagaaatgctacccattttccccctgtgtgtcctcagaacatccacacggcagtccctgaggttatgttgcccgtgtggtttactgccaacctggatatcgtggccacatatattcaggagcctaatgaggactgtctgtatcttaacgtttacgtccccaccgaggatgacatacgcgatagtggggctaaacccgtcatggtgtacattcatggaggctcctacatggaaggtacgggaaatatgatagatggatcgattcttgcgtcttatggcaatgtcatcgttataacactgaattaccgggttggggtgctcgggttcttgagcacaggggaccaagctgccaaaggtaactatggcctcctagaccagatccaggccctgcgttgggtttccgagaatatcgcttttttcggcggagaccctcgcagaattactgtttttgggagtggaatcggagcctcatgtgtatccctgctgactttgtcccaccatagcgaagggttgttccagcgggctatcatccagtccggttcggccctctcttcttgggctgtgaattatcagcctgtcaagtacacttctttgctggctgacaaagtagggtgcaatgtgctcgataccgtggatatggtggactgcctccgccagaaatccgccaaggagcttgtggaacaagacatacaacctgccagatatcacgtggcctttggacccgtaattgatggggacgttatcccagacgacccagaaatcctgatggagcagggtgaattcctcaactacgatatcatgctcggggtgaatcaaggagagggcttgaaattcgtcgagggcgtcgtggacccagaagacggagtgtcaggaactgacttcgattacagtgtgagtaacttcgttgacaacctttatgggtatccggaaggaaaggatacgctgcgcgaaaccatcaaatttatgtatactgattgggcagatcgcgacaaccctgaaaccagacggaaaacccttgtggcattattcacagaccaccagtgggttgagcccagcgttgttaccgccgacttacacgctagatacgggtctcctacctatttctatgccttttaccaccactgccagtcactgatgaaacctgcctggagtgatgcagcccatggggatgaagtgccttacgttttcggggtgcccatggtggggccaacggatctgtttccctgtaacttctcaaaaaatgacgtcatgttgtag

SEQ ID NO: 232447 - DNA, 2427 bp, synthetic construct
  misc_feature 1..2427: note = Description of Artificial Sequence: Synthetic coding sequence
  source 1..2427: mol_type = other DNA
atgtggctgaggcttgggccaccaagtcttagcctgagcccaaaacctacagttgggagatccttgtgcctaacactctggttcttatccctcgccctccgcgcatccacccaggcgccagctccaactgttaatacccattttggtaaactaaggggcgcaagggttcccctgcccagcgaaatactgggacctgtggaccagtatctaggagttccttacgcagccccacccatcggcgaaaagcgatttcttccacccgagcctccaccttcctggtctggtatccgtaatgcgacccactttccaccagtatgcccccagaacatccacacggcagtccctgaggttatgctgcctgtgtggtttacagccaacctcgatatagtggcgacctatattcaggagcctaatgaggattgcttgtacctgaatgtttatgtcccgactgaggatgatatacgagacagtggggctaagcctgtcatggtctatattcacggcggttcatatatggaggggaccggtaacatgatagatggctcgattctcgcaagttacggcaatgtgatcgtcatcactttgaactaccgtgtgggcgtgctaggctttttgtctaccggggatcaggcagcgaaggggaattatgggcttctggaccagatccaggctctgaggtgggttagtgagaatatcgcttttttcggcggtgacccacggaggatcactgttttcgggagcggaattggggcttcctgtgttagcctgttaacactgtctcaccactccgaaggcctattccagagagccatcattcagagtgggagcgctctgagtagctgggcggtcaactaccagccggtgaagtacacttccctgctagctgataaggtgggatgtaatgtgttagataccgtggatatggtcgactgcctcagacagaagtccgcgaaggaacttgtggaacaggatatccagccggctcgctatcacgtcgcgtttggtcctgtgatcgatggggatgtgattcctgatgaccctgaaatcctgatggagcagggggaatttctgaactatgatataatgctgggggtgaatcaaggagaagggctgaagtttgtggaaggggtggtcgaccccgaggatggcgtgtctggcaccgattttgactacagtgtgtctaacttcgtggataacttgtatggatatcctgaaggcaaggatactctgcgggagaccatcaaattcatgtatacagactgggccgatagggacaacccagaaaccagacgtaaaaccttggtcgcactgtttactgatcaccagtgggtagaaccatcagtggtgaccgcggacctccacgcgcgttatgggagccccacttacttttacgctttttatcaccactgccaaagcctgatgaaaccggcatggagcgatgccgctcacggtgatgaggttccctacgtattcggggtccctatggtaggtcccacggacctttttccatgtaacttcagtaagaacgacgtaatgctgtcggcagtggtgatgacttactggactaatttcgcgaagaccggagatcctaataagccggttcctcaggacacaaagttcatacatactaaggccaatcgtttcgaggaggtggcatggagcaagtacaacccgagagaccaactgtacttacatatcgggctgaagccgcgagtaagggaccactatagggcgactaaggtcgccttctggaaacacctagttccgcatctgtacaacttacacgatatgttccactacacgtctactacaaccaaagttccccctcccgacacaacccattcttctcatattactagacgcccaaacggaaagacttggtccacaaagcgccctgccatcagtcccgcatactccaacgagaatgctcaaggcagttggaatggtgatcaggatgcagggccactgctggtggagaacccccgtgactattccactgagctgtcagtgaccatcgccgttggagcatctttgctgtttctgaatgtgttggcttttgcagctctgtattataggaaagacaaaagacggcaggaaccgttacggcagcctagcccccagagaggcgctggcgctcctgagcttggggcagcaccggaggaggagctggcggctttgcagttggggccaacccatcacgaatgcgaggcagggccaccgcacgacaccctaaggctgacagccttaccagactacacattgactctgcgtagatcccctgatgacatacctctgatgactccaaataccattactatgattcctaacagcttggtgggccttcagaccttacacccttataacacgtttgccgctggcttcaacagtacaggcctcccccactctcattcgacgaccagggtatag

SEQ ID NO: 232448 - DNA, 1056 bp, synthetic construct
  misc_feature 1..1056: note = Description of Artificial Sequence: Synthetic coding sequence
  source 1..1056: mol_type = other DNA
atgcttcctgtctggttcacagccaacctggatattgttgctacctacatccaggaacctaatgaagattgtctctatctcaacgtgtacgtacccactgaggatggctccggtgcgaagaaacagggcgaggatctcgccgataacgacggagatgaggatgaggatatccgggactccggggctaaacctgtgatggtgtatatacatgggggatcctacatggagggaaccggtaatatgatagatggctccatcttggctagctacggcaatgtaatagtgatcaccctgaattaccgggtaggggtgctcggattcctttctacaggagatcaggccgcaaagggtaactacggcctgctcgaccagattcaagctctgcgttgggtgagcgagaacattgctttctttggcggagatccacgaaggattacagtctttggctcaggaatcggcgcatcatgcgtgtcgctgctgacattgagccaccacagtgaagggctgtttcagcgggctatcatacagtccggcagcgccctatcttcgtgggcggtgaactatcagcctgttaagtatacaagtttgctggccgataaggtgggatgcaacgtattggatactgttgatatggtcgattgcctgaggcaaaagtctgcgaaagagctggtagaacaggacatccagcccgcaaggtaccatgtggccttcggtcctgtcatcgacggagatgtgattccggacgaccctgagatcctgatggaacagggtgagttccttaactacgacatcatgctgggagtgaaccaaggagagggtctcaaatttgtggagggtgtagtggatcctgaagacggagtgtccggcaccgacttcgactacagcgttagcatcctctggaccatctgtatggctattctgcgggtccggacaccatgcgagcgtcctagttcttcctgtatccagaccggtcagaccgtcaccacactgaggcccgctgtcaaacactggtggcattcatctctaactaccagcggttggtccccccagtggtag

SEQ ID NO: 232449 - DNA, 771 bp, synthetic construct
  misc_feature 1..771: note = Description of Artificial Sequence: Synthetic coding sequence
  source 1..771: mol_type = other DNA
atgttacgaccccaggggcttctgtggctgcccctcctattcacatccgtttgtgtgatgctcaacagcaacgtcctgttatggataactgccctggcaattaagttcaccctaatcgactcccaggcacagtacccggtggtgaacacgaactacggaaagattcagggtcttagaacccccctaccatccgagattttaggtcccgtggaacagtatctgggggtcccatatgccagccccccaacaggagagcgccgtttccagcctccagaatccccgtcttcctggactgggattcgaaacgcaacccagttcagtgctgtgtgcccacagcacctggacgagagattcctgctgcacgacatgcttcctatctggttcacaacgtctctggacacactgatgacttacgtgcaggaccaaaacgaggactgcttgtacttaaatatctacgttccaatggaggacggcacgaacatcaagcgaaatgccgatgatataacaagtaatgatcacggggaagataaggatatccacgagcagaacagcaaaaagccagtcatggtgtacattcacggcggttcctatatggagggtactggcaatatgattgatggctctatcctggcatcctatgggaatgtcatcgttatcacaattaactaccgtctgggcatactcggcatgcaggaagccagactgtgcggatcgagcaaaatgtttaattattttaaatccccatttaccaacctgatcaattttttttag

SEQ ID NO: 232450 - DNA, 2451 bp, synthetic construct
  misc_feature 1..2451: note = Description of Artificial Sequence: Synthetic coding sequence
  source 1..2451: mol_type = other DNA
atgctgagaccccagggtttgctttggctacctctcttgttcaccagtgtttgtgtgatgctgaacagcaacgtgttactctggatcacagctctggcaataaagttcactcttatcgacagccaggcacagtaccccgtggttaatactaattacggtaagattcagggattgagaacacctctgccctcagagattctggggcctgtggagcagtacctgggtgttccctatgcgtccccgccaacaggggaaaggagattccagccacctgagtcaccctcctcgtggacagggattcggaacgccacccaattctctgccgtgtgcccgcaacacctcgacgagagattcttgctccatgatatgctgcctatctggttcaccacctctctcgatacactaatgacgtatgtgcaagatcagaacgaagactgtctgtacctcaatatttacgtcccaatggaggatgatatccacgagcaaaacagcaaaaagccggtgatggtttacattcacggagggtcttacatggaaggcactggaaacatgatcgatggttcgatcctggcctcttatggcaacgtcatcgtcatcacaatcaattataggctgggaatcctaggatttctgtcaacaggcgatcaggccgcaaaggggaactatggactactggatcagattcaggcactgaggtggattgaggaaaacgtcggagcttttggaggcgatccaaaacgggtgacgattttcgggagtggggctggcgcaagctgtgtaagcctgttgacgctatctcattacagcgagggcctctttcagaaggcaattattcagtcaggcaccgctctaagtagttgggccgtcaactaccaacccgctaagtacaccaggattctcgcagataaagtgggatgtaatatgttggacaccaccgatatggttgaatgtctgaaaaataaaaattataaagagcttatccagcaaacaataacccccgcaacttaccacatcgcgtttggcccagtcatcgacggggacgtaataccagacgatcctcagatcctgatggaacaaggggaattcctgaattatgacattatgctcggtgtgaatcaaggagaaggtctgaaattcgtcgacggtatcgttgataatgaagatggcgttacacccaacgacttcgacttctctgtgtccaatttcgtcgataacttgtatggctatccagagggcaaggacacccttcgggagacgatcaaattcatgtatactgactgggcagacaaagagaaccctgagacgcgtcgcaagactctggtggccctgttcaccgatcaccagtgggttgccccagctgtggcaacagctgacttacacgcccagtatggctcccccacctatttttacgctttttatcaccactgtcagtccgagatgaaacctagctgggcagacagcgctcacggagacgaggtgccatatgtttttggcattcccatgatcggtccaaccgagttatttagctgcaatttctcaaagaatgatgttatgttgtcggcagtggtcatgacctattggacaaacttcgccaagacaggcgacccaaatcagcctgtgccacaagacaccaagttcatccacaccaagcctaataggttcgaagaagtcgcctggtctaaatacaatccaaaggaccagctgtacctgcatattgggctcaagcccagagtccgtgatcattatagggcaaccaaggtggctttttggttagaactcgtccctcacctccacaatctcaacgagattttccagtatgtgtccacaaccactaaagtgcctccgccagacatgaccagtttcccctacgggacccgacgaagccctgccaagatttggcctacaacgaagagacccgctatcacaccagcaaacaaccccaaacattcaaaagacccacacaagaccgggccagaggatactacagtgctcatagaaacaaagcgagactatagcaccgaactctccgttaccatagccgtcggcgcaagtttactgtttctgaatatactggccttcgcagcactttattacaaaaaagataaaagaaggcatgagacccaccgacaccccagccctcagcgtaataccaccaatgacataacacatattcaaaatgaagagataatgagtctgcaaatgaagcagttggaacatgaccacgaatgcgaatccctgcaagctcacgatacactaagactgacctgccctcccgactacaccctaaccctcagacgcagccctgatgacatccccttcatgacaccaaacacaatcactatgatccctaataccttgatggggatgcagccactgcatactttcaaaacattctccggcggacaaaactctacaaaccttccacacgggcactccaccacccgtgtgtag

SEQ ID NO: 232451 - DNA, 2451 bp, synthetic construct
  misc_feature 1..2451: note = Description of Artificial Sequence: Synthetic coding sequence
  source 1..2451: mol_type = other DNA
atgctgaggccacaggggctgctctggctccctctcctctttacaagcgtctgtgtgatgttaaattccaatgtgttgttatggatcaccgccctggcaatcaagttcactctcatcgacagccaggcgcagtatcctgtggtgaacacaaattacggaaaaatccagggtttgagaaccccgctccccagtgaaattttgggcccagtggagcagtatcttggggttccctacgctagcccccctactggggagcgcagattccagcctccagaatcgccctcctcctggacagggattcgaaacgccacgcagttttccgcagtgtgcccacagcacttggatgaaaggtttttgctccacgacatgttgcctatctggttcaccacctcgttagataccttgatgacctatgtgcaggatcagaatgaggattgcctttatctgaacatctacgtgccaatggaggatgatatccacgaacagaattctaagaaacctgttatggtgtatatccatggaggatcctacatggagggaaccggcaacatgattgatgggtctatcctggcgtcttatggaaacgtaatcgtcattactattaattaccgcctaggcattctaggcttcctttctactggtgaccaggctgcgaagggtaactatggccttttggatcagatccaggcgctgcgctggatcgaagagaacgtcggagcattcggcggtgatccgaagagggtaaccatcttcggctccggggctggggcatcctgcgtgagcctgctgacgctgtcccattattctgaggggctgtttcagaaggccattatccaaagcgggacggccctctctagctgggctgtcaattaccagccagctaagtatactagaatcctggccgataaagtcggctgcaatatgttggatacaaccgacatggtggagtgcctgaaaaataaaaactacaaagagctgattcaacagaccattacacccgcaacttatcatatcgccttcggacccgtgatagacggagatgttatcccagacgacccgcagatattaatggagcagggagaatttctcaattacgacattatgctcggggttaaccagggtgaagggctgaaattcgtggacgggatcgtcgataacgaagatggagtcacaccaaatgacttcgacttctcagtgtccaattttgtcgataatctgtatggatacccagagggcaaggatacccttcgagaaacaattaagttcatgtacacagactgggcggacaaggaaaaccccgagactaggcgtaaaacactcgtcgctctgtttacagatcaccagtgggtcgcccctgccgtagccaccgcagatctccacgcccagtatgggagccccacatacttctatgcattctaccaccattgccaatccgagatgaagccctcttgggcggattccgctcacggcgacgaggtaccctatgtttttggcattcccatgattggcccaacagaattattcagctgtaatttcagtaagaacgatgttatgctgagcgccgtcgtaatgacatattggaccaactttgccaaaacaggcgacccaaatcagcctgttccacaggacaccaaattcattcacaccaagccaaaccgcttcgaggaagtggcctggagcaaatacaaccccaaagatcagctgtacctgcacatcggcctcaaacctagagtgcgcgaccattacagagccactaaagtagccttctggctcgagcttgttccacacctgcacaacctgaacgagatctttcagtatgtcagtactacaaccaaagtacctccgccagatatgacctcattcccgtacgggacacgacgatcacccgctaaaatctggcctacaacaaagcggcctgccattactcccgcaaacaaccccaaacactcaaaagatccacataaaacaggccctgaggacactacagtcttgatcgaaaccaaacgcgactattcaacggaactctcagtcaccatagccgtcggagcctctttgctgtttttgaatatcctggctttcgcggctctgtactacaagaaggataagaggcggcatgaaacccaccgccatcccagccctcagaggaataccacaaatgacatcacccacattcagaatgaggagatcatgtcacttcagatgaagcaactcgaacacgatcatgagtgtgagtctcttcaggcccacgacacactgagattgacgtgtccgccagattatacgctgacattaagaagaagccctgatgacattccattcatgacccccaacactattactatgattcccaatacgctcatgggaatgcagcccctccatactttcaagactttcagcggaggccaaaatagcacgaatttgccccacggtcactcgacaactcgcgtgtag

SEQ ID NO: 232452 - DNA, 2622 bp, synthetic construct
  misc_feature 1..2622: note = Description of Artificial Sequence: Synthetic coding sequence
  source 1..2622: mol_type = other DNA
atgttacggccacaagggctgctatggctgcctctgctctttaccagtgtgtgcgtgatgctcaacagcaacgttttgctgtggatcactgcgctggccataaaattcacactcatagacagccaagctcagtaccctgttgtcaataccaactatgggaagatccagggtctgaggaccccccttcctagcgagattctggggccagtagagcagtaccttggggtgccctacgcaagtccacctacaggcgaaagacggttccagccacctgaatcgccatcctcctggacaggcatacgcaacgctacccagtttagtgccgtgtgcccccagcatctggacgaacgcttcctactccacgatatgttgcctatctggttcaccacgagcttggatacactcatgacctatgtgcaggatcagaacgaagactgcctatatttgaatatctatgtcccaatggaggatggaaccaatattaaacgaaatgcggatgatattacatcaaatgatcacggcgaggataaagacattcacgagcagaacagcaagaaaccagttatggtgtacatccacggcggtagctacatggaaggcactggcaatatgatagatgggtccatcttggcaagttacggtaatgtcatagttattaccatcaactatcgactgggaattctggcccaaaacaccttggctcacggtaattgcaagcataggtgtcaactgcatctgcaggcacctcgcgactgtaagtctgcatatccttttcggaatgaggacgaaattaggggcttcctgagcacaggtgatcaagccgcaaagggcaattatggccttttagaccagatccaggctctccggtggattgaggagaatgtgggcgcttttggcggtgatcccaaaagagttaccatcttcggaagtggcgcaggcgcaagctgtgtgtctctgcttactctgagccattactctgagggcctttttcagaaagccatcattcagtccggcacagcactctcttcttgggctgtgaattatcaacctgccaagtacaccagaatccttgccgacaaggtggggtgcaatatgctcgacacgaccgatatggtggaatgtctgaaaaacaagaattacaaggaacttattcaacagactattacaccagccacttaccacatcgcattcggccctgtgatcgatggagatgtgatacctgatgacccacagattttaatggagcagggagagttcctgaactacgacatcatgctgggcgtgaatcagggcgaggggctgaagttcgtcgacggaatcgtggacaacgaggacggtgtgacccccaatgatttcgacttttcagtgtccaattttgtggacaacttatacgggtaccctgaaggaaaagatactctgagagagacgatcaagttcatgtacacagattgggcagacaaagagaaccctgaaaccagacgaaaaaccttagtggcactatttacagatcatcaatgggttgcccctgctgtagccacggctgacctccacgcccagtacgggagtcctacctacttctatgcgttctaccatcactgccagagcgaaatgaagcctagctgggccgactctgcacacggggacgaggtgccatacgtattcggaatccctatgattggccctacagagctgttctcctgtaacttcagcaagaatgacgttatgctgagcgcagtggtcatgacatattggaccaacttcgccaagaccggagatcccaaccaacccgtacctcaggatacgaaatttattcatacaaaaccaaaccgcttcgaagaggtggcctggtccaagtataatcccaaagatcagctctatctgcatattgggctgaaacctcgagtacgtgaccattaccgggctacaaaggtggctttttggctcgaattagtgcctcatttacataacttaaatgaaattttccagtatgtttctacgaccacgaaagtgcctcctccagacatgacatcgtttccatatggaacacgcagatcaccagccaagatttggcccacgaccaagagacctgccattacaccagctaataatcctaaacattccaaagacccacataaaaccggccctgaggacacgacagtcctcattgagactaaacgcgactactccaccgagctcagtgtgaccatcgctgttggagcctctttgctgtttttaaacatcctcgcttttgccgctctttactataagaaggacaaacggagacatgagacccacaggcaccccagtccacaaaggaataccactaacgatattacacacatccagaatgaagagatcatgagccttcagatgaagcagctggagcacgatcacgaatgtgagtctctccaggcgcacgatacattgcgtctgacatgtcctcctgactacacccttaccctcagaagatctcctgacgacattccatttatgactccgaataccatcacaatgatcccgaacacgctgatgggcatgcagccccttcatacctttaaaactttcagcggagggcagaacagtacaaatctcccacacggccactcgactacacgggtgtag

SEQ ID NO: 232453 - DNA, 1947 bp, synthetic construct
  misc_feature 1..1947: note = Description of Artificial Sequence: Synthetic coding sequence
  source 1..1947: mol_type = other DNA
atggtttatatccacggaggctcttacatggagggcacgggcaatatgatcgacgggagtattcttgcatcatacggaaacgttattgttattaccatcaattaccgattaggcattttaggattcctttctaccggcgatcaagcagccaagggcaactacggccttttggaccagatacaggcccttaggtggatcgaagagaatgtcggggcatttggaggggaccccaagagggtaactatctttggatctggtgccggtgcctcgtgcgtgagcctcctgacattgtctcattactcagagggtctgtttcagaaagcgattatacagagtggcacggccctgtcttcctgggcagtaaattaccagcctgccaaatatactaggatcttagcggacaaagtcggatgcaatatgctcgacacaactgacatggtggaatgtctgaagaacaagaactacaaggagctgattcaacaaaccatcacccccgctacgtatcacattgcctttggacctgtgatcgacggggacgtaatccccgacgatccccaaattctcatggagcaaggtgagttcctcaattatgatatcatgctgggggtgaatcagggagagggtctgaagttcgtggacggtatagtggataacgaggacggggttactcccaacgattttgacttctctgtgtctaattttgtggataacctctacgggtaccctgagggtaaagacacacttcgggagaccataaagttcatgtatactgattgggccgacaaagagaaccctgagacccgcagaaagactctcgtggcactttttactgatcaccaatgggtcgctccggctgtcgccacggctgatctgcacgcccagtacgggtcccccacatatttctacgcattttaccaccactgtcagtctgagatgaagccttcctgggctgactcagcccatggcgacgaggtgccatatgttttcggaattcctatgatcggtccaaccgagctgtttagttgcaatttcagtaaaaacgacgtgatgctgtcagctgtggtgatgacttactggactaacttcgcgaagacaggcgacccaaaccagcctgtacctcaagataccaagttcattcataccaaacccaacagattcgaagaggttgcctggagtaagtataaccccaaggatcagctgtacttacacattggcttaaagccgagggtaagagaccattatcgagccacgaaagtcgccttctggctagaacttgtgcctcatcttcacaatctgaacgaaatcttccagtatgtcagcacaacaactaaggtgccacccccagacatgaccagcttcccctacggcacacgtcgctcgccagctaagatctggccaacaactaaacgtcctgcgattaccccagccaacaaccccaagcattctaaagatccccataagacgggacccgaggacacaacagtgttgatcgaaacaaagcgggactattctacagaattatctgtaacaatagccgtcggggctagcctgttgtttcttaatattttggctttcgcagccctatattataagaaggataaacggcgtcacgagacccacagacacccaagcccccagcgaaatacaacgaacgacatcacacatatacagaatgaggagattatgtccctgcagatgaaacagcttgagcatgatcacgagtgcgagagtttgcaggcacacgatacactgagattgacctgtccgcctgactacactctgacgctgcggcgaagcccagatgatattccgtttatgacccctaatacaattactatgatccccaacacattaatgggaatgcagcccctgcacacattcaagactttcagcggcggacagaactctactaacctgccacatggccattctaccacgagagtgtag

SEQ ID NO: 232454 - DNA, 711 bp, synthetic construct
  misc_feature 1..711: note = Description of Artificial Sequence: Synthetic coding sequence
  source 1..711: mol_type = other DNA
tgaaactccaacgtgttgctgtggattaccgccctggctatcaagtttacactgattgactcccaggctcagtatcctgtggtcaatactaattatggaaagatacaaggactcagaactcccctcccctcagagatcttgggaccagtggagcaatatctcggagtgccgtatgcgagccctcctacaggcgaacggcgattccagccaccggaaagtccaagcagctggactgggatcagaaatgcgacccagttttcggctgtatgtcctcaacacttggatgaaaggttcctactgcatgacatgctgccgatatggttcacgacatctttggataccctaatgacttacgtgcaggatcagaacgaagactgtctttacctcaatatttatgtcccaatggaggacggaacaaacatcaagaggaacgcagacgatattacttcaaatgatcatggggaagataaggatattcatgaacagaactcaaaaaagcccgttatggtgtacattcacgggggatcctacatggaaggaaccggtaatatgatcgacgggagtatcttggccagctacgggaacgttatagtgattaccatcaattacagactcggcatcctcgggatgcaggaggctaggctgtgtggcagctccaagatgttcaattatttcaagagtccattcaccaatttgattaacttcttctag

SEQ ID NO: 232455 - DNA, 2511 bp, synthetic construct
  misc_feature 1..2511: note = Description of Artificial Sequence: Synthetic coding sequence
  source 1..2511: mol_type = other DNA
atgctccggcctcagggcttactctggctgcccctgttatttacctctgtctgcgtcatgctaaacagcaacgtcctgctgtggattactgcccttgcaattaagttcacactgatcgactcccaagcccagtatcctgtggtgaacaccaactacggcaagattcaggggttgcgcacacctctcccaagtgagattttgggtccagtggagcagtacctgggcgttccctatgcaagcccccctacaggagagcgccgttttcagccacccgagtctcctagctcttggacaggaatccgtaacgccacacaattcagtgccgtgtgcccacagcatctcgatgaacgattcctcctgcacgatatgctcccaatttggttcactacctcacttgacacgctcatgacctatgtccaggaccaaaacgaggattgtctctacctgaatatatacgtgcccatggaggacgggacaaacatcaaaagaaacgccgatgacataacctccaatgaccacggtgaggataaggatatacacgaacagaattccaagaaacctgtgatggtctacattcacggcggatcatatatggaggggacagggaacatgatcgacggcagcatcctggctagttacggcaacgtgattgtaatcacaatcaactaccggctgggaattctcggttttctgtccaccggagaccaagctgccaaaggcaactacgggctgcttgatcagattcaagcactgaggtggattgaggagaacgtgggggcatttggaggcgatcctaagcgggtgaccatctttggatcaggagctggtgcatcctgcgtgtcccttctgactctgagtcactacagcgagggactcttccagaaggccatcatccaatccggtaccgctctgtcatcatgggcggttaattatcaaccagcaaaatacacccggattttagctgataaagtgggatgtaatatgctggacactactgacatggtggagtgtttgaaaaacaagaattacaaggaactgattcagcaaacaatcacacctgcgacctatcacatagctttcggtcccgtcatcgatggtgacgtaatccccgacgatccccaaattttaatggaacagggtgagttcctgaattatgacataatgctcggtgtgaatcagggagagggcctgaagtttgtggatgggatcgtagataacgaggacggggttacccctaatgactttgactttagtgtgagtaactttgtagacaacctgtatggttaccctgaaggcaaagataccctacgggagacaataaaattcatgtatacagactgggccgacaaagagaatccagaaaccaggagaaaaacactcgtggctctgtttacagatcaccagtgggtcgccccagcagtggccacagcggacctgcatgcccagtatggctctccaacttacttctacgctttttatcaccactgtcagtctgaaatgaaaccaagctgggccgattcagctcacggagatgaggtgccttacgtatttggcatccccatgataggcccaacagagcttttctcctgcaatttttctaaaaacgacgtaatgttgagtgctgtggtaatgacctactggacaaatttcgcaaagactggcgaccctaatcagcctgtgccccaagataccaaattcatccacaccaagcctaacagatttgaagaagtagcctggagtaagtacaacccaaaggaccagctttatctgcacattggcttaaagccaagggtgagagaccactatcgtgccactaaggtggccttttggcttgagctggtgcctcacctccacaatttgaacgagatatttcaatatgtgagcaccaccaccaaggtcccccctcctgatatgacaagttttccatacggcacccgcagatcacctgccaagatctggcccactaccaaaaggcctgccattacaccagccaataatcctaagcacagtaaggacccacacaagaccgggccagaagataccacggtcctgatcgagaccaagagggactactccacagaattgtcagtcacaattgctgtaggagcttccctcctgttcctgaatattctggcattcgccgctctgtattacaagaaggataaacggagacatgagactcatcgccacccaagtcctcagcgcaatacgactaacgacattacgcacatacagaacgaggaaattatgtctctgcaaatgaaacagctggagcatgatcacgagtgtgagagcctccaggctcacgacacacttagactgacctgtccccctgattatacacttaccctgagacgtagccctgatgatatccctttcatgactccgaacacaattacaatgattcccaacacgctcatgggcatgcagcctctgcacacctttaagaccttttccggaggtcaaaacagcaccaatctgcctcatggacactccactacacgcgtgtag

SEQ ID NO: 232456 - DNA, 1824 bp, synthetic construct
  misc_feature 1..1824: note = Description of Artificial Sequence: Synthetic coding sequence
  source 1..1824: mol_type = other DNA
atgatcgcaaggtgcttgttggcggttaggtctctgaggagggtcggcggtagcagaatattgcttagaatgacccttggacgggaggtgatgagcccactgcaggccatgtcaagctatacagttgccggacgaaatgtcctcagatgggacttgtctccagaacagatcaagacccgcacagaagaacttatcgtgcagacaaaacaagtgtatgacgccgtcggtatgctggggatcgaagaagtgacatatgagaactgtctgcaggcactggctgatgtggaagtcaagtatattgtcgagagaactatgttggattttccccaacacgtttctagtgacaaggaagtcagggctgcctctactgaggctgacaaaaggctgtctcggtttgacatcgagatgtctatgcgcggagacatcttcgagagaatcgttcatctacaggaaacatgtgatttgggcaagataaaaccagaagccaggcgatatctagagaagagtatcaaaatgggaaaacgaaatggacttcatctcccggagcaagtacagaacgaaatcaaatcaatgaagaagcgaatgtcggaactgtgcattgactttaacaaaaatctgaacgaggatgacaccttcttggtgttttctaaagccgagctaggggcactgccggacgacttcatcgacagcctggaaaagacggacgacgacaagtacaagataaccctcaaatatccccactacttccctgtgatgaagaagtgttgcattccggaaacaaggaggcggatggagatggccttcaacacaaggtgtaaggaggaaaacacgatcattcttcaacagctcttaccgctgcggacgaaggtcgccaaacttcttggatacagtacccatgcggactttgtcctggagatgaatactgccaagagcacgagcagagttaccgcgtttctcgatgacttaagtcagaagctcaagcccctcggggaagccgagcgggaattcattctgaacctgaagaagaaagagtgtaaggatcgcggattcgaatacgatggaaagattaacgcatgggatctgtactattacatgacccagactgaggagctcaagtacagtatagaccaagagttccttaaagaatacttccctatcgaggtcgtgacagagggtctgctgaatacctatcaggagctgctcggcctttccttcgagcaaatgactgatgcacatgtgtggaacaagtctgtcaccctgtataccgttaaggacaaggccactggggaggtgctggggcagttttacctcgacttatacccgcgagaagggaaatacaaccacgccgcttgctttggactgcaaccagggtgccttttgcccgacggttccagaatgatggccgtggctgccttggtggtaaactttagccaaccagttgctggaagaccttcactcctcaggcatgacgaagtcagaacctatttccatgagttcggccatgtcatgcatcagatttgtgcacaaaccgacttcgccaggttctctgggacaaacgtcgagacagatttcgttgaagtcccctctcagatgttggagaactgggtgtgggatgtggattctctgcgacggctgagtaaacactacaaggatggctcgcccattgcagatgatctgcttgaaaagctggtggcctccagactggttaataccgggctattgacgctgaggcaaatagtcctgagtaaggttgatcagtcactgcacacaaacacatctctggacgccgcaagcaatatgcccaacacagctcagaaatactag

SEQ ID NO: 232457 - DNA, 2115 bp, synthetic construct
  misc_feature 1..2115: note = Description of Artificial Sequence: Synthetic coding sequence
  source 1..2115: mol_type = other DNA
atgatcgcacgctgcctgttagccgtgcgtagtttaaggcgggtgggtggatcacggatccttctcaggatgacacttggaagggaagttatgtcgccgctccaggctatgtcctcatatacagtcgccggaaggaacgtgctgagatgggatctaagcccagaacagatcaagacgcgcaccgaggaactcatcgttcagactaagcaggtatatgacgcagtgggtatgttgggaatcgaggaggttacatacgagaactgcttacaggccctggctgacgtcgaggtcaagtacattgtggaaaggaccatgctcgatttcccccagcatgtatcttcagacaaagaagtaagggccgcttcaactgaggcagataaacgactctctagatttgacattgaaatgtccatgagaggcgacatttttgagcgcatagttcatctgcaggagacttgcgatttgggcaaaattaaaccagaagctaggagatatttagaaaaaagcatcaaaatgggcaagagaaatggactccacctgccagagcaagttcaaaacgagatcaagtctatgaagaaaagaatgtcagaactctgcattgacttcaacaaaaatttaaatgaagacgataccttcctcgtcttctctaaggccgagcttggagccctgcctgacgatttcatcgatagtcttgagaagaccgatgacgataagtacaagataacactaaagtacccacactacttccccgtcatgaagaaatgctgcatccctgagactcggagaaggatggaaatggcatttaacacgaggtgcaaagaggaaaataccataattttacagcaacttcttccgctgaggacgaaggtggctaagttgctgggctattccacgcacgccgattttgtgctcgagatgaataccgccaaaagcacttctagagtgacagctttccttgatgacctctctcaaaagctcaaaccacttggcgaggctgaaagagaattcattctcaatttaaaaaagaaagagtgtaaagacaggggcttcgagtacgacgggaagatcaatgcttgggatctgtactactatatgacacagaccgaagaactcaagtactctatcgatcaagagtttctgaaggagtactttcccattgaagtagtaactgagggtctgctgaacacttaccaggagctcctgggcctgagttttgaacagatgactgatgcacacgtctggaataaatccgtgacactctacactgtcaaggataaagccaccggggaggtcttaggccaattttacctagacctgtaccctcgggagggcaagtacaaccatgctgcttgttttggactgcagccagggtgtctattgcctgacgggtcccgcatgatggccgtagctgccctcgtggtcaatttcagtcagccagtcgctgggagaccctccctccttcgtcatgacgaggttagaacatactttcacgaattcggccacgtaatgcatcaaatctgtgcccaaaccgactttgcgagatttagcggaaccaacgttgagacagacttcgtggaggtcccgagtcagatgctggagaattgggtgtgggacgtagatagtctccgacggctgagtaagcattacaaggatgggtcccctatcgctgatgacctgctggagaaacttgttgcgagcaggcttgtgaatactggcctgctgaccttgaggcaaatcgtgttgtccaaggtggaccaaagcctccacacaaatacttccctcgacgcggcttctgaatacgcaaaatactgtagtgagattctcggtgtagcagcaactcctggaactaacatgcctgctaccttcggacatctggcaggtggttatgatggccaatattacggatatttatggagcgaggtttttagcatggatatgttttatagctgttttaagaaagagggcatcatgaatcctgaggttggaatgaaatatcgcaacttgatacttaagccgggtggctctcttgatgggatggacatgctgcataacttcctgaaacgagaaccaaaccagaaggcattcctgatgtcccggggactccacgcaccctag

SEQ ID NO: 232458 - DNA, 1803 bp, synthetic construct
  misc_feature 1..1803: note = Description of Artificial Sequence: Synthetic coding sequence
  source 1..1803: mol_type = other DNA
atgttggatttcccacaacatgtgagctccgacaaggaggtgcgagccgcatccacggaagcagataagcgcctctctaggtttgatattgagatgagcatgagaggagatatatttgagcgcatcgttcacctgcaggaaacctgcgacttaggcaagataaagcctgaggcaaggcgatacctcgaaaaaagcatcaaaatgggtaaaaggaatgggctgcacctgcccgaacaggtccaaaacgagattaagagcatgaagaagagaatgtccgagctgtgtatcgattttaataagaatctaaatgaggatgatacctttcttgtattcagtaaagcagagctgggggctctcccggatgatttcatcgatagtctggaaaagaccgacgacgacaaatacaagatcacacttaaatatccccactacttcccagtgatgaagaagtgttgcatacccgaaactcgacgcaggatggagatggccttcaacacccggtgcaaggaagaaaacacaatcattcttcaacagctcctgccgctaaggaccaaagtagctaagctgctcggatatagtacgcatgccgattttgtgctagaaatgaatacggcaaagtcaacaagccgggtgactgccttcctagacgacctcagtcagaaactcaagccactgggagaggccgagagagagtttattttgaatctgaaaaagaaggagtgcaaggatagaggttttgagtatgacggtaagatcaacgcttgggatctgtactattacatgacccagaccgaagagttgaagtacagtatcgaccaggagttcctaaaagagtattttccaattgaggtggtgacagaagggctcttaaatacttatcaagagcttttaggtctgagctttgaacaaatgaccgacgcccatgtgtggaataaatcggtaacactgtacacagtgaaagacaaggcaacaggggaggtgctgggacaattttatcttgacctttaccccagagaaggcaagtacaaccatgctgcctgcttcggcctgcagccagggtgtctgctgccggatggcagccggatgatggccgttgccgctctcgtggtgaacttctcccagcccgtagctggacgcccaagtctgctgcggcacgacgaggttcggacttactttcatgaatttggacacgtgatgcaccagatctgtgcccagaccgactttgctaggttctccggaaccaacgtggaaaccgactttgtagaagtgccaagtcaaatgctggagaattgggtgtgggacgtggactccctgagacggctgtctaagcactataaggacgggtcacctattgctgatgatttgttagaaaaattagtggctagcagactggtgaacactggccttctgacccttcgacagatcgtgctgagcaaggtggaccagagcctccatacgaataccagtctcgatgctgcaagtgaatatgctaagtattgctccgagatcctgggggtagccgcaacccctggcaccaacatgccggctacctttggacaccttgccggtgggtacgatggacagtactatggatatctgtggtcggaggtgttttcaatggatatgttttactcctgtttcaaaaaagagggaatcatgaatccagaagtggggatgaagtatcggaacttaatcctgaagcccggaggatcacttgatggtatggatatgcttcacaattttttgaagagagaaccaaatcaaaaggcatttctaatgtccaggggactgcatgctccttag

SEQ ID NO: 232459 - DNA, 366 bp, synthetic construct
  misc_feature 1..366: note = Description of Artificial Sequence: Synthetic coding sequence
  source 1..366: mol_type = other DNA
atggccagaagggcgggaggcgctcggatgttcggctctttgttgttattcgctctcttggccgctggggtcgctcccctgagctgggatctgccagagccccgtagccgcgcatcgaaaatcagggtccactctcgagggaacctttgggcaaccggccactttatgggaaagaagagcctggaaccaagctccccgagccccctagggaccgcccctcacacttctcttagggatcagcgccttcagctgtcacacgatctgcttgggatacttctcctgaagaaagctctgggagtatccctgagtcgacctgctcctcagatccagtaccggaggctgttggtgcagatactgcaaaaatag

SEQ ID NO: 232460 - DNA, 465 bp, synthetic construct
  misc_feature 1..465: note = Description of Artificial Sequence: Synthetic coding sequence
  source 1..465: mol_type = other DNA
atggctagaagagctggcggagctaggatgtttggcagtctattactgttcgctctcctagctgctggcgtagcccctctgagttgggatctgccggagccccgtagtcgggcatccaagatccgggtgcacagccgcggaaacctctgggcaaccggtcattttatgggcaaaaaatctctcgagcccagtagccccagtccacttgggaccgcaccccacacctctttgcgggaccagcgccttcagctatctcatgatctcctgggaatacttctactcaagaaggctttgggcgtgtctctgtctcgtcccgctccacagatccaggaggcggctgggaccaacaccgccgaaatgacaccgattatggggcaaacacagcagagaggactggactgtgcacaccccggtaaggtgctgaacggaacccttctcatggccccttccggatgtaagagctag

SEQ ID NO: 232461 - DNA, 1173 bp, synthetic construct
  misc_feature 1..1173: note = Description of Artificial Sequence: Synthetic coding sequence
  source 1..1173: mol_type = other DNA
atgccttctaagtcactgagtaatctgtcagttactacaggggcaaacgaatcaggttcagtgcccgaaggatgggagagagacttcttgccggcatcagatggcactaccaccgagttagttatcaggtgcgtcatcccctccctctatcttcttataattactgtaggcttgctgggcaacattatgttggtgaaaatctttattaccaattccgctatgagaagtgtgccgaatattttcatcagcaacctggctgctggcgatcttttgcttctgctgacatgtgttcccgtggacgcctcgcggtatttcttcgacgaatggatgttcggcaaagtcgggtgcaagctgattccagtaattcagctgactagtgttggggtgtcggtgtttacactgaccgcgctgagcgccgaccggtatcgcgctatagtaaaccccatggacatgcaaacttctggggctctgttgcggacttgtgttaaagctatgggaatttgggtggttagtgtattgctggccgtcccagaggcagtgttttcagaggtggcacggataagcagcttggacaactcctcatttacagcctgtatcccatatccccagacagacgaactgcatccaaaaatacacagcgtgttaattttcttagtttacttcttgatcccactcgccatcatctccatttactactaccacatagccaaaacactcattaagtccgcccataatctcccaggagaatacaacgagcatacaaagaagcagatggagaccagaaaacgtctggcaaaaatcgtgcttgtgtttgttggatgcttcatcttctgttggttccccaatcacattctgtatatgtaccgctcattcaattacaacgaaattgacccctcgctgggccacatgattgtgaccttagtcgccagggtgctgtcgttcggtaattcctgtgtcaacccttttgccctctacctgctgtcagaatcttttagaaggcacttcaactcccagctttgttgcgggcgtaagtcctatcaagaacgaggcaccagctatctgttgtcctcatcggcagtgagaatgaccagcctgaaaagcaatgcaaaaaacatggtcaccaactcagtgctcctcaatggacacagcatgaaacaagagatggccctgtag

SEQ ID NO: 232462 - DNA, 1281 bp, synthetic construct
  misc_feature 1..1281: note = Description of Artificial Sequence: Synthetic coding sequence
  source 1..1281: mol_type = other DNA
atgactcctctgtgccttaattgctccgttcttccaggcgatttatatcccggaggcgctcggaatcctatggcgtgcaatggcagtgctgcccgaggtcactttgacccagaggacttgaatcttactgatgaagccttgcgacttaagtacctgggccctcaacaaaccgaattgtttatgccgatatgcgcaacatatctcttgattttcgtcgtcggagccgtaggaaatggcttgacatgtctcgtgattctccggcataaggctatgcgaacacctactaactactacttatttagtctggctgtgagcgacctgctcgtgctgcttgtaggactcccccttgaactttacgaaatgtggcataattacccctttctcctgggggttggcggatgctactttcgaacattgctcttcgaaatggtgtgtttggcctctgtgttaaatgtaaccgccctgtcagttgagagatacgtcgccgtggtacacccattacaggcccgatcgatggtgacccgggcacacgttcgacgagtacttggggctgtctggggactggctatgctctgctccctccccaacacctctttacacggtataagacagctgcacgtgccatgtcgtggccctgtgccggactccgcagtctgcatgttggtgcggcctagggcgctgtacaacatggtagttcagaccaccgctttacttttcttctgcctgcccatggcgattatgtctgtgctctaccttctgattgggctgcgccttagacgggagagattgcttctgatgcaggaggccaaagggcgagggtccgctgccgctcggtcacgatatacctgccgtctccagcagcacgaccggggtagacgacaggtcactaagatgctgtttgtgctggttgtggttttcgggatctgctgggctcctttccatgccgatcgcgtgatgtggtccgtcgtttcccaatggacagatgggcttcacctggcttttcagcacgtccatgttatttcagggatctttttttatcttggatcagctgctaacccagtgctgtactccctcatgtccagccgatttcgcgaaacatttcaggaggcattgtgcctgggagcctgctgtcacaggctgagacccagacactcatctcactctttatccagaatgactacaggctctacactctgcgacgttggtagcctcggttcctgggttcacccgctggctggaaacgacgggccagaagcacagcaagagacagacccttcctag

SEQ ID NO: 232463 - DNA, 1248 bp, synthetic construct
  misc_feature 1..1248: note = Description of Artificial Sequence: Synthetic coding sequence
  source 1..1248: mol_type = other DNA
atgtccggcatggaaaaactccagaatgcgtcttggatctatcagcagaaacttgaggatcctttccagaagcacctgaattccaccgaagaatacctggctttcctgtgcggaccaaggagatctcatttctttctgcccgtatccgtcgtgtatgtccccattttcgtagtcggggtgatcggaaatgtgctcgtgtgcctcgttattctgcagcatcaagcgatgaaaactcctaccaactattacctgttctctctggctgtgtccgaccttttagtgctgctcctgggtatgcccctggaagtgtacgagatgtggaggaattatcccttcttatttgggccagtgggatgctattttaaaaccgccctgttcgagacagtctgcttcgcctccattctgtccatcactacagtctctgtcgagcgatatgtcgccatactgcatccttttagagccaagctacagagcacgagacgcagggccctccggatccttggtattgtgtgggggttttccgttctgtttagcctgccaaacacatccattcacgggatcaaatttcattacttcccaaacggcagcctggtgccaggaagtgcaacctgtaccgtgattaaaccgatgtggatctacaactttatcatccaagtcacctcattcctgttctacttgctgcccatgactgtgataagcgtgttgtactatcttatggccctgcgacttaaaaaagacaagtctctcgaggcagatgagggaaacgccaatattcagaggccttgccgcaagtcagtcaacaaaatgctattcgtgcttgtgctcgtgttcgccatctgctgggccccatttcacatagatagactcttcttttcctttgtagaggagtggagcgagtccctggccgcagtgttcaatctggtgcatgtggtcagcggagtttttttttacttaagcagtgcagttaacccaataatttacaatctgctctcccgaaggttccaggccgcttttcagaacgtgatttcatcattccataagcagtggcactctcaacacgacccccagttgccccctgctcaaagaaacatcttcctgacagagtgtcattttgtggaactcaccgaagacattggaccccagttcccctgccaaagctccatgcataactcacatttacctgcggcactgtcctccgaacagatgtccaggactaactaccagtcattccatttcaataaaacatag

SEQ ID NO: 232464 - DNA, 5625 bp, synthetic construct
  misc_feature 1..5625: note = Description of Artificial Sequence: Synthetic coding sequence
  source 1..5625: mol_type = other DNA
atgctcggcagtagcgtgaagagtgtgcaacctgaggtcgaactgagttccgggggtggcgacgagggtgctgacgaaccgaggggcgctggacggaaggccgctgctgcggatgggaggggcatgttgcccaagagggccaaggcgccaggcggagggggaggcatggccaaagcaagtgctgcggaactgaaagtgttcaaatcaggctcagtggacagccgtgttcctgggggtcctccagcgagcaatttaaggaaacagaagagtctgaccaatttgtcatttctcaccgactctgagaagaaattgcagctgtacgagcctgaatggagtgatgatatggcaaaggccccaaaaggtctgggaaaggtgggaagtaaagggcgagaggcacccctcatgagcaagaccctgagtaaatccgagcacagcctatttcaggctaagggcagccccgcaggaggcgctaaaactccactggcaccactggcacccaaccttggaaagccttctcgaatcccacgtggcccatacgcagaggtgaaaccccttagtaaggcccctgaggcagccgtatccgaggatggtaaaagtgacgatgagctgttatcatctaaagccaaagcccagaagagttccggcccagtcccctcagccaagggtcaagaggagagggcatttctgaaggttgatcccgagctggtggtcaccgtcctaggcgatttggaacagctcctgttttcccagatgctggaccccgaatcccagaggaaacggacggtgcagaatgtccttgaccttcgccagaacttggaagaaacgatgtcttcactacgcggaagccaagtcacacacagctctctggagatgacgtgctatgactctgacgatgcaaaccctaggagcgtcagtagtcttagcaacaggtcgagtccgttgagctggcgttacggccagtcaagtcctcgccttcaggccggtgatgctccctctgttgggggatcatgcaggagcgaagggacgcccgcttggtatatgcatggcgagcgtgctcattactctcacaccatgcccatgagatccccaagcaagctctctcatatctcacgattggagctggtggagagcctcgactcggacgaagtggatctcaaatccggctacatgagtgacagcgatctgatgggtaagactatgacggaggatgacgacatcactaccggttgggacgaaagctcgagcatttcttcagggctctctgacgctagcgataatctgtctagcgaggagtttaacgcatcctcatccctcaattcattgccaagcacaccgaccgcctctaggcgtaactccactatcgtgctccgcactgacagtgaaaagcgctctctcgccgaaagtggcctgagctggttttcagaaagtgaggagaaggccccaaagaagctagaatatgactccggcagcctaaaaatggagccgggtaccagcaaatggaggcgcgagagaccagaatcatgtgacgacagcagtaaggggggtgagcttaagaagccaatctccctgggacacccaggctctctcaagaaaggaaagacaccccctgtcgccgtcacatccccaatcacacataccgcccagtcggctctcaaagttgctggcaaaccagaagggaaagcaaccgacaaaggcaagctggctgtgaaaaacacaggactccaacgcagcagttcagatgcagggagagataggctatccgatgcgaagaagcccccatccggcattgcgagacctagcactagcggaagttttggctacaagaagccaccccctgccactggtacggctacggttatgcagaccggcggaagcgccaccctgagtaaaattcagaagagtagcggcatccccgtaaaacccgtgaatgggcgaaagacctcactggatgtgtctaacagcgcagaacctggattcctggcaccgggtgcacgctctaatatccagtacaggagcctgccaaggccggcaaagtcaagttccatgtctgtaaccggaggccgagggggtccccgaccggtatcttcgtctattgacccctctctgttgagtacaaaacagggagggcttacaccgtcaagactgaaggagcccactaaggttgcgtctggaagaactacacctgccccagtcaaccagacagacagagagaaagagaaggcgaaggccaaagcggtagccttagattccgacaatatcagcctgaaatcaattggtagtcctgaaagcacacccaagaaccaggcttctcatccaacagcaactaaactggccgagctgcctcctacaccactaagggcaactgctaagtctttcgtgaaacctccaagtttagccaatcttgataaggtcaattctaactccctggatcttccaagttcctcggatacaacgcatgcctcaaaggtgccagatctgcatgctacatcatccgctagcggcggtccgttgcctagttgctttactccttctcctgcgcctatattgaatattaacagcgctagtttttcccaaggcctggaattaatgtcagggttcagcgtgccgaaggagacccgtatgtacccgaagctcagcggactgcatcgctccatggaaagtctgcagatgcctatgtcactcccctccgcctttcctagcagcaccccagtaccgacccctcccgcaccgcctgctgctcctacagaggaggaaaccgaggaactcacatggtccggcagcccccgtgccggacagttggactcaaatcagcgggatagaaataccctgcctaagaaaggcctgcggtaccagctgcagtcacaagaggagactaaggagaggcggcacagtcatactattgggggactgcctgagagtgacgaccagtctgaattgccttcaccacccgcacttcctatgagcctgtcagcaaaaggacagttaacgaacatcgtgtctccaaccgccgctaccactccgcgaattactagaagcaatagtattcccacacatgaggccgcttttgagttgtatagcgggtcacagatgggcagcaccttgtctttggcagagcgcccaaaaggaatgatccggtcaggttcattcagagacccgaccgacgacgtgcatggttctgtactgtctttggcctcttccgcttcttccacatactcatcagcagaagagcggatgcagtccgagcagatcaggaagctccgtcgcgagttggagagctcccaagaaaaagtagcaaccctcacctcccagctgtccgctaatgctaatctagtggcagcttttgaacaatcactggtaaatatgacttctagactccggcaccttgctgagactgcggaggagaaggatactgagcttctggatctcagagagacaattgactttcttaaaaagaagaacagtgaagcccaggccgtgattcagggagctctgaatgcttccgaaaccacacctaaggagttgagaattaagagacagaactcaagcgattctatatcctctctcaattccatcacctctcacagttcgatcggctccagcaaggatgcagacgcgaagaagaagaagaaaaaatcatggcttaggagtagctttaacaaggcatttagcatcaagaagggcccaaaaagtgcatcttcctatagcgacatcgaagaaatcgccacccctgattcctcagctccaagctcacccaaacttcaacacggctcaacagagactgcctctcccagcattaagtcttctacctccagcagcgttggaacggacgtgactgagggccctgcacatcctgcacctcatacccgcctgttccatgccaacgaagaagaggagccggagaaaaaggaggttagcgagctgagatccgagctgtgggagaaggagatgaagctgactgacatccggctagaggccttgaattccgcccaccagctggaccagttgagggagacgatgcataacatgcagcttgaagttgacctattgaaggcagaaaatgacaggttgaaggtggcgccaggaccttcttctggttcaacaccaggtcaggttccgggatcctcagctctgagtagccccaggcgttctttgggtctggcgttgactcactcctttgggccttctttagcggatacagatctatcacctatggacgggatttccacctgtggacccaaggaggaggtgacgctgagggtcgttgtccggatgcctccgcagcatatcattaagggtgacctgaagcagcaggaattctttctaggttgttctaaagtttctgggaaagtggactggaagatgctggacgaagccgtgttccaggttttcaaagactatattagtaagatggatcctgcatccacccttggcctttcaactgagtcaattcacgggtattctatttcccacgtgaaacgggtgttggacgcggaaccaccggagatgcctccgtgcagaagaggggtgaacaacattagcgtcagtctaaaaggtctcaaggaaaagtgcgtggattccctcgtttttgagactctgatcccaaaaccaatgatgcagcactatatcagtctgctgttaaagcaccggaggttagtgctcagtggaccttctgggaccggaaaaacatatctgaccaacaggctcgcagagtatctggtggaacgatctggcagggaggtgacagaggggattgtctctacgtttaatatgcatcagcaatcctgcaaggacctgcagttatacctctccaacctcgccaaccagatcgatagagagacgggaataggcgacgtgcccttggtgatcttactggacgacctcagcgaagcaggctcaatctctgaactggttaatggggcactcacatgcaaataccataagtgcccttacatcatcggtacaaccaatcagcctgtcaagatgacacctaaccatggactccacttatcgttcagaatgttgaccttctctaataacgtggagcccgctaatggttttctggtcagatacctccgaagaaaacttgtcgagtcagactccgatatcaacgctaacaaggaggagctcctcagggtgctggactgggtccccaaactctggtaccacctccatactttcttggagaagcacagcacttctgactttctgatcggaccgtgcttttttctaagctgtcctatcgggatcgaagatttcagaacttggtttattgatttatggaacaatagcataattccttatctgcaggagggagctaaagatggaatcaaagtgcacgggcagaaagccgcatgggaggacccggtcgagtgggtgagggacactctgccatggcctagcgcacagcaggaccagtcgaaactgtaccacctgcctccgcctacggttggcccacacagcatagccagccctccagaggaccgcaccgttaaggattcaactccctcctcgctggattccgaccctctcatggccatgctgctaaaactgcaggaagccgctaattacatcgagagcccagaccgggaaaccattttagaccctaaccttcaagccacgctttat

SEQ ID NO: 232465 - DNA, 5633 bp, synthetic construct
  misc_feature 1..5633: note = Description of Artificial Sequence: Synthetic coding sequence
  source 1..5633: mol_type = other DNA
atgctgggttctagtgtgaaatccgtgcagcccgaggttgaattgagctcagggggaggtgatgagggtgcggacgagcccaggggggcaggacgaaaggctgctgcggcagatggtagggggatgctacctaagagggctaaggcacctgggggagggggaggcatggccaaggcttcggctgcagagctgaaggtgttcaaatcaggctctgtggacagtagggttcccggagggccacccgcttccaacctccgcaaacagaagagtttgacaaatttgagctttctgacagactccgagaagaagctgcagctgtacgagcccgagtggagcgacgacatggccaaggcacctaaagggcttggcaaggtgggctccaaagggagggaagccccactaatgagcaaaacattatctaagagcgagcactccttgttccaggctaagggatctccagctggcggagcaaagaccccccttgcccctctggcccctaatctagggaagcctagccgaattccgcgtggcccatatgccgaagtgaagcccttgtcaaaggcaccagaagctgctgtgagcgaagacggcaaatccgacgatgagctgctgtcctctaaagctaaagcccagaagagctcagggcctgtcccaagcgcaaaagggcaggaagaaagagcatttctcaaagttgaccctgaactcgtggtcaccgtactcggcgacctcgaacagcttctgttttcccaaatgctcgaccctgagagccaacggaaacggaccgtgcagaacgttctagacttgcgccagaacctggaggaaacgatgtccagcctgcgcggatcacaggtcacccactcatccttagaaatgacgtgctacgattcagacgacgctaaccccagatcagtttcgtccctgtccaaccgatcctctcctctctcctggcgctacgggcaaagttcacctagattacaagcaggcgatgcgccttcagtgggaggaagttgccggtccgaggggacccctgcatggtatatgcatggagaaagggcccactactctcacactatgcccatgcggagcccctccaagctttcacatatcagtagactcgagcttgtagagtctttagattcagatgaggtggatctaaaatctggctatatgagcgacagtgacttgatgggcaaaacaatgaccgaggatgacgatattactaccgggtgggacgagtccagctcaatttcctcaggactttcggacgcctctgataatctttcctctgaagagttcaatgctagttccagtctcaactccttgccgtctactccaactgcctcaaggcgaaacagcaccattgtgcttcggacagacagcgagaagaggtctctcgccgagagcggtctttcctggttcagcgagagcgaggagaaggcgccaaaaaaactggagtatgatagcggatcattgaaaatggagccgggaacctccaagtggaggcgcgagcggcctgagtcctgtgacgatagttccaaaggaggcgagctaaagaaaccaataagtctgggccatccagggtcactcaaaaagggtaaaacccctccggtggcagttacttctccaattacccacacagctcagagcgcccttaaagtggccggaaaacctgagggaaaagctactgacaaagggaagctggccgtcaagaacactggactacagaggtcatcgtcagatgcgggtagggacaggctttcagacgcgaaaaaaccaccatccggaatcgcgcgaccttcgaccagcggatcatttggctataaaaaaccaccccctgccactgggaccgccaccgtcatgcagactggtggaagcgccactctcagtaagatccagaaaagcagcggaataccagtgaagcctgtcaatggcaggaagacctcccttgatgtgtctaattctgccgagcccggtttccttgcaccaggggcacggtcgaacattcagtatcggtccttgccacggccagccaaaagctcgtccatgagtgtgacaggcggtagaggtggccctaggcctgtgagtagctcaatagatcccagcctgctctccaccaagcagggcggactgactcccagtcgcctcaaagaaccaaccaaggtggcgtcagggcgaaccacaccagcccctgtaaatcaaaccgacagagagaaagaaaaggcaaaagctaaggccgttgctctggactcagataacatcagcctgaaaagtatcggatcgcccgaatcgacacctaaaaaccaggctagccacccaaccgcgacgaagctggccgagctgcctcccactccactccgcgctaccgccaagagctttgttaagcccccatcactcgctaatctcgataaggtgaattctaactcattggacctcccatcatcctcggacaccacacacgcttcgaaagtccccgaccttcatgcaaccagcagtgcctctggtggtcctctcccatcgtgcttcaccccaagccccgctcctattcttaatataaattcggccagtttctctcaggggcttgagctgatgtcgggattcagtgtcccaaaggagaccagaatgtaccctaagctgagcggtctgcacagaagtatggaatcacttcagatgccgatgtccctgccaagcgcctttccctcatcaacaccagttcccacaccaccagctccgcctgccgctcctactgaggaggaaaccgaagaactgacctggagcgggtctccacgcgcaggtcagttagactccaatcagcgcgaccgtaacactctcccgaagaagggactgaggtaccagttgcagtctcaggaagaaaccaaagaaagacggcactcccatacgattggcggtttaccggagtctgatgaccagagcgagttgcctagccccccagccttaccaatgtctctgtcagctaagggtcagctgactaacatcgtatcccccacagccgctactacccctcgcatcacaaggtctaactccatcccaacccacgaggcagcatttgagttgtactccggatctcagatgggtagtactctgtcactggctgagcgcccaaagggtatgatcaggtctggctcgtttagggaccctacagacgatgttcatgggagcgtgctgagtctggcatctagcgcctcctccacatattcatccgcggaagaacgcatgcagtcagaacagattcgtaaacttcgccgagagctcgagagtagtcaggagaaagtcgcaacactcacttcacaactgtccgccaatgctaacctggtagctgcttttgagcagagccttgtgaacatgacttctcggcttcgccacttggccgaaactgccgaggaaaaagacactgaattgctggacctgcgggaaactatcgactttcttaaaaagaagaatagcgaagctcaggccgtgatccagggggcactaaatgccagtgagaccacacctaaggagttaagaattaaacgccagaactcaagcgactccattagctctcttaacagtatcacaagtcatagcagcattgggtcgtccaaagacgctgacgccaaaaaaaaaaaaaaaaagtcttgggtttacgagctgagaagcagctttaacaaagcattctccatcaagaaaggcccaaaatccgcgtcctcatactcggatatagaggagattgccactcccgattcttcggcacccagttcacccaaactgcagcacggctctaccgaaactgccagcccgtctatcaagtcctcaaccagctcttctgttgggacagacgtcaccgaaggccctgcccaccccgcaccccatacacggctatttcacgcgaacgaagaagaagagcctgaaaaaaaagaagttagcgagctgcggagtgagctgtgggagaaggaaatgaaattgacggatatcagattggaggcactgaatagtgcccatcaactggaccagcttcgggaaaccatgcacaatatgcagctagaggtggatctgctgaaggctgagaacgatcgtctgaaagttgcgccaggacctagtagtggctctacacccggtcaggtgcccggaagctctgcattgtcttcacccagaagatcactgggcttggcattaacccattcttttggaccttcactggctgacacagaccttagtccaatggatggaatctctacatgtgggccaaaagaggaagtcacgctgagggtggtcgtgcgaatgcctcctcagcacattatcaaaggcgacctgaagcagcaggaattctttctggggtgttctaaggtttctgggaaagtcgactggaaaatgcttgacgaagctgtgttccaggtcttcaaagactacatatctaaaatggacccagccagcacattgggtctgtccacggagagtattcatggatactctatctctcacgtcaagcgcgtccttgatgctgaaccgcctgaaatgcccccatgtaggaggggagtcaataacatctcagtgagccttaaggggttgaaggaaaagtgtgtggattccttggtgtttgagacattaattcctaaacctatgatgcagcactatatctcactgctccttaagcacaggaggctcgtgttgtcaggtccatctgggacaggaaagacatatcttactaaccggctagctgagtatctggtcgaacggtcaggaagagaggtgaccgagggtattgtgagtaccttcaatatgcaccaacaaagttgtaaggacttacagctgtacttgagtaatctggccaaccagattgacagggagactgggataggggatgtcccactggtgattcttctggacgatctgtcagaagccggtagcattagcgagctggtgaacggggcattgacgtgcaaataccacaaatgcccttacattataggtacaacgaatcagcctgtgaaaatgacacctaaccatggcctgcacttgtcattcagaatgcttacctttagcaacaacgttgagccagcaaatggattcctggtaagatacctgcgaaggaagcttgtggaatctgatagcgatattaacgccaataaggaggaacttctgcgggtgctggactgggttccaaagctatggtatcatttgcacaccttcctcgaaaaacactcaacttcggactttctgattggaccatgtttctttctgagttgtccaattggaattgaagacttcaggacctggtttattgacttgtggaacaactcaataattccctacttgcaggaaggcgctaaggacggcatcaaagtgcatggtcagaaagccgcttgggaggatccagttgagtgggtccgggacactttgccttggcccagcgcacagcaggaccagtccaaactgtatcatttacccccacctactgtcggtcctcactctatcgccagcccgccagaggaccgcacagtgaaggacagcaccccctcctctctggatagtgatccattaatggccatgttgttgaaattacaagaagccgcaaattatatcgagagcccagatcgtgagactattctcgacccaaaccttcaggccaccctata

SEQ ID NO: 232466 - DNA, 5609 bp, synthetic construct
  misc_feature 1..5609: note = Description of Artificial Sequence: Synthetic coding sequence
  source 1..5609: mol_type = other DNA
atgctgggatcttccgtgaagagtgtgcagccagaggtggagttgtcatccggcggtggtgacgagggcgcagatgagccgcgaggagccggaaggaaggctgctgcggctgatggcagaggtatgctgcctaagagggctaaggcacccggtggtggcggaggcatggcgaaggctagcgcagcagaactgaaggttttcaaaagcggaagcgtagactcgcgagtgcccggaggaccacccgcttccaacctacgtaagcaaaagagccttaccaatttgtcttttctcactgactcggagaagaagcttcagctgtatgagccagagtggagtgacgatatggccaaggcaccaaaaggccttggcaaggtgggctcgaaaggcagagaagctcctcttatgagtaaaacactatcaaagagtgagcactccctgtttcaggccaaagggtccccagccggaggcgctaaaacaccattagcacctctggcccctaatctcggcaaaccttctcgaatccctaggggcccttatgccgaggttaagccactctctaaagccccagaagctgccgtctctgaggacggtaaatcggacgatgagctgttatcttcaaaggcgaaggcccagaagtcctctggtccagtgccaagcgctaaggggcaggaggaacgcgctttcctaaaagtggaccctgagttggtggtgaccgtgttaggcgatcttgagcagctgctattctcacagatgctcgaccccgaaagtcagaggaagcgcacggtgcaaaatgttctcgacctccgacaaaacctcgaggagacaatgtccagtctgaggggctctcaagtcacacactcatccctggaaatgacctgctatgactctgacgatgccaatcctcgctcagtatcctctctttcaaacaggtccagccccctgagttggagatacgggcaatccagtcctaggctgcaggctggagacgccccttcggttggaggatcatgtcgttccgaagggacccccgcttggtatatgcacggggagagagcacattactcccatacgatgcctatgagatcacccagcaagctgtcccacatctccaggctggagctggttgagtcgctcgattctgacgaggtagatctgaagtccgggtacatgagcgattcagacctgatggggaagaccatgacagaggacgacgacatcaccaccggatgggacgaatcctcaagcattagctctggactgtcagatgcaagtgataacctcagctcggaggagttcaacgcaagctcctcgctcaactctttaccgtctacccccacagcgtctaggaggaattctactatcgtcctccgcactgacagcgagaagaggagtttagctgagtcaggtctttcatggttctccgagagcgaggaaaaagccccaaaaaagctggagtacgattctggatctctcaagatggagccgggaacatctaagtggcgcagggagcgacccgagagctgtgacgattctagcaagggaggcgaactgaaaaaaccaattagtctgggacacccaggatccctcaagaaagggaagacccccccagtcgccgttacgtctccaataacccataccgcacaaagtgctctcaaggtagcaggcaagccagaggggaaagccacggacaagggaaagttggcagtaaagaatacaggcctgcagcgcagcagtagcgatgctggtagggatcgactctccgacgccaaaaaaccccctagtggaatcgcaaggcctagtacttcgggaagcttcggatataaaaagcccccacctgccacagggaccgctactgtgatgcagactggcggatcagccaccctgagtaaaattcagaaaagctctggcatcccagtaaaacccgtgaacggaaggaaaaccagccttgatgtttctaattctgctgagcccggattcctagccccaggggctaggagcaatatccaatataggtccctcccaagacccgctaagtctagtagtatgtctgttaccggagggagaggaggccctcgtcctgtctccagctcaatcgacccaagtttgttaagcacaaagcaaggcggtctgacacccagtcgactcaaggagccgaccaaggtcgcgtcaggacggacaactccagcccctgtgaaccagaccgatcgcgagaaggagaaggccaaagcgaaagctgtcgcgctggactctgataacattagcttgaaatccattggaagtcctgagtccacgcccaaaaaccaggctagtcaccccacagctactaagctcgccgagctccccccaacaccactgagagctactgccaaatcttttgttaaacctccctccttagcaaacttagacaaggtgaatagcaattcactcgacctgcccagcagcagcgacacaacccatgcgtccaaggtgcctgacctgcatgctacatcgtccgcctctggcggacccctcccttcttgcttcacgccatcaccagctcccattcttaacattaacagtgcatcctttagccagggccttgagttgatgtccggcttttccgtgccaaaggagacccgtatgtacccaaaattatccggccttcacaggagcatggaatctttacagatgcccatgtcgctgccttctgctttcccttcgtcgacgcctgttccaactccacccgctccacctgcggcaccaacagaggaggaaaccgaggagctcacttggtccgggtcccccagagcaggccaactggatagcaatcagcgcgaccgcaataccctgcctaagaagggtttgcggtaccagctgcagtctcaagaggagaccaaggagaggagacactctcataccatcgggggactcccagagtctgatgatcagagtgaactgccctcccccccagccctacccatgtcactgtccgccaaaggccagttaactaacattgtcagtcccaccgcggctaccacacccagaattacccgctccaattccatccctacacacgaagcggcttttgagctttactctgggtcccagatgggctcgaccctgagcctcgccgaaagacctaaggggatgatccgatctggcagcttccgagaccccactgacgacgtacatggcagtgtgttgagcttggccagttccgcctccagtacatattcctctcaaattcgaaagctgcgcagggagcttgaatcttcacaggagaaagttgcaacacttaccagtcaactttcagccaacgcaaacctagtggcggcttttgagcaatcactcgttaacatgaccagccggcttaggcatctcgccgaaaccgctgaagaaaaggacacggagctccttgatctccgcgagaccatcgatttccttaagaaaaagaattccgaggcccaagcagtgatccaaggggctttgaatgctagcgagaccaccccaaaagaactccgaatcaagaggcagaatagttccgacagcattagtagcctcaatagcataaccagccactcgtccataggatcatccaaggatgccgacgccaagaaaaaaaagaaaaaatcctgggtctacgagctacgaagttccttcaataaagctttctccatcaagaagggcccaaagagcgcgtcttcatattctgacatcgaggaaatagctacgcccgacagttcagctccttcgtccccaaagcttcagcacggaagtactgagaccgcctctccttccatcaaatctagcacttctagtagcgtgggaacagacgtgaccgaagggcctgcccaccccgctcctcacacccggttgtttcacgcaaacgaagaagaagagcctgagaagaaggaggtaagtgagttgagatctgagctctgggaaaaagagatgaaactgacagatataagattagaagctctgaactctgctcatcagctggatcagttaagagagaccatgcataacatgcagctagaggtggatttgctgaaggctgagaacgaccgcctgaaagtggcccctggcccaagcagtggatccacccccggacaggttcccggttccagtgccttgtcctctccacggaggtctctgggattagcacttacacacagctttggacctagcctggcggatacggacctttctcctatggacggaatctccacttgtggcccaaaagaggaggtgaccctccgggtcgtggttaggatgcctccccagcacatcatcaaaggcgacctgaaacagcaggagttctttctcggttgttccaaggtctccgggaaagttgattggaagatgttggacgaagcagtgtttcaagtatttaaagactatatatctaaaatggacccagctagcacgctgggcctctccaccgagagtatacatggctattccatcagccatgtaaagagggttctggatgccgaaccccctgagatgccaccgtgtcgacggggagttaataatattagcgtttccctaaaagggctcaaggaaaaatgtgtggactcactggtctttgaaactctcattccaaaacccatgatgcagcactatatatccctgctgttgaagcacaggcgactggtgctcagcggaccaagtggtaccggtaaaacataccttactaatcgactggccgagtacctggtggagcgctcagggagagaagtcacagagggcattgtgagcactttcaatatgcatcagcagagttgcaaggacctgcaactctacctttccaaccttgcgaatcagatcgatcgcgaaaccggtattggggacgtgcccctggttatactgcttgatgaccttagcgaggctgggtccataagtgagctggtaaacggggcactgacctgcaagtaccataaatgtccttacattattggtaccacaaatcagcctgtgaagatgaccccaaaccatggactgcatttgtctttcagaatgctcacattttccaacaacgtggaaccagccaacggcttcctagtgcggtatctgcgaagaaaactcgtagagtcagactctgacatcaacgcgaataaggaggagctgttacgtgtgttggattgggtgcccaagctgtggtaccaccttcatactttcctggagaaacattccacatccgacttcctcatcggaccttgcttctttctgtcttgtccaataggcattgaggatttccggacatggtttatcgacctgtggaacaactctattattccttatctacaggagggagcaaaggatggcatcaaagtccacggacagaaagccgcttgggaagatccagtagagtgggtacgggacactcttccttggccatcagcgcaacaggaccaaagtaaattgtaccatctgccgccacctacagtgggaccacatagcatcgcttctccaccggaggaccgcaccgtaaaagatagtacgccttcctccctggactctgaccctcttatggcaatgctgttgaaactgcaggaggctgccaactatatcgagtcacctgatcgcgagacaatcctggacccgaacttacaggcgacactgta

SEQ ID NO: 232467 - DNA, 5454 bp, synthetic construct
  misc_feature 1..5454: note = Description of Artificial Sequence: Synthetic coding sequence
  source 1..5454: mol_type = other DNA
atgctgggctcttccgtcaaatctgttcagcctgaggtggaattgagcagcggtggaggcgatgaaggggcagatgaacccaggggcgctggaagaaaggctgcagccgcagacggacgtgggatgctcccaaagcgcgctaaggcaccaggtggtgggggaggcatggccaaggccagcgctgccgagctgaaggtgttcaaatccggaagcgtggacagtagggttcctggcggaccacccgcttctaatctcagaaaacaaaagtctctgacgaacctgtcatttctgactgatagtgagaaaaaacttcaactttatgagcccgaatggtccgacgatatggccaaggcacctaaaggcctgggcaaggtcggctccaaaggcagggaagctccacttatgtccaagacactcagcaagtctgagcattcactgtttcaagcaaagggaagtccagcagggggtgcaaagacaccactggcgccactcgcacctaacctgggaaagccatcccgaatacccagaggcccatacgcagaggtcaagcccctgtccaaagccccagaggcggctgtgagcgaggacggaaagtcagacgacgagctgctgtcttcgaaagcgaaagcccagaaatcttccggcccagttccctccgcaaagggacaagaagaaagggcctttctgaaagttgatcccgaactagtggtcactgtcctgggagaccttgaacaactgctcttcagccagatgcttgatcctgagtctcagaggaagcggactgttcagaatgtgctcgacttgagacagaatcttgaagagactatgtcttctttaagagggtcccaggtaactcactcaagcctggaaatgacctgctatgactccgacgacgcaaatccgcgttccgtcagttcactgtccaatcgctcttcacctttgtcatggaggtacggacagtcctctcctcgcctccaggcaggtgacgcaccttctgtcgggggtagttgccggtcagagggcactcccgcatggtatatgcatggagagcgggctcattattctcacaccatgcctatgagatcaccttccaaactgtcccacatttcccgattagaacttgtggagagcctggatagcgacgaagttgacttaaagtctggctacatgtctgactcggacctgatgggcaagaccatgacggaggacgacgacattactacagggtgggatgaatccagctcaatcagcagtggattgagtgacgcttccgacaacctgagctcagaagagttcaatgctagtagcagtcttaattccctgccttcgactcccacagcctcacgtagaaactcaacaatcgtgctgaggacagattcagagaagaggtcactggccgaaagcgggctgtcatggttttcagaaagcgaggagaaggccccaaagaaactggaatacgattctggctcactcaagatggaaccgggaacatcaaagtggagacgggaaaggcctgagtcttgcgatgacagcagcaaggggggagaacttaaaaaacctatctcccttggacaccctggatctctgaaaaaggggaagacaccgcctgttgctgtcactagcccaataactcataccgcacagtctgctctgaaggtcgcgggtaaacctgagggcaaggctactgataaaggcaaactggctgtgaaaaacacggggcttcaacgttccagctccgacgcaggcagagataggcttagtgatgcgaagaaacctccgagtgggatagcccgacctagtacaagcggatcttttggttacaaaaagccacctcctgcgacaggtactgcaaccgttatgcagactggaggttctgccacgttgagtaagattcagaagtcttccgggatccccgtgaagccagtgaacggacgcaaaaccagcttagatgtgagtaacagcgctgagccagggttccttgctcccggagccaggagtaacatccagtatcggagtttacccagacctgccaaatcaagtagcatgtcagttacgggcggaaggggcggacccagaccagtgtctagctcaattgacccgtctctactctctaccaagcaggggggactgaccccgagtaggctcaaggagcctacaaaagtcgcctcggggaggaccacccctgcgcctgtgaaccaaaccgaccgagaaaaggaaaaggctaaagccaaggccgttgccttagattcagataatatcagccttaaaagcattggctcgcctgagagcacacccaaaaatcaggcatcacaccccactgcaaccaagttagcggaacttccacccacgccattgagagccactgccaagagtttcgtgaagcccccatctctggcaaatctcgacaaagtgaattccaactcattggatttaccgtcttctagcgataccacacatgccagcaaagtacccgatttacatgcaacgtcatctgcttccggtggacccctgcctagttgctttacacctagccccgcaccaatacttaatatcaattccgcttccttcagtcagggtttggagctaatgtctggcttcagtgtccccaaggaaacccggatgtaccccaagttgagcggtctgcaccgcagcatggaaagcttgcagatgcccatgtcgttgccctcagcttttccgtcttctacgccagttcccactcctcctgcccctccagctgccccaactgaggaagaaactgaggagctgacttggtccggctctccacgggcaggccaactggattcaaatcagagagaccgaaacactctgccgaagaaggggctgagatatcagctccagtcccaagaggaaaccaaggaaagacgccactcccacaccattggcggtcttcctgaaagtgatgaccagagtgagctgccatcccccccagctctgcccatgtctctctctgctaagggccaattgacaaacattgttcacggctcggtgctgtcactggcttcttccgccagttctacgtatagttctgctgaagaacgaatgcagtctgagcagatcaggaaactgagacgcgagctggaatcatcacaagagaaggttgcgactttgacgtcccagctgtccgcaaacgcgaacctggtggccgcattcgaacaaagcctagttaacatgaccagccgcctgcgacacctggccgagaccgctgaggagaaagacaccgaactactggatttaagagagacgatcgacttcctgaagaagaaaaactctgaggctcaggcagtgatccaaggggcactcaatgcctccgaaactaccccaaaagaacttaggatcaagcggcagaattccagcgattccatcagttctcttaacagtatcacatctcacagctctattgggagcagtaaggacgcagatgccaagaagaaaaaaaagaaatcttggctacgcagcagttttaacaaggctttcagcattaaaaagggcccaaagagtgcttcctcatatagtgacatagaggagatcgctactccagacagttctgcccctagttcccccaagctgcaacatggcagtacagaaacagccagcccttctataaagagttctacctcctcatccgtagggaccgatgtaactgaaggaccagcacatcccgctcctcatacaaggttgttccatgccaatgaggaggaagaaccggagaagaaagaggtctctgaactaaggtcagagctgtgggagaaggaaatgaaactcacagacattcggcttgaagcgctgaattccgctcaccaattggaccagttaagagagactatgcataacatgcagctggaggtcgatttgcttaaagctgaaaatgacaggcttaaagtagccccagggcctagctccgggagcacacctggccaggtgcctggcagctctgccttgtctagtcccagacgctcactaggcctcgcactgacccacagctttggcccatcgttagctgatacagacctttcacccatggacggcatcagcacctgcggtcccaaggaggaagtgacacttagagtcgtcgtgcgcatgcccccacagcacatcattaaaggtgatttaaagcagcaggagttcttcctggggtgctccaaggtgtcaggcaaagttgattggaagatgctcgacgaagcggttttccaggtgtttaaggattacatctctaaaatggacccagcctctaccctgggcctgtccaccgagtctatccacggatactccatttctcacgtaaagcgagtgctggatgctgaacctccagagatgcccccatgccgcagaggcgtaaataacatcagcgtctccctgaagggactgaaagagaaatgcgtagactctctcgttttcgaaaccctgattccaaaaccgatgatgcagcactacatttccttactgctgaaacacaggcgcctggtgctgtctggccctagcggcaccggcaagacgtacttgaccaataggctcgcagagtacctcgtcgaacggtcagggagggaagttactgaggggattgtatctacattcaacatgcatcaacagtcttgcaaagatctgcagttgtatctaagcaacctggctaaccaaatcgatcgcgagacaggaattggtgatgttcccctggtgattctgctcgatgatctcagcgaggccggtagtatttctgaattggtcaatggagcattaacatgtaaatatcacaaatgcccatacatcatcgggactaccaatcagccagtgaagatgacacctaaccacggcttgcacctgtcctttagaatgctgacgtttagtaacaacgtggagcccgcaaatggatttctggtgaggtacttaaggagaaaattggtggaatccgattctgatattaatgccaacaaggaggagcttcttcgggttctggactgggtccccaagctgtggtatcacctccatacctttctcgagaaacactccacaagcgattttttgatcggtccctgcttttttctcagttgtcctatcggtatcgaagatttccgaacctggtttattgacctctggaacaactcaattataccgtacctacaggaaggagccaaggacggcatcaaagtacacgggcagaaggcggcatgggaagaccctgtggaatgggtgagagacactctcccctggccgagcgcacagcaggaccaatccaaactctaccacctcccaccaccaacagtggggcctcactccattgcctcccctcccgaagatcggactgttaaggattccacacctagctcgttggactctgatccacttatggctatgctgttgaaactgcaggaagcagcaaattacatcgagagtccggacagagagacgatcctcgacccaaatctgcaggccaccctgtat

SEQ ID NO: 232468 - DNA, 783 bp, synthetic construct
  misc_feature 1..783: note = Description of Artificial Sequence: Synthetic coding sequence
  source 1..783: mol_type = other DNA
atgcatcagcaatcctgtaaggatctacaactgtacctcagtaatctcgcaaatcaaatcgaccgcgagacgggcatcggcgacgtgcctctggtgattctactggacgatctgtctgaggccggatccatctctgaactggtgaatggtgctcttacttgcaagtaccacaagtgcccgtacattattgggactaccaaccagccagttaagatgacaccaaaccacggcctccatctgagctttagtcggatgctgacttttagtaacaatgtggagcccgctaatggctttttggtcagatatctgcgtcgcaaactggtcgaatccgactctgatatcaatgctaacaaggaggaacttctgcgagtgcttgattgggtcccgaaactttggtaccacctgcacactttcttggagaagcattctacttctgactttttgatcgggagtccttgctttttcctgtcctgtcctattgggatcgaggattttagaacttggttcattgatctttggaacaacagtatcattccttatctgcaggaaggggctaaggacggaataaaggtgcatggccagaaggcagcttgggaagatccagttgaatgggtcagggacacactgccgtggcctagtgcccaacaagatgacagcacaccctcatcgctcgacagcgaccctctcatggctatgctcttgaaactgcaagaggcggctaactatattgaaagtccagaccgggaaaccattctcgaccctaacttacaggccaccttgtag

SEQ ID NO: 232469 - DNA, 2193 bp, synthetic construct
  misc_feature 1..2193: note = Description of Artificial Sequence: Synthetic coding sequence
  source 1..2193: mol_type = other DNA
atggagcccggaactagcaagtggcgcagggagagacccgagtcttgcgatgactcatcaaaggggggagagcttaagaagcctatctctttagggcacccaggatcactgaagaaaggaaagaccccgccagtcgcagtgacgtcacccatcacccacacggcgcaatccgccctgaaggtggctgggaagccggagggaaaggccactgataagggtaaactggcagtgaaaaacacaggactgcagcggagtagcagtgacgctggcagagatagactctctgatgcgaaaaagcccccaagtggtatagccaggccctcaaccagcgggtcgtttggctacaaaaaaccccctcccgcaaccggtactgccaccgtcatgcagaccggcggatccgctaccctgtcaaaaatccagaaatcgagtggcatccctgtgaaacctgttaacggcagaaaaacctccctggatgtctctaactccgctgagcccggttttctggcacccggagcgcgttctaacatccagtatcgatccttacctaggccggctaaatcttccagtatgtccgtgaccggcggacggggaggtccaaggcccgtcagcagtagcatagacccctccttgttgtctacgaaacagggcggattgactcccagcagattgaaggagccaaccaaggtggcatcaggcagaactacaccagcgccagtaaaccagaccgaccgggaaaaggaaaaagcgaaagctaaggccgttgctctcgactccgacaacatttctctcaagtccattggctctcccgagtctaccccgaagaatcaggcctcccaccccacggccaccaagctcgccgagttaccacccactcctctgcgagctacagctaaatctttcgtcaagcccccttccttggccaacctggataaggtgaactctaacagtctggacctcccgtcctcgagcgacacaacacacgcttcaaaggtgcctgatctccatgccaccagtagcgcaagtggaggtcccctgccttcttgtttcaccccctcccccgctccaattctgaacatcaactcggcatcatttagtcaagggctagagctaatgagtggcttttccgttcccaaggagaccaggatgtaccctaaactgtcagggctgcataggtcaatggaatctctccagatgcctatgagtctcccgtccgccttcccatcgagtacacccgtgcccacccctcccgcacctcccgctgcccctacagaggaagaaacagaagagctgacttggagcggaagccctcgcgctggccagctcgattcaaatcagcgagacagaaacaccttgcctaaaaaaggactgcgctatcagcttcagagtcaagaggaaacaaaagaaaggaggcactcccacactattggcggtctgcccgagtccgacgatcagtccgagctgccctcgccacctgctttaccaatgtctttgagcgcaaagggtcagttgacaaacatagtaagccctaccgctgctaccacacccagaatcacacggtcaaactcaatcccaactcacgaagccgctttcgagctgtacagtggaagtcagatgggcagtacactctctctcgcggaaaggcctaaggggatgattcgaagtgggtccttccgagatccgacggatgacgttcatgggagtgttctgtccctggccagcagtgcaagttcaacatacagctcacagatccggaagttgcggagggaactcgagtcatctcaagaaaaggtggccacactcacctcacagctttccgccaacgcaaacctggttgcagcttttgagcagtcactcgttaacatgacaagtcgactgaggcacctggcagaaaccgcagaggaaaagatggagttccgcagttgccaccccggttggagcgccctggcacgaagttggttgacagccaattctgcctcacaggatactgagctcctggaccttagggaaacgattgattttttgaagaagaagaactccgaagcacaggccgtgattcaaggcgcattgaacgcctcggaaacaacccccaaggagttacgcattaaacgtcagaactccagcgatagcattagtagccttaactctattactagtcacagctcaattggatctagcaaagatgcagacgcctag

SEQ ID NO: 232470 - DNA, 4451 bp, synthetic construct
  misc_feature 1..4451: note = Description of Artificial Sequence: Synthetic coding sequence
  source 1..4451: mol_type = other DNA
atgctccatctgcccctgcctcgctctggaaggaccgttaactttccccgaagctgggacgagtcatcctccatctcctctgggctgagcgacgcttctgacaacctgtcttccgaggagttcaacgcaagtagcagtctgaattctctcccttctacacctaccgcgtcgaggcgcaactcgaccatcgtcttgcggaccgactccgagaaacgctccctcgccgaaagtggcctttcgtggttctcggagtctgaggaaaaggccccaaagaaactcgaatatgactcaggcagcctgaagatggagccaggcacttctaagtggagaagggagaggcccgagtcttgcgacgactcttctaaggggggagagctgaagaaaccaatcagcctgggacatcccggttcacttaaaaaggggaagacacctccggtggcagtcacatcacctattacgcacacggcccagtctgcccttaaagtcgccggtaaacccgaaggaaaggccacggacaaggggaaactcgctgtcaagaacactggcttacagcgctccagcagtgatgcgggtagggaccgtctgtcggatgcgaaaaagcctcccagtggaatcgctcgaccttcgaccagcgggagctttgggtataaaaaaccccctcctgcaaccggtaccgcaaccgtaatgcagacaggagggtcggccacactctcgaagatccagaagagctctggcatccccgtgaaaccggtgaacggacgaaagactagtctggatgtaagtaatagcgcagagccgggttttcttgctcccggagcaaggagcaacatccaataccgctctctgcctagacctgcgaaatcgtcttcaatgtctgtgacaggcggtagaggaggtccacgacccgtatcttcatcgattgacccttctttgttgagcaccaagcaaggtggccttactccttcccggctcaaggagcccactaaagttgcctcaggacgaacgacaccggcacctgtcaatcaaacagacagagaaaaggagaaagctaaggcgaaagcagtggccttggatagcgataatatctcacttaaatcgatcgggtcacctgagagcactccgaaaaatcaggcttctcaccctaccgctactaagctcgccgagctgcctcccacaccactacgggctacagcaaagtcatttgtcaaaccccctagccttgccaacctagacaaggtgaactcgaatagcctcgatttgccttcaagctctgatactacccatgcaagcaaagtcccagacctgcacgccacatcctctgctagcggtggcccactgccatcgtgcttcaccccttctcccgcacctatccttaacattaattcggcttcgttctctcagggacttgagctgatgtctggattttccgtcccgaaagaaacgagaatgtaccctaagctctccggtcttcatcggtccatggagagtctccagatgccgatgtccctgccctcagcttttcccagtagcactcccgttcccacgcctcctgcaccccctgcggctcctacagaggaggagacggaggagctcacctggagcggttcgcccagagctggacagctcgattcaaaccagcgagatcgcaacactttgccgaaaaaagggttgagataccagctgcagtcccaggaggagaccaaagagcggagacactctcacactataggagggctgcccgagtccgacgaccagagcgaattgccgtcaccaccggcactgccaatgtctttgtccgcgaagggccagttgactaacatcgttagtccaacagctgctaccaccccacgcatcaccaggtcaaactccatcccgacccatgaagcagctttcgaactttactctgggtcccagatgggatccacattaagcctcgcagagaggcctaaggggatgattaggtccggaagcttcagggacccaacagatgatgtccacggatccgtcctgagtcttgcctcctccgccagctccacctattctagtgctgaagagaggatgcagtcggagcagatcagaaagctgcgacgggaattagagtcctcccaggagaaggtggctactctaacgtcacaattgtcagctaacgcaaacctggtagccgctttcgagcagagcctggtcaacatgacgagcaggctgagacacctggctgagaccgcggaagagaaagacacagaactgctcgaccttagggagaccatagattttctaaagaaaaagaactcggaagctcaggccgtgattcagggagcactgaatgctagcgagacaactcctaaggaactgcgaattaaacgccagaactctagtgattctattagcagtctgaacagcataacttctcacagctcaatcggctcctctaaggacgccgacgccaagaagaagaaaaagaagagttggttgaggtcatcctttaataaggcgttctctatcaaaaagggccctaaaagcgcttcctcatactctgatattgaagaaattgcaactcctgactccagcgcccctagtagcccaaaactgcagcatgggagcactgagacagcctcaccttcgatcaaatctagcacgtctagcagcgtcgggaccgacgttaccgaaggcccagctcatccagccccacatactagactgtttcatgccaacgaagaggaggagcctgagaaaaaagaggtgagtgagctgcgaagtgagctgtgggaaaaggagatgaaactcaccgacatcagacttgaggcattgaacagtgcccatcaactggatcagctccgcgagactatgcacaacatgcagttggaagtggacttactgaaagctgagaatgaccggttgaaagttgcaccaggcccttcttccggtagtactccgggacaggtgcctggatcttccgccctatcttcccccagacgctctctcggccttgcattaacccacagcttcggccctagcctcgccgacaccgatttgtctcctatggacggcatctcaacctgcggtccaaaggaagaggtgacattgcgcgtggtcgtcaggatgccaccccagcacatcatcaagggcgatcttaagcagcaggaattttttttggggtgttctaaggtttctgggaaagtggattggaaaatgctggatgaggccgtgttccaggtgtttaaggactacatatcaaaaatggatcccgcttccaccctggggctgtctactgagtcgatccatggctactccatatcacatgtaaaaagggttctggacgcggagcccccagaaatgccgccttgtcgtcggggagtcaacaatatttctgtgtctctgaaggggctgaaggagaaatgcgtggacagtctggtgtttgaaacactcataccgaagccaatgatgcagcattatataagcctccttctgaagcacagaagactggtgctgtccgggccttctggcactgggaagacctacctgacaaatcgactcgccgagtaccttgtggagcgcagtggaagagaagtcacagagggcatcgtatccactttcaacatgcatcaacagagctgtaaggacctccaactttatttaagtaacctggcgaatcaaattgatagagaaactggcattggggatgtgccactggtgatattgctggacgatctgtctgaggccggatctatatcagagctggtgaacggtgccctcacctgtaagtaccataagtgtccatatatcattggcacgaccaaccagcccgtgaagatgactccaaatcatggtctccatttgagtttccgcatgcttacctttagcaataacgtcgagcctgccaacggtttcctcgtgcgatacctgagaagaaagctggtggagtctgactccgacatcaacgcgaacaaggaggagttactgagagtgctggactgggttcccaagctctggtaccacctgcatacattcctggagaagcactcaactagcgattttctgattggaccatgctttttcttgtcatgccccatcggcattgaagatttccggacctggttcatagacctgtggaacaacagcatcatcccatatctgcaagagggggctaaggatggaatcaaggtacacgggcaaaaagctgcgtgggaagatccggtggagtgggtgagagacaccctaccatggccctccgcacagcaggatcagtccaaactttatcaccttccgccaccaaccgtggggcctcactccattgcatcccccccagaggaccgaaccgtgaaagattcgacgcccagtagtctggactctgacccacttatggccatgttactcaaactccaggaagccgctaattacatcgaatctccggaccgggaaaccattctggaccccaacctgcaagccaccctgta

SEQ ID NO: 232471 - DNA, 4482 bp, synthetic construct
  misc_feature 1..4482: note = Description of Artificial Sequence: Synthetic coding sequence
  source 1..4482: mol_type = other DNA
atgctgtggcctcgcaatctgacttcctgggacgattccagctctgtgagcagtggcatcagtgatactatcgataacctttctaccgatgatatcaacacatcttcctccattagcagctacgccaacacacccgctagctcacgcaaaaaccttgacgtgcagaccgatgcagagaaacactctcaggtggagagaaattcattgtggtcaggggacgacgtgaagaagtcagacgggggatctgactctggaattaaaatggagcccggttccaaatggcgacgcaacccatctgatgtgtctgatgagtccgacaaatctacaagtgggaagaagaatcctgtcatctctcaaactggcagctggcgcaggggaatgacagcgcaggttggtatcacgatgccgcgaaccaagccttcagcgcctgccggtgcgctcaaaacacctggcactgggaagactgacgatgctaaggtgtcagagaagggcagactgtccccaaaggccagccaggtgaagaggagtccctccgatgccggacgaagctccggcgacgagtccaaaaagcctctgccttcatcctcccggacccctactgccaatgcaaatagctttggattcaagaagcagagcggtagcgccgcaggactagcaatgatcaccgcatccggagtgactgtcacaagcagatctgcaacccttggcaagatccccaagtcgtctgctttagtgtcacgctctgcgggtcggaagtcgtcaatggatggcgcacagaatcaggatgacgggtatctggcactgtcctcccggaccaacctccagtatcgttctctgccaagaccatctaagtcaaactctcggaacggcgcagggaataggagctccacctcctccattgactctaatatttctagcaagagcgccggtttgccagtacccaaactcagagaaccttccaaaactgctctgggatccagcttgcctgggttggtcaatcaaacagacaaagaaaagggcatcagctctgacaatgagagcgtcgcatcctgcaactccgtgaaagtgaatccagccgctcagcctgtttccagccccgcacagacaagccttcaaccgggagccaagtaccccgatgttgcctcaccaacccttcggaggctcttcggagggaagcccaccaagcaagttcctatcgcgaccgcggagaacatgaagaattcggtggtgatttcgaacccccatgctactatgacacagcaaggcaatctcgatagccccagcgggtcaggcgtcctgagctcaggttctagcagtcccctgtattccaaaaacgtggacctcaaccaaagcccgcttgcgagctcgccctcctccgcacatagtgcaccctctaacagtctgacatggggcaccaatgcctcctcatcatctgcagtgtccaaagatggactggggtttcagtccgtatccagcttacacacctcttgtgaatcaatcgacatctccctgtcatctggcggagtgcctagtcacaacagcagcaccggtctcatcgctagtagcaaagatgattcactcacgccattcgttcgtaccaattctgtgaaaacaaccttgagcgaaagcgaccctcacttagaccggaacactctgccaaaaaagggccttcggtacaccccaactagtcaactccgcacacaggaagatgcgaaggaatggcttcgttctcacagcgcaggcggtctccaggataccgctgccaactcaccattctccagcggttcttctgttaccagccccagtgggacacgattcaatttttcacagctggcatcaccaacaactgtcacacagatgagcctatccaatcctaccatgctgcggacacactccctgtccaacgctgacgggcagtatgacccgtataccgatagccggtttaggaacagttctatgtccctcgacgagaagtcaaggacaatgtccagatctggaagttttcgtgacgggtttgaagaggtgcacggcagctccctgtctctggtctcttccaccagctccgtgtacagtactcccgaagagaagtgccagtcagagatcaggaaacttagacgagagctggacgcatcacaagaaaaggtctcagcacttaccacccagctaaccgccaatgcccatctggtagccgctttcgagcagagcctcggcaacatgactatcagattgcagtctctgacaatgactgcggagcagaaagactccgagttaaatgagctgagaaagactattgagctcctgaagaagcagaatgccgcagcccaggccgctattaacggtgttataaataccccagaactcaactgcaaggggaatgggacagctcagtcagctgatctccggattcgaagacagcactcatcagactcagtgtcctccattaattctgcaacctcgcatagctctgtgggcagcaatatagaaagcgactcgaagaaaaagaaaagaaaaaattggttgagatcttccttcaagcaggctttcggcaaaaagaagtcgcctaagtccgcctctagccactccgatattgaggaaatgaccgacagcagcctaccctcatctccgaagctgccacacaacggcagcacaggttctaccccacttctgcgaaactctcatagcaattctcttattagtgagtgtatggacagcgaagcggagaccgtgatgcaattaagaaatgaactgcgcgacaaggaaatgaagctgaccgatatccgcctggaggcgctaagctctgcccatcagctggaccagttgagggaggcgatgaaccgaatgcaatcagagatcgagaaattgaaagccgagaatgacaggctgaagtcagagtctcagggctctgggtgcagccgagccccttctcaggtttcaatctccgcttctcctaggcaatcaatggggttgtcccagcacagtctgaacttgaccgaatctacctccctggacatgctcctagacgacaccggggagtgtagtgctagaaaggaagggggacgccatgtgaaaattgtggtgtcttttcaggaagagatgaagtggaaagaagactcccgaccccacctgttccttatcggttgtattggtgttagtggaaagacgaagtgggacgtgctagatggtgttgtcaggagactgttcaaggagtatattatccacgtggatcctgtctcccagctcggcttgaattctgatagtgtgctggggtatagtattggggaaattaagcgaagtaacacgtcagaaaccccggagctcctcccctgtggctacctcgttggggaaaataccactattagtgtgaccgtcaaaggccttgccgagaatagtctggattcattagtctttgagagtctaataccaaaaccaatactccaaagatacgtgtctctcctgatcgaacaccggagaatcatattaagcggcccaagtgggacaggtaagacatatttggcgaaccggctctcagaatatatcgttctgcgcgaaggcagggaactcacggatggcgtcatcgcaacatttaacgtcgaccataaatcatctaaagaacttcgccagtatctgtctaaccttgccgatcagtgtaactctgagaacaatgcggtggatatgcctctggttattatcctcgataaccttcaccacgtatctagtttgggcgagatatttaacgggctgctgaattgcaaataccataaatgcccttacattattgggaccatgaaccaggccacctcatctacgcctaatctccagttacatcacaacttccgctgggtcctgtgcgccaaccataccgaacccgtcaaaggtttcctgggtagatttctgcgcaggaaactcatggaaacagaaatcagcggcagggttcgaaacatggagttagttaagattatcgactggattcccaaagtctggcatcatcttaatcggtttctggaagcccattcttcatcagatgtgaccattggaccaaggctgttccttagctgtcctatcgatgttgatgggagcagggtatggtttaccgatctctggaattactctattattccttacctgctcgaagcggtaagggaaggtcttcagttatatgggagacgggctccctgggaagatccagcaaagtgggtgatggacacatacccttgggcagcgagtccgcagcagcatgaatggccgcctctgttgcaattgcgcccagaggatgttggttttgatggatactccatgccaagggaagggtcaactagcaagcagatgcctcccagtgacgccgagggagatcccctgatgaacatgctgatgcgccttcaggaagctgctaattactcttcccctcagtcttatgattccgattctaatagcaattctcatcatgatgacattctcgatagtagtcttgagtccaccctgtag

SEQ ID NO: 232472 - DNA, 7289 bp, synthetic construct
  misc_feature 1..7289: note = Description of Artificial Sequence: Synthetic coding sequence
  source 1..7289: mol_type = other DNA
atgcccgctattcttgtggcaagcaagatgaagtccgggctgcctaagccagtgcattcagccgctcccatcctccacgtgcctccagcccgagccggacctcagccctgttatcttaagctgggcagcaaagttgaggtgtccaagacgacttatccttctcagatcccccttaaatcgcaagtgctgcaaggtttacaggaacctgctggagagggtctgcctctccgtaaatccggaagcgtcgagaacggcttcgacacccaaatctatacagactgggctaaccactacctagcaaaaagtggccacaagcgtcttattcgggatctgcaacaggacgttaccgatggagtgctcctcgcacagattatccaggtggtagccaacgagaagattgaggacatcaatggctgtcctaagaataggtcccagatgattgaaaatatcgatgcatgtctgaatttccttgccgctaaaggaatcaatatccaaggattgtccgctgaagaaatacgaaacggtaaccttaaagctattttaggccttttcttttccctcagcagatacaagcaacaacagcagcagccacagaaacagcatctcagctcacccctgccaccagcagtttcgcaggtagccggagcccctagtcagtgccaggcaggcaccccccaacaacaagtacctgttacacctcaggccccttgtcagccacatcagccagcccctcaccaacaaagcaaagcacaggcagagatgcagtcccgcttgccaggaccgaccgccagggtgtctgctgccggatccgaggctaaaaccagaggcggatccactacggcaaacaatcggcgatcccagagctttaataattatgacaagtctaagcccgttactagtcctccccctcctccttcttcccacgaaaaagagccgctagcctcaagcgctagcagccaccctggcatgagcgacaacgctcccgcttcattagagtcgggatcaagctcaacaccaaccaattgctctaccagcagcgccattccgcagcccggagcagctaccaagccatggcgatccaagtcgctttcggtgaaacactcagctactgtgagtatgctgagtgttaaacctccaggaccagaagcacccaggcccactcccgaggccatgaaaccggctcctaacaatcaaaagtcaatgctggagaaactaaagctgttcaactctaaaggcggatctaaagctggtgaaggtcctggaagccgtgacactagctgcgagagactggagacgctgcctagtttcgaggagagcgaggagttggaggcagccagtcgcatgctaacaacagtgggccctgcaagctcgtctcctaaaatcgctttgaaggggatcgcccagcgaaccttttcgcgtgcactcaccaacaagaagagctcattaaaaggcaatgaaaaagagaaagaaaagcagcagagggaaaaagacaaagagaaatcgaaagatctagccaaacgggcttccgtgacagagcgcctcgacctcaaagaagagccaaaggaagatccatcgggcgcagccgtaccagaaatgccaaaaaagagcagcaaaattgcaagtttcattcctaaagggggaaaacttaactctgcaaagaaggagccaatggctccctcacacagtggcatcccgaagcctggcatgaaatcaatgcctggaaagtctccctctgcgccagctccgagcaaggagggtgagagatcgagatctggcaagctcagttcagggctgcctcagcagaaacctcagctggacggacgacactcttcatctagttcctccctggcttcatcagaaggcaagggacccggaggaacaaccctaaatcatagcatctcctctcaaacagtgtctggaagtgtgggcactactcaaactactggtagcaacacggtttctgtgcaactgccccagccacagcagcagtataatcaccccaacacggcaactgtggctccctttctctaccgatcacagactgacactgagggcaatgtgaccgctgaatcatccagtaccggcgtcagtgtcgagcccagtcactttaccaagacgggacagccagccctcgaggaactgacaggcgaagaccccgaggccagaaggctccgcaccgtgaagaacattgcagatctgcgccaaaacctcgaggaaaccatgagctccctgcgaggaacacaggtgacacatagtacactagagactacttttgataccaatgtcactaccgagatgagcggtcggtcaatcctgtctttgacgggccgacccaccccactgtcctggcgtctgggccagtcatcccccaggcttcaggccggagacgctccctccatgggcaatggctatccgcctcgcgctaacgcctccagattcattaacacagaaagcgggcgttatgtctactcagctccactacggaggcaattggcaagtagaggcagctctgtgtgtcatgtggacgtgtccgacaaggctggagatgagatggacctggaaggcattagcatggatgccccaggttacatgagtgacggcgacgtgctttctaaaaatatacgtaccgatgacatcacgagtggatacatgacggacggtggattgggcctatataccagaaggctgaatcggctgcctgatggcatggcggtcgtccgggaaaccctccagcgcaacaccagtctggggcttggcgatgccgactcctgggacgatagcagcagtgtttcgtccggtatttctgacaccattgacaacctgagcaccgacgatatcaataccagctcatccatcagtagttacgcaaatacaccagcttcgagtagaaagaatctcgatgtacaaactgatgcggaaaagcatagtcaggtggagaggaattccctgtggagcggagatgatgtgaagaagagtgatgggggttccgactctggcatcaagatggagccaggctctaaatggcgcagaaatcccagtgatgtaagcgatgagagtgacaaatcaacgtccgggaaaaaaaaccccgtgatttcgcagactgggagctggagacgagggatgacagctcaggtaggtatcacaatgcccaggaccaagccctccgcacccgctggggcattgaagacgcctggcaccggcaaaaccgatgatgctaaggtttccgagaagggtaggctgagtcccaaagcgagccaggtgaaaaggagcccgtctgacgctggccgttctagtggagatgaatcaaagaaaccccttccttccagctctaggacccccaccgcaaacgctaatagctttggtttcaagaagcagtcggggtcggcggcagggctcgcaatgattacagccagtggtgtgaccgtaacatcacgctccgcaacactggggaagattcccaagtcgagcgctctggtctcaagatctgccggaagaaagagcagtatggacggcgctcaaaatcaggacgatgggtatctcgccctaagttcgagaaccaatctgcagtacaggagcctaccacgccctagcaagtccaactcaaggaacggcgcaggtaacaggagctccacgtcgtccattgacagtaacatctccagcaaaagcgcgggactcccagtgccgaagctcagggaaccatccaagacagcgcttggatctagcttgcctggcctggtgaaccagactgataaagagaaagggatctcatcagacaatgagtctgtggcctcctgcaactctgtgaaagtgaatcctgccgctcagcctgtgtcctcccctgcccagacttctctacagcccggtgcgaaatacccagatgttgcctctcctaccctccggagactgtttggcggtaaacctacaaaacaggtgcccatcgcaacggctgaaaacatgaagaactcagtcgtgataagtaatcctcacgcgacaatgacccaacagggcaacctggacagccctagcgggtccggggtgctcagcagcggcagctcttccccactttacagcaaaaacgtcgatttaaaccagtccccactggcctcctcgccatctagcgctcatagcgcgcctagcaattccctgacttgggggaccaatgcatcttcttcatccgctgtttctaaagacgggctcggatttcagagtgtgtccagtctacacacttcatgtgaatccatagatatctctctgtcctcaggcggagttccctctcacaatagctccacaggactgatcgcctctagcaaggatgatagcctcacccctttcgtacgtaccaactctgtgaagaccacattatccgagagtccgttgtcatccccagcggcaagccctaagttttgccgtagtacactgcctcgcaagcaggacagtgacccgcatctggatcgcaataccctgcccaagaaaggtctgcggtacaccccaactagccagctccgtacccaagaggatgctaaggaatggctcaggagccactccgcaggaggattgcaggacactgccgctaactctcccttttcatccggtagcagcgtcacctccccatcaggaacacgcttcaatttcagccaactggctagccctacaaccgtgacccaaatgagcctctctaatcctaccatgttacggacgcactctctctctaacgccgacgggcaatacgacccctatactgacagccggttcaggaattcatcaatgtctcttgatgaaaagtcgagaacgatgagtcggtcaggctcctttagagacggctttgaggaggtgcatggatccagcctgtctctggtgtcatccacctcctcggtctacagcacacctgaggagaaatgccagtcagagatcagaaaactgcgtcgggagttggacgccagccaggaaaaggtttcggccttgaccactcagctgacagccaatgcccacctggtcgccgctttcgagcagtctttaggtaacatgacgattagacttcagagcctgacaatgacagcggagcagaaagattccgaattaaatgagctacgcaagacaattgagctgctgaagaagcaaaacgcagccgcacaggccgcaataaacggggttataaatacgcccgagctgaattgcaaaggtaacgggacggcccagtctgcggatctgcgaatccggcgtcagcattcttccgattctgtgtccagcatcaattccgcaactagccactcatctgttggtagtaatatcgaatcggacagtaaaaagaaaaagagaaagaactggctgagatctagctttaaacaggctttcgggaaaaagaagtcccccaagagcgcctcctctcacagcgacatcgaagaaatgacggattcctctctaccgtcctccccgaaactgcctcacaatggatccacgggtagtactcccctgctcagaaatagccacagcaactccctgatcagtgagtgcatggactctgaggcagaaactgtcatgcagctgaggaacgaactgcgagacaaggagatgaaactgactgatatccggctggaggctctctcgtccgcccaccagctggaccagctgcgagaggctatgaacaggatgcagtcagaaattgaaaagctgaaggccgaaaacgaccgacttaaatcagagagtcaaggcagtggctgctcaagagctccttctcaagttagcattagcgcctccccaaggcagagcatgggtctcagccagcactccctcaatctgaccgagagcactagcctggacatgttactagacgatacaggagaatgttcagcccgaaaggagggagggaggcatgtgaaaatcgtggtgtcattccaggaagaaatgaaatggaaagaggactctcgccctcacctgtttctgataggatgcatcggtgtttctgggaaaaccaagtgggacgttctagatggagtcgtccgcaggctatttaaggagtatatcattcatgtagacccggtctcgcagctaggtctgaattccgacagtgtcctgggctacagcatcggagagattaagcggtccaacacatcagagacaccggagctcctcccctgtggttacctggtgggggaaaacaccacaatcagcgtgacagtgaaaggcctggccgagaattcactggactcccttgtgtttgaatccttgatcccgaagccaatcctccagaggtatgtgagtcttctgatcgagcatagacgcatcatactgagtgggccatccggtaccgggaagacttacctggcaaataggctgtcagaatacattgttctgcgtgagggccgagaactgactgatggggtgatagcaaccttcaatgtagatcacaaaagctccaaggagcttagacaatatcttagtaacctcgctgaccagtgcaattccgagaacaatgccgttgatatgcccctggtcataattctggacaacctgcaccacgtatcgtctctgggcgagatctttaacgggctgttgaactgcaaatatcataagtgcccatatattatagggactatgaatcaggcaacatccagcacgccaaacttacagcttcaccataactttcgatgggtgctctgcgccaaccacactgaaccagtcaagggcttcctcggtaggttcctacgacgcaagctcatggagaccgaaatttctggacgggtgcgaaatatggaattggttaagatcatagactggatacccaaagtctggcaccaccttaaccggttcctggaggcacactcatcgagcgacgttacaattgggcctcgactctttttgtcctgtcccatcgacgtggatggctctagggtatggttcacagacctgtggaattacagtatcattccctatctcctcgaagccgttagggagggtctgcagctgtacggccgaagggcaccctgggaggatcccgcaaaatgggtcatggacacttacccttgggcggctagccctcagcagcacgaatggcctcccttattacagttgcgtccagaggacgtaggatttgatggatactcaatgccccgagaaggctccactagcaaacagatgcctccttcagacgcggagggtgatccattgatgaatatgctaatgcgccttcaggaggctgcaaattactcgagcccccagtcctatgactcagattccaattccaatagccatcacgacgacatcctagatagttcactcgaaagtactctgta

SEQ ID NO: 232473 - DNA, 7298 bp, synthetic construct
  misc_feature 1..7298: note = Description of Artificial Sequence: Synthetic coding sequence
  source 1..7298: mol_type = other DNA
atgcctgcaattctggttgcgtccaagatgaagtcaggactccccaaaccagtgcattctgctgccccaattttacacgtgccccctgcaagagctggtccccagccctgttatctgaagctcggaagcaaggttgaagtgagcaagacaacttatcctagccagatcccactcaagagccaggtccttcagggtctccaggaaccagctggcgagggcctacccctgagaaagagcggatccgtcgaaaatgggttcgacacacaaatttacactgattgggctaatcactacctcgcaaagtctggccacaagcgattgatcagagacctccagcaagacgttacagacggggtgctgctcgcccagattattcaggtcgtggcaaacgagaaaatagaggacataaatggctgtcccaaaaaccgctcccagatgatcgaaaacatcgatgcttgcctgaactttttagctgctaaagggataaacatccagggccttagcgccgaggagatccggaacgggaacctaaaagctattctcggcttgtttttcagtctcagtagatacaaacagcagcagcaacagccacagaagcagcacctgtcgtctccattgcccccagctgttagtcaggtggctggggcaccaagccagtgccaggctggaacacctcaacagcaggtgcctgtgactccacaggcaccgtgccaacctcaccagcctgcacctcatcaacagtctaaagcgcaggcagagatgcaatctaggttacccggtccaactgccagggtgtccgccgcaggctcagaggcaaaaacacggggtgggtccacaactgccaacaacaggagatcccagagctttaacaactatgataagtccaagccagtcacaagccccccacccccaccttcgagtcacgagaaggagccgcttgcttcttctgccagctctcaccccggaatgtccgataatgcacctgctagtcttgagagtggatcttcatcgacccccactaactgcagtacttcctctgccataccccagccaggcgctgcgacaaagccttggcgcagcaagtcattgtccgtgaaacacagtgccacagtgagcatgctttccgtgaagccacccggtcctgaggcccctcgtccgacccctgaagccatgaaacctgccccaaacaatcagaagtccatgctagaaaaactcaaattgtttaacagcaaaggaggcagcaaggccggagaaggcccagggtctcgcgacacctcgtgtgaaagattagagactttaccgtctttcgaggagtccgaggagctggaggcagcttcccgaatgttgaccaccgtgggacccgcaagctcatcccccaaaatcgctctgaaagggatcgcccagaggacattctctcgcgcactgacaaacaagaaatcttcgctgaagggaaacgagaaggagaaagaaaagcagcaaagagagaaggataaggagaaaagcaaagatctggcaaaacgggctagtgtgaccgaacgtctcgatctgaaagaggaaccaaaagaggacccctcaggcgcagcagttccagaaatgcccaaaaagagctccaagatcgcaagtttcatccccaaaggtgggaagctgaattctgcaaagaaggagcccatggcacccagccactccgggatcccaaagcctgggatgaaaagcatgcctggtaaaagtccctccgcaccagctcctagcaaggagggggagagaagtcgctccggtaaacttagctccgggctacctcagcagaaaccacaattggatggaaggcattccagttcatcttcaagcctggcctcctctgagggcaagggcccaggcggtactactctcaaccactctatctcctctcagacagtgagcggctctgtcggaacaacccaaacaacaggctccaacacagtgtccgttcagctgccgcaaccacaacaacagtataatcatccaaacaccgccacagtggctccttttctttatagatcacagaccgatactgagggtaacgtgactgctgaaagttctagtaccggcgtatcagtggagccctcacattttacgaaaaccggccaacctgccttggaggagcttactggtgaagatccggaggctaggcgactgcggactgtaaaaaacatcgcagatttgagacagaatttggaagagacaatgagttctctgcggggtacacaggtaacccacagcaccctggaaaccacttttgacacaaacgtcaccacagagatgtcaggcaggtcaatccttagcctgaccggtaggcccacacccctgagttggcgcctgggtcagagttctcctcgattgcaggccggagatgcaccgtctatgggcaacggatatccacccagggccaacgcgtctcgcttcatcaatacagaatctggcagatatgtttacagcgcccctctccggaggcaactggcttctaggggctcctccgtgtgtcatgtcgacgtgtcggacaaagcaggggacgagatggacctggaggggatatccatggacgccccaggctacatgagcgacggcgacgtactgtcaaaaaacatcaggaccgacgatattacatcaggctatatgaccgatggtggtcttggtctgtatacacgcaggctgaatcgcctgcctgacggaatggcagtcgtccgggaaactttgcaacgcaatacctctctgggacttggagacgccgatagctgggacgattcatcgagcgtgtcatcaggcatttccgatactatagacaacttatccaccgatgatatcaatacaagctcatctatcagctcttatgccaataccccggcatcaagccggaagaatctagacgtccaaactgatgctgagaaacactctcaggtggagcgcaattccctctggagtggagacgatgtcaagaaaagcgacgggggttccgattcaggtattaagatggagccaggctctaaatggagacgcaaccctagcgacgtctctgatgagagtgataagtcaacgtctggaaaaaaaaacccagtcatctcacagaccggcagttggcgcagaggaatgaccgctcaggtaggtatcactatgcctagaacgaagccctcagcaccggctggggctctcaagacccccggaacagggaagactgacgacgctaaggtgtcagaaaaaggccgactaagccccaaagccagccaggtcaaacgctctccttccgatgccggaagatcttccggagacgagtctaaaaaaccactgccgagtagcagtcggacgcctactgcaaacgcgaattcttttggattcaaaaagcagtccggcagcgcagctggactagccatgattaccgcatcgggcgtcactgtgacctccagatccgctacactcggcaaaatcccgaagtctagcgccctggtttcacggtcagccggtcgaaaaagctctatggatggagcccaaaatcaggacgacggatatctggcgctctcatcacggactaatcttcagtatcgatcactccccaggccaagcaaaagcaacagtcgcaacggcgctggcaatcggagcagcacatcctcaatcgatagcaacatctctagtaagagcgccggtctaccagtacctaagctcagggagcccagcaaaacagctcttgggagctctctgcctggtctcgttaaccagaccgataaagaaaagggcatctcttctgacaacgagtctgtggctagttgcaacagcgtgaaggtaaaccctgcagcacagccagtgagtagccccgcacagacctctcttcaacctggagcaaaataccccgacgttgccagtcccacactgcggagattgtttgggggtaagccaactaagcaggtaccgattgcgacagccgaaaatatgaaaaattccgtcgttatctcaaatccccatgctaccatgacccagcaggggaatctggactctccctccggctcaggcgtcctgtcttctggctcaagcagtcctttgtatagcaaaaatgtcgacctgaatcagtccccactagcctccagccccagttcagcgcatagcgcgcctagcaacagtcttacttggggaactaacgcaagctcttccagcgctgtatcgaaagacgggttgggcttccaatctgttagcagtctccacacatcatgcgaaagtattgatatttccctctcctcgggtggcgtgccttctcataattcctccactggactgatcgctagttcaaaggacgactccctgaccccatttgtgagaacaaacagcgttaagacgacactgagtgagagtcctctgtcttctcctgccgcttccccaaagttttgtcgctctaccctcccacgcaagcaggactcagatccacacctggacaggaacaccctccccaaaaaaggccttcggtacactcctactagtcaacttcggacgcaggaagacgccaaggaatggcttcggagccattccgctggcggactgcaagatacagctgctaacagtcctttttctagcgggtcatctgtgaccagcccaagtggaaccaggttcaatttcagtcagctcgcatcccccaccacagttacccagatgtcacttagtaatcctaccatgctaaggacccactcactttctaacgctgatggtcagtacgatccatacaccgatagccgtttccgaaattcttcgatgtcattagatgaaaaatcccgtactatgagccgcagcggtagctttcgcgacgggtttgaggaggtgcacggaagctccttaagcctcgtatcaagcacttcgtctgtatacagtacccccgaggaaaagtgccagtctgaaatcagaaaactccggagggaactggatgccagccaggagaaagtgtctgctcttaccactcagctgactgccaacgctcacctggtggccgcatttgagcaatccctgggcaatatgacaataagattgcagtccttgacaatgaccgccgagcagaaggattcagagttgaacgagctgcggaagactatcgaattgcttaagaagcagaatgctgctgcgcaggcagctatcaatggtgttattaataccccggagttaaattgtaagggaaacggaactgcgcaatccgccgacctcaggatccggagacagcactcatctgatagcgtctcttccatcaactccgccacttcacactcttctgttggctctaacatcgaatcagatagcaaaaaaaaaaaaagaaagaactgggtcaacgagctcaggagttctttcaaacaggcattcgggaagaaaaagtctcccaagagcgccagcagccacagtgatattgaggaaatgactgattcatccctgccctcctcccctaagcttccccacaatggatctacaggtagtacccccctgctacggaacagtcacagcaattcacttatttcggaatgtatggacagtgaggctgaaactgtgatgcagctgagaaatgaactcagggacaaggagatgaaactaacagacattcgccttgaagctctttcatccgcacatcagctcgaccagctgagagaggcaatgaatcgcatgcagtctgaaattgaaaagctgaaggccgaaaacgaccgactcaagtcggagtcccaggggtctggctgctccagagctccaagccaggtgtcaatttctgcatctcccaggcagtccatgggccttagtcaacacagtctcaatctgacggagtctacctctctggacatgctcttggacgacaccggggagtgttcagcaaggaaagaaggcggacgccacgtgaaaatagtcgtttcttttcaggaagagatgaaatggaaggaagacagcaggccacacctgttcctgatagggtgcataggcgtctccggaaagaccaagtgggatgttctggacggggtcgtgcggcgactcttcaaggagtacataatccatgttgacccggtttcccaattgggcctgaatagtgactctgtcctcggctattccatcggggagatcaagcgctctaatacttctgagacacctgagctcttgccatgcggatacttggtgggtgaaaatacaacaatctctgtgactgtcaagggcttggccgaaaactccctggattccctggtcttcgagtccctcatccccaaacccatcctgcagagatatgtgtcattgctgatagagcatcgccgaataatcctgtccggacctagcggtaccggtaaaacgtacctggccaaccgactgtccgagtatatcgtcctcagggagggcagagagctcactgacggagtgattgctacctttaatgtggatcacaagagctccaaggaacttaggcagtacttgagtaacctcgcagaccaatgtaattcggaaaataacgccgtcgacatgcccttagtcataatactggataacctccaccatgtgagctctttaggtgaaatttttaatggcctcctgaactgtaagtaccataagtgcccgtacattatcggaaccatgaatcaggcgacgtcaagcaccccaaatctccagcttcaccacaactttagatgggttttgtgtgccaatcatacagagccagttaaaggctttcttggcagattcctcaggcggaagctgatggagaccgagattagtggtagagtgcggaatatggaattagtaaaaattatcgactggatccccaaagtctggcaccacctgaaccggtttctggaagcgcattccagctcagatgtgaccatcgggcctcggctgtttctgtcgtgccccatagacgtcgacggatcacgcgtctggttcacagacctgtggaactactccatcataccataccttttggaggccgtgagagaaggcttacagttatatggcaggcgagccccttgggaggaccctgccaaatgggtgatggacacatacccctgggctgccagcccccagcaacacgagtggcctccattgctgcaactccggcctgaagatgtgggcttcgacgggtattctatgcccagggagggctcaacctcaaaacagatgcctcctagcgatgctgagggtgaccctttgatgaacatgcttatgaggctccaggaagccgctaattactccagcccccagtcttacgatagcgattccaactctaattctcaccacgatgacatcctggactcaagcctcgaaagcaccctgta

SEQ ID NO: 232474 - DNA, 7466 bp, synthetic construct
  misc_feature 1..7466: note = Description of Artificial Sequence: Synthetic coding sequence
  source 1..7466: mol_type = other DNA
atgccagctatccttgtggcgagcaagatgaagtccggcctgccaaaacccgtccacagtgccgcacctatcctgcacgtgccgccagcaagagccggaccccagccctgctatttgaagctgggctcaaaggtggaagtttccaagacgacttatccatctcagatcccattgaagtcacaagtattacaggggcttcaggaacccgctggcgaagggttgcctctgagaaagtctggtagtgttgagaatggatttgatacccagatctatactgactgggctaatcactatctagctaagtctggacacaagcgactaatcagagacttgcagcaagatgtgaccgacggcgtgttgctcgctcagatcattcaagttgtcgccaacgagaagattgaagacataaacgggtgtccaaaaaacaggtcccagatgattgaaaatatcgacgcctgcctgaattttctggcagccaaaggaataaatattcaagggctttccgctgaggagatcagaaatggtaatctcaaagcaatcttgggactatttttttctctttcacgctataaacagcagcagcaacagcctcagaaacagcatctgtcttcacctctcccccctgccgtgagccaggtcgctggggctcccagtcagtgtcaggcaggcactccccagcaacaggtcccagttacccctcaggctccttgccaaccccatcagccagcccctcaccagcagtctaaagcacaagccgagatgcagtccagtgcaagcagcaaagattcgagccagagcaagatcatcaggtttacgctcggtcagaagaaaatttccagattaccgggaccgaccgccagggtgtctgccgcagggagcgaagcgaagactcgcggaggctctacaacggccaataatcgaaggtcacagtccttcaacaactatgataaaagcaagccagttacatcccctccgcctcctccctccagtcacgagaaagagcccttggcctcctctgctagttcacaccctggcatgtcagacaacgctcccgcaagtttggagtcgggcagtagtagtactcccacaaattgttcaaccagcagtgcgattccccagccaggtgccgctacaaaaccgtggaggtccaagagtctcagtgtgaagcattccgccactgtgtccatgctgtccgtaaaacctccaggcccagaagcccctagaccaacccccgaggccatgaagccagcaccgaacaatcagaagtccatgttggagaagctgaaactctttaatagtaagggcggtagcaaagcaggggagggcccaggctcaagggacacatcctgtgaacggcttgagactttgccatctttcgaggagtctgaggagctggaagccgcaagccgcatgttgactactgtgggacctgcatcttcatctccgaagatcgcacttaagggaatcgcccagcgcaccttttcccgggctctgacaaataagaagagctctcttaaaggtaatgagaaagaaaaggagaaacaacagcgcgaaaaggataaggaaaagtccaaggacctagctaagagggcaagtgtgactgaacgactggatctgaaagaggagcctaaagaagacccgtccggggctgccgtacctgagatgccaaaaaagtccagtaagattgcttctttcatccccaagggaggcaagctgaatagcgctaaaaaggaaccaatggccccttcacattctggaattcccaagcccggaatgaagtccatgccaggcaagtctccttcggcacccgcacctagcaaagaaggggagaggtccagaagtggcaagctgagctctggactgccccaacaaaaaccgcagctggatggtaggcattcatcctcgtcttcttccttagcctctagcgaaggtaagggaccaggtggtactactctcaaccattccataagctcacaaaccgtgagcggctccgtgggaacaacccagactaccggttcgaatactgtaagcgtgcagctgccccaaccgcagcagcagtacaatcatcccaacacagcaaccgtagcaccttttctgtaccgcagccagaccgatacagagggaaacgttaccgccgaatccagctccacaggcgtgagcgtcgaaccaagccacttcactaagaccggccagcctgccttagaggaactcacaggcgaggatcccgaagccagacgtctgcgtacagtgaagaatatagctgatctgcggcagaacctggaagagactatgagctctttgaggggcacacaggtaactcacagtactctggaaacaacattcgatacgaacgtaaccacagaaatgtccggacgatccatcttatcactcaccggacgccctaccccattatcatggcggctgggacagtcgagtccacgactgcaggctggcgacgcaccaagcatgggaaacggataccccccacgcgctaacgcttcacgtttcatcaacactgaatcgggcaggtatgtttatagcgccccattgaggcggcagctcgctagccgcggaagtagtgtgtgccatgttgatgtttccgacaaggctggtgacgaaatggacctcgaaggcatcagcatggacgctcctggatatatgtctgatggcgatgttttgagcaaaaacatcagaacagatgacataactagtggctatatgaccgatgggggtcttggattatacactaggcggctgaacagactgccagatgggatggccgtcgtgagggagacattgcaaaggaatacgtccttgggtctgggcgatgccgatagttgggacgactcatcttcagtgagttctggcatttctgatactatcgataatctctccaccgacgacatcaacactagtagcagcatttccagttacgctaatactccagcttcttctaggaaaaacctggatgttcaaaccgatgccgagaagcactctcaggtcgaaagaaattccttgtggtcaggcgacgacgttaaaaagtcagacgggggatcggactcaggcataaaaatggagcccggatctaaatggcggagaaatccgagcgacgtctctgatgagagtgacaaaagcactagcggtaagaagaatccagtcattagtcagaccggatcctggcgtcgcggtatgacggctcaggttgggatcaccatgcctcgtaccaagccctcagcaccagcaggcgctctgaaaacacctggaacgggaaagacagatgatgctaaggtttctgaaaaaggacgcctgtctccaaaggcatcccaggtgaagagatctccctccgatgcaggaaggagtagtggcgacgaatctaagaagccgcttcccagttcatcccggacccctacagctaatgctaattcctttggtttcaagaaacaatccggatctgccgctggccttgcgatgatcacagctagcggggtgactgttacatcaagatcagccaccctaggaaaaattcctaagtcttcagcactggtgtcaagatctgcgggtcgaaaatcttctatggatggcgcacagaatcaggacgacggatatctggccctgtcttccaggaccaacttacagtaccgctctctcccccgtccgtctaaaagtaattcccgcaacggtgccggaaatcgctcctccacgtcaagcatcgattccaatatcagctcgaaatcagccggactgcccgttccaaagttaagagaaccatccaagacagcgctggggagttctctgcccggacttgtgaaccaaaccgataaggagaagggcatcagctctgataatgagagtgtggcgagctgtaacagtgtcaaagttaaccctgcggctcagcctgtcagctcacctgctcaaacctcgctgcagccaggggcaaaatatccagacgtagcctcccccaccctgcggaggctattcggcggaaagcccaccaaacaggtgcccatcgcaaccgcagagaacatgaaaaactccgttgtcatcagtaacccgcacgctacgatgacccagcaggggaacctcgattccccttcaggctctggtgtgctgtccagcggaagctcctcccccctgtacagcaagaacgttgacctgaatcagagccctctggcctcttccccctcaagtgcccattctgcgcctagtaactcgctgacctgggggacaaacgcatcctcctcatccgccgtttctaaggacggactgggatttcagagcgtctcatcccttcacacctcatgcgagtccatcgacatctccctctcgtccgggggagtccctagccataactcctccacaggcctgatagccagctcaaaggatgactccctcacaccatttgtgcggaccaatagtgtgaagactacactgtcagaatcaccgctttctagccccgctgcaagcccgaaattctgtagaagtactctgccgcgtaagcaggactccgacccccacctggaccgtaatactttgcccaagaagggactgcggtatacccctacgtcacaacttagaacccaggaggacgcgaaggagtggctgagatcgcactccgctggcggactgcaagacactgctgccaatagtccgttctcatcgggctcttctgtcacttccccctccggaacccgcttcaacttcagtcagttggcctcacctacgacagtcacccagatgagcctgagcaaccccactatgctacggacacactctctctctaacgcagacggacagtacgatccatataccgattcaagattccgtaatagcagtatgagccttgacgagaagtcaaggactatgtccagatccggctcgtttcgggacgggtttgaagaggaaagctgggagaagtcatctgtggacaatttcgtttcaagattacattcgagcctgcatttctccctgcccctgtttcaccacgctagatatgagctggtccacggttcctcactttcactggtcagctccacatctagtgtgtactctactcctgaggagaagtgccagtccgaaatacggaagttaagaagagaactcgatgcgtcccaggaaaaagtgtctgcccttaccacccagctcacagcaaatgctcacctcgtggccgctttcgaacagtcacttggaaatatgacaatacgcttgcaatcccttaccatgactgctgagcagaaagactctgagttgaacgagctgcgtaagacaatcgaattgctgaaaaagcagaacgctgcagcccaggccgctatcaacggcgttattaatacccctgagttaaattgtaagggcaacggcacagcacaatcagctgacttaaggattcgtagacagcactcttccgatagcgtgtctagcatcaatagtgccacatctcatagcagcgtaggaagtaacatcgaaagcgactctaagaaaaagaagagaaaaaactgggttaacgagctgagatcatccttcaaacaggcattcgggaagaagaagtctcccaaaagtgctagcagtcactccgacatcgaagaaatgaccgactcttctttgccatcgagcccaaaattgcctcataacggcagtactgggagcacacccttgcttcggaactcccactcaaactcactgatcagcgagtgcatggactccgaagcagaaacagtgatgcagcttcgaaacgagcttcgagacaaagaaatgaagctaactgatataaggttggaggctctctccagcgcacatcagctggatcagttacgagaagcaatgaacaggatgcagtccgagattgagaagctgaaagccgaaaatgatcgcctgaagagcgagtctcaaggatcaggatgtagcagagcaccgtcccaggtcagcatcagcgccagtccacgccaaagcatgggtctgagtcagcattcgctgaacctgacggaaagcacttccttagacatgctgcttgacgatactggcgaatgcagtgcgagaaaagagggaggcaggcatgttaaaattgtagtgtccttccaagaagagatgaagtggaaagaggattcccggccacacctgttcctcatcgggtgcattggagtcagtggcaaaacaaaatgggatgtgctggatggcgtggtgagacggctgtttaaggaatacatcatacacgtcgaccctgtgagccagctgggcctgaattcagattccgtcctgggatactcgatcggcgagattaagagatccaacacatccgaaacaccagagttgctcccctgcggctatctggtcggcgagaataccactataagcgtgacagtcaagggccttgccgaaaacagcctagactccctagtcttcgaaagcctcattcccaagcctattttgcagaggtacgtcagcttactaatcgagcaccgccgtatcatcctgagcgggccaagcgggactggcaaaacatacctagctaacaggctgagtgagtatatcgtgcttcgcgaggggagagagcttaccgacggcgttattgccacattcaatgttgatcataaaagcagtaaggaattacgccagtacctctccaacctggccgaccagtgcaatagcgaaaacaacgcagtggacatgcctctggtgattatcctcgacaatctgcatcacgtcagttctctcggtgagattttcaatgggctgctcaactgcaagtatcacaaatgtccttatatcatcggaacaatgaatcaagcaaccagctctacgcccaatctgcagctgcatcacaatttccgctgggtgctgtgcgccaatcacaccgagcccgttaagggctttctggggcgtttcctgcgacgaaagctgatggaaacagagatcagtgggagagttcgcaatatggaactcgtgaaaattattgactggatcccgaaggtttggcatcacttgaatcggtttctggaggctcacagcagcagcgatgtcaccattgggccaaggctgttcctgagttgtcccatcgatgtagacggaagtcgtgtgtggttcactgatctatggaactactctattatcccatacctgctggaggccgtcagggaaggtctccagctatacgggaggcgcgctccatgggaggacccagctaaatgggtcatggacacgtatccttgggctgccagtccacaacaacacgaatggccccctctgctgcagcttaggccagaggatgttggtttcgatggttactcaatgccccgtgaaggaagtacatctaagcagatgcctccgagcgacgcagagggcgatcccctgatgaacatgttgatgcgcctgcaggaagccgcaaactactcctccccccaaagttacgactccgatagtaactcaaactctcatcatgatgatatcttggacagtagcttggaatcgaccttata

SEQ ID NO: 232475 - DNA, 7253 bp, synthetic construct
  misc_feature 1..7253: note = Description of Artificial Sequence: Synthetic coding sequence
  source 1..7253: mol_type = other DNA
atgtcagttatgctgtggcgatgggaacagaataataccaccatgaaattgcaaatatatactgactgggccaatcactacctggcaaagagtggccataaaaggctgattcgcgaccttcagcaggatgtcacagatggcgtgctgctcgcccagatcatacaagtggttgcgaatgagaagattgaggatattaatggttgccctaaaaatcgctcccagatgatcgagaatattgacgcatgcttgaacttcctggccgctaagggcattaacattcagggactaagtgccgaggagataagaaatgggaatctcaaggctattttgggcttgttcttttccctcagcaggtataagcagcagcagcagcagccacagaaacagcacctttcgtcacccttacctccggctgtgtcacaggtggctggagctcctagccagtgtcaggctgggacacctcagcagcaggtccctgtgacaccacaagcaccatgccagcctcaccagccagcaccccaccagcaaagcaaggcacaggctgaaatgcaaagctccgccagttccaaagacagtagccagtccaagattatcaggttcaccctgggccagaagaaaatttcccgacttcccggtcctactgccagagtatctgctgctggaagcgaagcaaagacacgcggtgggagtactaccgccaacaatcgtcggtcgcagtcttttaataattatgataagtcaaagcccgttacttccccacccccacctcccagttctcatgaaaaggagccactggcctcctcagcttcatctcaccccggtatgtcagacaatgccccagccagcctggagtcagggtcgagttctacaccaaccaattgcagtacgtcatcagcaattcctcaaccgggagcagcaacaaagccatggagaagcaaaagcctgtcagtgaagcactcggccactgtctcgatgttgagtgtaaagcctccgggacccgaggcaccccgaccaacccctgaggccatgaaaccggcacccaataatcaaaagagtatgctagaaaagcttaaattgtttaacagcaagggcggaagcaaggcaggcgaaggtccgggatcccgtgatacctcttgcgaacgcctggagacacttccctccttcgaagaaagtgaagagctggaagccgcttctcggatgctgacaaccgttggcccagcctcctcaagtcctaagatcgcactgaagggcattgcacagaggacgttctcgcgggcacttaccaacaagaaatcttcgctgaaaggcaatgagaaagagaaagaaaaacaacaacgggaaaaagataaggagaaaagcaaggatcttgcgaaacgagcgtcagtaactgaacggttagatctcaaagaagaacctaaagaggacccaagcggtgccgcagtgcccgaaatgccaaagaagtcttcaaaaatcgctagctttatccccaagggaggaaaactcaattctgcaaaaaaagagccaatggcaccctctcactcagggattcctaagcctggcatgaagtctatgcccggaaaaagtccttccgcaccagccccaagcaaagaaggcgaacgctccaggtcagggaaactgagctccgggttgccgcagcagaagccacagctggatggtcgccattcgtccagtagttcatccctagcgtccagtgagggcaagggtcctgggggaaccaccctgaaccattcgatttcttcccaaacggtgtccggtagcgtgggaacaacacaaacgactggtagcaatactgtttcggtccagctgcctcaacctcagcagcaatataaccaccccaacaccgctactgtggccccttttctatacagaagtcagacagacacagagggaaatgttaccgccgagtcaagctcaacaggggtgtctgtggaaccatcacacttcactaagacaggtcagcccgcactggaggagctcactggagaggatccagaggccaggagattacggaccgttaaaaatattgctgacctgagacagaacttggaagaaacgatgagttccttgaggggcacccaggtcacccactctacgttggagaccacttttgacaccaatgtgacaacagagatgtccgggagatccatacttagcctcactggacgccctacacctctctcttggcggctcggccagtcctcacccagactacaggccggtgatgcaccatccatgggcaatggatacccacctcgggctaatgcaagccggtttattaacaccgagtccggcagatatgtttacagcgcaccgctccgcagacagctcgcctccagaggaagttctgtgtgtcatgtggatgttagtgataaagcaggagacgagatggatttagaaggaatttccatggacgctcctgggtacatgtccgatggtgatgtactgagcaaaaacatcagaacggatgatattacgagcggttatatgactgacggcggactgggactctacactaggagactgaataggttgcccgatggaatggccgttgtccgggaaacactgcagagaaacacatcactgggtttaggcgatgctgattcttgggacgactcaagttctgtttcaagcgggatcagcgacactatcgataaccttagtaccgacgatatcaacaccagctctagtatctcctcctacgccaacacacctgctagcagccggaaaaacctggacgtgcagacggacgccgagaaacatagtcaggtcgaaaggaattccctgtggtcaggcgacgacgtgaaaaaatccgatgggggttccgattcagggataaagatggaacctggttctaagtggagaagaaacccctctgacgtgtccgatgaatcagacaagagcacttcaggcaagaaaaaccccgtgatatctcagacaggcagctggagaaggggtatgaccgcccaagttgggatcactatgccacgaacaaaaccctccgctccagccggagccttgaagaccccaggaaccgggaaaactgacgatgccaaggtgtccgaaaaaggcaggttgagccccaaagcatcccaagtcaagagatctccatctgatgcagggagatcgagtggagatgagtctaaaaagcccctacctagttctagcaggacgcctaccgcgaacgccaacagtttcggtttcaagaagcaatctggaagtgccgcaggacttgctatgatcaccgcttctggggtgacagtgacaagcaggagtgctaccctcggcaaaattccaaagtcaagcgctctcgtgtccagatctgccggacgcaagtccagcatggacggcgcacagaatcaggatgacgggtacttagccttatctagccgcacgaacctgcagtaccgatctttgcccaggccttctaagagcaatagccgaaatggcgctggcaataggagctccacttcttcaatcgactcgaatatctcaagcaaatccgcaggtttgccagtgcccaagttgagggagccgtcaaaaaccgctttggggtcatccctccccggactggtgaaccagacggacaaagaaaagggtatctcttctgataacgagtctgtcgcttcatgtaacagtgtgaaggtgaatccggctgcacagcccgttagtagccccgcacagacaagtttgcagcctggggctaagtaccctgacgtggcatcgccaacccttcgaagactctttggtggaaagcccactaagcaggtccctatcgccaccgcggagaatatgaagaattccgtagtgatttctaatccacatgccactatgacacaacagggcaatttagattcccccagcgggagcggggtgctttcatcggggtcttcatctccgctttattctaagaacgtggacctgaaccagtcaccactcgcatcttctccatcctccgcccactccgctccatcaaactccctcacgtggggaaccaacgcttcttcatccagtgccgtgagcaaagatggattgggatttcaatccgtgagctctttgcacactagttgcgagagcatcgacattagcttgagtagcggcggtgtgccatcccataactctagtacaggcctgatagcttcaagcaaggacgactcactaaccccctttgtacgtacgaattctgtcaagactaccctgtctgagtcccctctaagttcacccgcagcatctcctaaattctgcaggtccaccctgccacgcaagcaagattctgaccctcatctggaccggaataccctgcccaaaaaggggctgcggtacactccaacgagccagctgcgaacgcaagaggacgccaaagaatggcttaggtctcatagtgccggaggcctacaagacactgcagcaaactctccatttagtagtggctcctcagtgacaagtccttcaggaacaagattcaatttctcccaactcgcttctcctaccacagtaacccagatgtctctctccaacccaacgatgctccgcacccattcattgtccaatgcagatggacaatacgatccctatacggatagtcggttcagaaacagtagtatgtctctggacgagaaaagccggacaatgagcaggagcggtagcttccgggatggattcgaggaggagagctgggaaaagtcatccgttgacaatttcgtatcccgcctccactcgtctctgcattttagtttgccactgttccatcacgcaaggtacgagctggtccatggttcctctctgtcactcgtgagttcgacctcctccgtttactctacccctgaagagaagtgtcaatctgagatcaggaaactgagaagagagctggacgcgtctcaggaaaaggtgtcagcattgaccacccagctcaccgcgaacgctcacctggtagccgcttttgaacaatcgctcggaaacatgaccatccgcttacagagtctaactatgaccgccgaacaaaaagattccgagctgaatgaattgcgaaagactattgagctgcttaaaaagcagaacgccgcagcacaggcagcgatcaatggggtgattaatacgccggaacttaactgtaagggaaatggtaccgcccagtccgccgacttgcggattcgccgacagcactcgagtgactccgtatcatcaatcaatagtgctacaagtcattctagcgttggatccaatatcgaaagtgacagtaagaaaaaaaagcgaaagaattgggtgaatgaacttcgtagcagtttcaagcaggcctttggtaagaagaagagtcccaaatccgcctcctcacatagtgacatcgaggagatgactgacagcagcttgccgagcagccccaagctgccccataatggctcaactggctcgaccccactactgagaaattctcatagtaacagccttatcagcgaatgcatggatagcgaagctgaaaccgttatgcaactaagaaatgagctgcgtgacaaggagatgaagttgaccgacatcaggctggaagcgctaagttctgcccaccagttggaccagctgcgtgaagctatgaacaggatgcagtctgagattgaaaagcttaaggcggaaaatgataggctgaaatctgagtctcaagggtcaggctgctccagggcaccctcccaggtgtctataagcgcctctcccaggcagtctatgggtctgtctcagcactcccttaatctgactgaaagtacgtcactggatatgctgctggacgacactggcgaatgttcggcgcgtaaggaaggcggtaggcacgtcaagatagtagtctctttccaagaggaaatgaagtggaaagaagattcgagaccccatcttttcctgatcggatgcatcggagtttccgggaaaaccaagtgggacgtgctggatggcgtcgtgagacggctttttaaggagtatattatccacgtagatcctgtgtctcaactgggtctgaactcagatagcgtgcttggctactcaattggggagatcaagcggtcaaatacatccgagactcccgagctccttccctgcgggtaccttgtgggggagaacacgaccatctcagtcacggtcaagggcctcgctgaaaactcactggactctctagttttcgaatcccttattcctaagcccatccttcaacgatacgtaagcctccttatcgagcaccggaggattatattgagtggcccatctggaacaggaaagacatacctcgcaaaccgactttccgagtatatcgtgttgagagaaggcagggagctcaccgatggcgtcatcgctaccttcaacgtggatcacaagtcttctaaagaactgcgtcaatatttgtctaacctcgctgaccagtgtaattccgagaacaacgcagtcgatatgcccctcgtaatcatcctcgataacctgcatcatgtgagcagtctcggtgaaatttttaacggcctcctgaattgcaaatatcacaaatgcccctatatcattggcacaatgaaccaggccacaagtagcacaccaaacttgcaacttcatcataatttccggtgggtcttatgtgcaaatcacactgaaccagtgaaaggctttctcggcaggttccttagacggaaattgatggaaacggagatttccgggagggtacgcaatatggagttggtaaaaattattgattggatccccaaggtatggcaccatctgaataggttcttagaagcacattcctcgtctgacgttaccattggtcctagattgtttcttagttgcccaatcgatgtggatggtagcagagtttggttcaccgacctgtggaactactctatcatcccttatctgttggaagcagtcagggaggggctgcaactatacggccgtcgcgcaccatgggaggaccccgcaaagtgggttatggatacctatccttgggctgcctctccccagcagcacgagtggccgccactcctgcagctaagacccgaggacgtggggtttgatggatattccatgccacgggagggctcaacctctaagcagatgcctcctagtgacgcagaaggggaccctctaatgaacatgcttatgcggctgcaggaagccgctaattactcctccccacaaagttacgattcagactctaatagcaattcccaccatgatgacatccttgactcctctctggaatctactctcta

SEQ ID NO: 232476 - DNA, 4482 bp, synthetic construct
  misc_feature 1..4482: note = Description of Artificial Sequence: Synthetic coding sequence
  source 1..4482: mol_type = other DNA
atgttatggcctcgaaatcttacttcgtgggatgacagtagctcagtgagcagcggcattagtgataccattgacaacctttctaccgacgacataaacacgagttcctctatcagttcttatgccaatacaccagcctcttcaagaaaaaatctagatgttcagactgatgccgaaaaacactcccaggtcgaaagaaattcgttgtggagcggtgacgacgttaagaagtccgacggaggcagcgactctggcataaagatggagcccggatcaaaatggaggcggaatccctcagatgtgagtgacgagtcggataagtcaacatctggcaaaaagaaccccgttatatcccagacgggctcctggagacgcggaatgaccgcacaagtgggtatcactatgccgcgaaccaagcctagcgcacccgctggggcactcaaaactcctgggaccgggaagactgacgatgccaaggtgagcgaaaaggggaggcttagtcccaaggctagccaggtgaagaggtctccttctgacgcaggcagaagtagtggcgatgagtctaagaagccactgccctcaagctcccgtacacctaccgccaacgccaacagcttcggcttcaaaaaacagtccggctcagcggcaggacttgcaatgattactgcttcgggagtaactgtgacctcccgaagcgccacactaggcaagattccaaaaagcagtgctttggtctccagaagcgccggtcgcaaatcatccatggacggggcacagaaccaggacgacggataccttgccctatcaagcagaacaaatctacagtatcgctcactgccaaggccgagcaaaagtaatagtcgcaatggggctggaaacaggagctcgacaagctcaattgactccaatatcagtagcaaaagtgccggacttccagttccaaagctgcgtgaaccatcgaaaacagctcttggctcttctctgccaggactggtgaaccagacagacaaagagaaaggtatatctagcgataacgaatctgtagcctcttgcaactctgtcaaagttaatccagctgcccaaccagtgagttcaccagcgcagacatcactgcagccaggagcgaaatatcccgatgtagcctcgccaacgctgaggcgactgtttggcggtaagccaacaaagcaagtgccaattgccacagccgaaaacatgaagaactccgtggttatcagcaatccccacgccactatgacgcagcagggcaatctggatagtccttctggaagcggcgttttgtctagcgggtcatcgagcccgttatatagtaagaatgtcgatcttaatcagtcaccactggcctcctcacctagcagcgcacactccgccccaagtaacagtctgacttggggaaccaatgcctcaagctcgtccgcagtgagtaaagatggattgggttttcagtctgtatcgagccttcacactagctgtgagagcatcgacatatccctgtcaagtggaggcgttccatctcacaattcctccaccggcttaatcgcttcttccaaagatgatagtctcactccttttgtgcgaaccaactctgtgaagacaaccctgtctgaatccgatcctcatctggaccggaacactctacctaaaaaggggctgcgctatacccctacaagtcagctgcgcacacaggaggacgcgaaagagtggctgcgctcacactccgctgggggattgcaagataccgcggcaaattccccattttcctcaggttctagtgttacaagtccttctggcacccgtttcaacttttctcagctggcttccccaacgaccgttacacagatgagcttatccaatcccacaatgctgcgcacacatagcctttcgaatgctgatgggcagtacgacccctatactgacagccggtttagaaattcttctatgtcactggatgagaagtcacggaccatgagccggtccggatcttttcgggacggtttcgaggaggtgcacggctcttctctttcgctggtgagttcaacctcctctgtttacagcacccccgaggaaaagtgtcagtcagagatcaggaagttgagaagagaactggacgccagccaggaaaaagtttcagccctgaccacacagttgacagcaaacgcacatctggtcgccgcttttgagcagtcgctcggaaatatgacaataaggctgcagagcttgaccatgaccgcagagcagaaggactccgagctgaacgaacttcgcaaaacgattgagctgttgaaaaaacagaatgccgctgcccaggccgctatcaatggagtgattaacacgcccgagctgaattgcaagggaaacggtacagcacagtccgctgatctgaggataaggagacagcactctagcgatagcgtgagttctattaacagtgcgacctcacatagcagcgtgggtagcaatattgaatccgactccaagaagaagaaaagaaaaaattggctgcgatcatcctttaaacaagccttcggtaagaaaaagtccccaaagtcagcctcttcccacagcgacatcgaagagatgaccgacagttccctaccatcgtcgccgaagctgccacacaacgggagcaccgggtctacacctctgctgagaaattcccacagcaactccttaatatctgagtgcatggatagtgaagccgagaccgtaatgcaattacggaacgagctccgggacaaggagatgaagctcaccgacattaggttggaagccctgtcgagtgcgcatcagcttgaccagctgagagaggctatgaaccggatgcagtcagagatagaaaaacttaaggccgagaatgacagactcaagtctgagagccagggctcaggatgtagtcgggctccatcccaggtctctatctctgccagccctaggcaatctatggggctctcacagcacagtttgaatctcaccgagtccacatctttggacatgctgctggacgacacgggcgagtgttcggcgaggaaggagggtgggagacatgtgaagattgtcgtctcgttccaggaggaaatgaaatggaaagaggacagtaggccccatcttttccttatcggctgcattggtgtcagcggaaaaaccaaatgggatgtcctcgacggtgtggtacggagattgttcaaagaatacattatccacgtagaccccgtttcccagctgggcttaaactctgactcggtgcttggctactccatcggcgaaatcaaacgcagtaatacgagtgagaccccggagctgcttccctgtggatacctcgtgggcgaaaacactaccatctcggttaccgtcaagggcctcgccgagaactccctcgattccctggtttttgagagcttgatccctaaacccatcctgcaaagatatgtaagtctgttgattgagcaccggcgaattattctcagcgggccttctggcacaggaaaaacatacctggccaaccggctttctgaatatatcgtgctgagggagggccgagaattaaccgatggagtgatagccaccttcaacgtcgaccataaatctagcaaggagctacggcagtacctctccaacctggcagatcagtgtaattctgaaaacaacgcagtggatatgcctctggtcatcattctggataacttacaccacgtgtcttccctcggggagatcttcaacggactcttgaattgtaaataccataaatgtccctatatcatagggaccatgaaccaggccactagtagtacgccaaatctgcaactccatcataatttcagatgggtgctgtgtgctaaccacaccgaacccgtcaagggtttcttgggccgatttctgaggcggaaattgatggagacggagatctctggccgagttaggaacatggaactggtgaaaatcatcgattggatccccaaggtatggcaccatttaaatcgcttcctggaagcccactcttcatcggatgtgaccattggaccacgattgtttctttcttgccccatagacgtcgacggcagccgcgtgtggtttaccgatttgtggaactacagcattataccgtacctgctcgaagctgtgagagagggtctgcagttgtacggacgtcgtgcgccttgggaggatcctgccaagtgggttatggatacatacccttgggcagcctcgccacagcagcacgagtggcccccattactgcaattgcgcccagaagacgtcggtttcgatggatacagtatgccaagggaaggttccacttccaagcagatgcctccttcggacgccgagggagaccccttaatgaacatgcttatgcgtctgcaggaagctgcaaactactcctctccccaatcttatgactcggattcaaacagcaattcccaccatgatgatattctcgatagctccctcgagtctacactgtag

SEQ ID NO: 232477 - DNA, 2451 bp, synthetic construct
  misc_feature 1..2451: note = Description of Artificial Sequence: Synthetic coding sequence
  source 1..2451: mol_type = other DNA
atgctgtggcccagaaacctgacttcgtgggatgattcctctagcgtaagttccggcattagtgacaccattgacaatctgtctactgacgacattaacaccagctctagcatttcttcgtacgctaacaccccagcctcttctcggaagaatctagacgtccagactgatgcagagaagcacagccaggtggaacgcaactccctgtggagcggcgacgacgtcaagaagagcgacggcggaagcgactccggaataaagatggagccagggtccaaatggaggagaaatccatccgacgttagtgatgaaagcgacaagagtacctccgggaagaagaatccggtcatctcacaaaccggatcttggaggcggggaatgacagcacaagttggcattactatgcctagaacaaaaccctctgcgcctgccggagcactcaagacccctggaaccggcaaaaccgatgatgccaaagttagcgaaaagggtagactgtccccaaaagcctctcaggttaagaggtccccaagcgatgctggtcgctcttctggtgacgaatctaagaaaccccttccctcctcatcaagaacccccaccgctaatgccaacagctttggtttcaagaagcagtccggctctgcggctgggctggccatgatcaccgcttctggagtgacggtcacttctagatctgcaactcttgggaaaatcccaaaatcaagcgcccttgtcagcaggtccgctgggagaaaatccagcatggatggggctcagaatcaggacgatggctacttagccctcagctcccgtacaaatcttcaatatagatcactccctaggccctctaaatcaaacagcagaaacggagccggaaacagaagttcaacaagctcgatcgatagcaacatttcctccaagagtgcagggcttcccgtcccaaaactgagagagccaagtaaaacagccctggggtcatccctgccaggactagttaaccagacagataaagagaagggcattagctccgacaacgaaagcgtggctagctgcaatagcgtgaaggtcaatcccgcagcccagccagtctccagtcctgcccagacttctctccagcctggagctaagtatcctgacgtcgcgtcgcccaccctgcgcagactgttcggtgggaaaccaaccaagcaggtgcccatcgcgacggccgagaatatgaagaactcagtcgttatatctaacccacacgcaaccatgacacagcagggcaatctggacagccctagtggcagcggtgtcctctctagcggctcatcgtcccccctgtactccaaaaatgtggacttgaatcagagccctctggcgagttcaccctcctctgcccacagcgctccttccaactccctcacatgggggacaaatgcctcctcttcttccgcggtctcaaaagatggtctgggtttccagagcgtcagttcgctccacaccagctgtgagagcatagacatctctctgagcagcggcggagttccttcccacaattcaagcactggattgattgctagttccaaagacgactccctcacaccatttgttcgcaccaactccgtgaaaacaaccttatccgaacgctatactcccaccagtcagctgcggactcaagaggacgctaaggaatggctgcggagccacagcgccggagggttacaggatacagccgcaaactccccattttcttcaggctcctccgttacaagcccatccgggactcggtttaatttttctcaactggcatctcctaccaccgttacccaaatgagcctaagtaaccctacaatgctgcgaacacactccctgtccaacgctgacgggcagtacgacccttataccgactcacgattccgcaatagctctatgtcactggatgagaaatcacggactatgtccaggtctggttcttttagagacgggttcgaggaggtgcacggtagcagcttgagcctggtttccagtacttcctccgtgtatagtacacctgaggaaaagtgtcaatcagaaatcagaaaattgaggagggaactcgatgcttcccaggagaaagtatctgcccttaccacccagctgacagccaacgcccatttagtcgcagcttttgagcaatctctgggaaacatgaccatccgcttgcaaagcttaacgatgactgcagagcagaaggactcggaactgaacgagcttaggaagactatagagctgctaaagaaacagaatgccgctgcacaggccgctataaacggggttattaacacccccgagctcaactgcaaaggaaatgggacagcccaatccgccgacttgaggattaggcggcagcacagctctgactccgtgtccagtattaattccgctacatcacactcttcggtggggagcaacattgaaagtgattcttag

SEQ ID NO: 232478 - DNA, 7259 bp, synthetic construct
  misc_feature 1..7259: note = Description of Artificial Sequence: Synthetic coding sequence
  source 1..7259: mol_type = other DNA
atggctatagacctctattgcggtttagcatgcttgtggggcatacatgagccaaggcagatctacaccgattgggctaaccactacctcgcgaaaagcggacacaagaggctgattagggacctacagcaggatgtgacggacggagtgctgctggcccaaatcatccaggtagtcgcaaatgaaaaaattgaagacatcaatggatgtccaaaaaatagaagtcaaatgattgagaatatcgatgcttgtttaaattttctcgcagctaagggaatcaatatccaagggctgtccgccgaggagatcagaaacggaaacctgaaagccatcctcgggctattctttagcttgtccaggtataaacagcagcagcagcagccacagaagcagcatctaagtagtcccttgcctccagccgtatcccaggttgccggagcgccttcccagtgtcaggccggaaccccacaacagcaggtgccagtcacaccacaggctccatgtcagccccatcagcctgcaccacaccagcagtcgaaagcacaggccgaaatgcagagcagcgccagctctaaagactctagccagtccaaaattattcggttcaccctgggccagaaaaagatttcccggctacctggccctaccgccagggtttcagcagccggttccgaggcaaagactagaggcggttctaccactgccaacaatagacgctcacaatccttcaacaactatgacaagagcaagcctgtgacatcaccccctcctcctccgagcagccatgagaaagagccactggccagcagtgccagttcacacccaggcatgtccgacaacgccccagcctccctggaatcggggtcgtcttctacgccaactaattgttctacaagctctgctatccctcagccgggagcggctacaaagccttggaggagcaagtccctgtccgtgaagcatagtgccactgtatccatgctctccgtgaaacctcctggtcctgaagcccctcgtccaacaccggaagcaatgaaaccggcaccgaataaccaaaagtctatgctggagaagctgaagctattcaactcaaaaggaggctccaaagcaggggaaggtcctggctctcgcgacacgtcctgcgagcgtctggaaacattacccagcttcgaagaatcggaagaactggaggctgcgtcgagaatgctaacaactgtgggccctgccagcagcagtcccaaaattgcgctgaagggaattgcccagagaacattcagcagggcccttacaaataaaaaatcctctctgaaggggaacgaaaaagaaaaagaaaagcagcaacgcgaaaaagataaggagaagagcaaagatttagccaagagagccagcgtgaccgagaggctggacctgaaagaggagccaaaggaggaccctagtggggctgcagtgccagaaatgcctaagaagtctagcaaaattgcctccttcatccctaaggggggaaaactgaattctgcaaagaaagaaccgatggccccttcgcattctggaatcccaaagcctggcatgaaaagtatgcccggaaagtcaccctctgccccagccccttccaaagagggcgaacgatcgagatctgggaaactcagttctggcctgcctcaacagaagcctcaattggacggcagacattcatcatcctcatcctctcttgcttcttctgagggcaaagggcctgggggaacaaccttgaatcacagcattagctcccaaaccgtatctggatcagtggggaccactcagactacaggctctaatacagtgagcgtgcagctgccacagccacagcagcaatataaccaccctaatactgcaacagtggcaccctttttgtacaggtcgcagacggatacagaagggaacgtcacagcagagtcttcatctactggcgtgtcagtggagccctcccactttactaaaaccggtcagcccgctttagaggaactgacgggggaagatcctgaagctcggagactgcggacggttaagaatatcgctgacctacgacaaaatctggaagagactatgtcctccctccggggtacccaggtgacccacagcacgctggagacgactttcgatacaaacgtgaccacagagatgtcaggcaggtccatcctgagcctcactggtaggcctacacccctgagttggcgtctggggcagagctcgccgagactgcaggcgggagatgccccttcaatgggtaatgggtaccctccccgtgccaacgcaagcagattcattaatacagaatctggacgatatgtgtattccgcaccactgcggcgtcagttggctagtagaggttcatccgtgtgccatgtggatgtgtctgacaaagccggtgacgaaatggacctcgaagggatcagcatggatgctcccggttacatgagcgacggagacgtcctcagcaagaatataaggacagatgatattacctccggctatatgaccgacggcggtcttggcctgtacactcgtcgcctcaatcgcttaccagacgggatggcggtggtgagagagaccctgcagcgtaacactagcctcgggctcggggatgccgattcctgggatgactcctcttcagtcagctcaggcatatctgacaccatcgacaacctgtcaacggatgacattaataccagttcatccattagttcttacgctaacactccagccagcagccgaaaaaacctagacgttcagaccgacgctgaaaaacattcgcaggtggagaggaacagtctgtggagcggagacgatgtaaaaaaatccgacggtgggagcgactcgggcatcaaaatggagcctggcagtaagtggcggcgaaacccatcagatgtgtcagacgaatccgataaatccaccagcgggaagaaaaatcccgtgatctcccaaacaggctcatggcgccgaggtatgaccgcacaggtgggtatcaccatgcctcgcacgaagccttccgctcctgctggcgcactgaaaacccccggtacggggaagacggatgacgccaaagtgtctgaaaagggccgtttgtctcctaaggcatctcaagtaaagcggagcccctccgacgccggacgctctagcggtgacgagtcgaaaaagccactaccttcctcttcacgcacccctactgcaaacgccaatagctttggttttaagaaacaaagcgggtcagccgcaggtcttgccatgatcaccgcatctggcgtgacggtgacatcccggtcagccacattggggaaaatacctaagtcatccgcattagtgtcacggtcggccggaaggaaaagcagcatggatggcgcacagaaccaggacgacggatacctagccctcagcagccggacaaacctgcaatatcggagtctgcccaggcctagtaagtcaaacagcagaaatggcgctggaaaccgttcctctacttcatcaatcgactctaatatcagttccaagtcagcaggactccctgttccaaaactgagagagccctctaaaaccgctctggggtcttccctgcccggtctggtgaatcagaccgataaagaaaagggcatcagctcagataacgaatcagtagccagttgcaatagtgttaaagtgaacccagcggctcaacccgtgtcctcgcccgcacagacctctttgcaaccaggagccaagtacccagatgtagcatcgccaacactgcgcaggctgttcggcggtaaacctacaaaacaggtaccgatcgccacggccgagaatatgaaaaactccgtggttatctcgaacccccacgccactatgactcagcaaggcaacttggattcaccttctggtagcggcgttctgtcatctggtagttccagccctctctactctaagaacgtggatttaaatcagtccccactcgccagctcgccaagctctgctcactccgccccttcgaatagcctcacatggggtacaaacgcctcatcctcatcagctgtttccaaggacgggctcgggtttcagtcagtttcgtccctgcacactagttgtgaaagcatcgatatctcactttccagcggaggggttccaagccacaatagttctaccggccttatagcttcaagtaaggacgacagccttaccccgtttgtgaggacgaattcggttaaaaccacactttcagaaagcccactctcctctccagccgcatcacctaaattctgtcgtagcaccctgcctagaaagcaggactcagatcctcatctggacagaaacactcttccaaagaaaggccttaggtacactcctacttcccagcttaggacccaggaggatgcgaaggagtggctccgatcgcattctgctggtggcctacaggataccgcggcaaattccccattcagtagcggcagcagcgtcaccagtcccagcgggactcggttcaattttagtcaactcgcttccccaactacagtgactcagatgtccctgagcaaccctacaatgcttaggacccattcgctgtctaatgccgatgggcagtatgacccatacactgacagtagatttaggaacagctcaatgagcctcgacgagaagtctcgaactatgagccgcagcgggtccttccgtgatggattcgaagaagagagctgggaaaaaagtagcgtcgacaacttcgtcagcaggctccactcatctcttcacttctccttgccactgtttcatcacgccagatacgagttagtacatggatcgagcctcagcctggtgagctccaccagcagtgtgtacagcacacctgaggaaaagtgtcagtcagagattagaaagctgagacgggagctcgatgccagtcaggagaaggtttcagcactgacaacacagctgacagctaacgcgcacttagtcgccgctttcgagcagtcgttaggtaacatgactattcggctgcaatcattgactatgacagctgaacagaaggatagcgagcttaatgagctgcggaagactatcgagttgttgaagaagcagaacgccgcagcacaagcggcaattaacggagtgatcaataccccagagctgaactgtaaaggtaacggaacagcacagtcggcagacctgcgtatacgacggcagcattcctccgactccgtgtcgtccataaatagcgctacatctcacagtagtgtgggtagcaatattgagagtgactccaaaaaaaagaagcggaaaaattgggtcaatgagctgaggtcttctttcaaacaggcgttcgggaaaaaaaagtccccaaaaagcgcatcatcccactccgacatcgaggaaatgaccgacagctctcttccttcatcccccaaactacctcataacggctccaccggatccacgcctctgcttcgcaatagtcacagtaattcacttatttccgagtgcatggactccgaggccgagaccgtaatgcagctgaggaatgagttgagagacaaggaaatgaagcttacggatattcggctagaagctctgtcctctgcacatcagctggaccaactgcgagaggctatgaacagaatgcagtccgagattgagaagctgaaggctgaaaatgatcggctcaaaagtgaatctcagggcagcggatgtagccgagcccctagccaagtgagcatttcggcgtcaccaagacaatctatgggcctgtcacagcactcattaaatctgaccgaatcaacctctctggacatgctgctggatgataccggggaatgcagcgctcgaaaggaaggtggcaggcacgtgaagatagtggttagcttccaagaggagatgaagtggaaggaagactccagaccgcatctgtttctgataggctgtattggggtgtccggaaaaacaaagtgggacgtcctggacggagtggtgagacggctatttaaagaatatatcatccatgtagatcccgtgtcacagctcgggctgaactctgattctgttctgggatattccatcggggaaatcaagcggtctaacaccagtgaaactccggaacttttaccgtgcggatatctggtgggcgagaacacaaccatcagcgtgactgtgaaaggcttggccgagaactctctggatagccttgtgttcgagtctctgatacccaagccaatactccagagatacgtatcacttttaattgaacaccggaggattattctgagtggccctagcggaacggggaagacttatttggcgaatcgactcagcgaatacattgtactgcgggagggacgcgaacttacggacggtgtgattgccacctttaatgtcgaccataagagctcaaaagaactgaggcagtacctgtccaatctcgcagaccagtgcaactcggagaacaatgccgtagatatgccgctggtgattatccttgacaacctccatcatgtgtcctctctcggagagatattcaatggcctgctcaactgtaagtatcacaagtgtccatacatcatcgggactatgaaccaggcgacatccagcacgcctaatctgcagttgcaccacaactttcgctgggtgctgtgtgctaatcacaccgaaccagtgaaaggctttttaggcaggtttctccgcagaaaattgatggaaacagagatctccgggcgtgtgcgcaatatggaactcgtcaaaattatcgattggattccaaaggtgtggcatcacctaaatcggttcttagaagctcactctagcagcgatgtgaccatcgggccacgactgtttctttcttgcccaatcgacgttgacggcagccgcgtgtggtttacggatctgtggaattatagcataattccgtacctgttagaggccgtgagggaaggcctgcagttgtatggcagacgggcaccgtgggaggacccggctaagtgggtgatggatacatatccctgggccgcttctccccaacaacatgagtggcctcctctgcttcagctgaggccagaagatgtcgggttcgatggctactccatgccccgagaaggatcaacatctaaacaaatgccacccagcgacgcggagggcgatcccttgatgaacatgctgatgagactacaggaagcagccaactatagcagcccccagagttatgacagcgattctaatagcaacagtcaccacgatgatatcctggacagctccctagagtctaccctcta

SEQ ID NO: 232479 - DNA, 7097 bp, synthetic construct
  misc_feature 1..7097: note = Description of Artificial Sequence: Synthetic coding sequence
  source 1..7097: mol_type = other DNA
atggagtcagttagcgaatcctcccaacagcagaagaggaaaccggttatacacggactggaggaccagaagagaatttacacagattgggctaaccactatctggctaagagcggacacaaacgccttatccgcgacctgcaacaggatgtgaccgacggtgtactccttgcccagataatacaggtcgtagcaaacgagaagatcgaagatattaatggctgccctaaaaaccggagtcagatgatcgaaaatattgatgcatgcctgaactttcttgccgcaaagggcatcaatatccagggcctttcagccgaggaaattcgaaatggaaatctgaaggccattctaggtctgtttttttccctgtcccgctataaacagcagcagcagcagccacaaaagcagcatctcagtagcccgttacccccagcagtctcccaggtggcaggcgctccctcccagtgccaggctggcacgccacagcagcaggttcccgtaactcctcaggcaccgtgccagccacaccagcccgcaccccatcaacaatctaaggcacaggctgagatgcagtcaagattaccaggcccaacagcccgtgtgagtgctgctggaagtgaggccaaaacaagaggaggttcgaccacagccaacaaccgacgtagccagtccttcaacaactatgataagtctaagcctgtcacaagcccccctcccccacctagtagccatgaaaaagagccgctggcgtccagcgcaagctctcacccaggaatgtctgacaatgcccctgcctcactggagtcaggctcctccagcacacctactaactgttcgaccagctccgccatccctcagcctggtgctgccaccaagccgtggcgtagtaagtctctgagtgtcaagcacagcgcaacagtttcaatgctttccgtgaaacccccagggcctgaagcccctcggccaacacccgaagccatgaaacctgcgcctaataaccagaagagcatgctggaaaagctgaaactgtttaactcaaaaggcggaagtaaagctggcgagggtccaggatctagagacacttcctgcgaaagactggaaacattgccttcattcgaggaaagcgaggagttagaagccgcaagtcgcatgttaaccaccgtagggcctgcaagttcatctcctaagatagctctaaagggcattgcgcagcgcactttttcaagagctcttactaataaaaaaagcagtctcaaaggcaatgaaaaagagaaggagaaacagcagagagagaaggataaggaaaaatccaaggatctcgcgaagagagcaagtgtgacggaaaggctagacttgaaagaggagcccaaagaagacccctctggggcagcagtaccggaaatgcctaagaagagctcaaagattgccagcttcattcctaaaggaggtaagctgaacagtgctaagaaggagcccatggccccaagtcatagcgggatcccaaagccaggtatgaagtcgatgccgggaaagtcccccagcgccccagcaccatccaaggagggagaaaggtcccggagtgggaagctgagttctggtttacctcaacagaaacctcaactggatggacggcattcatctagcagttcctccttggcctcttcagaagggaaggggcctggagggacaactttaaaccacagtatcagtagccagaccgttagcggctccgtcggaaccacacagactacaggctcaaacacggtgtctgttcaactgccccagccccagcaacagtacaaccatccaaacaccgctaccgttgcgccatttttgtatcgctcccaaactgatactgaaggtaatgtgacggcggagtcttcttcaaccggtgtttccgtggaaccttctcattttacgaagactgggcagcctgccctggaggaactcactggcgaggacccggaggccagaaggctgcggactgtgaaaaatatcgctgatctgcggcagaatctcgaggagaccatgagtagccttaggggcacccaagtgacacacagtacactggaaacaacctttgatactaacgtcactaccgaaatgagcggacggagtatattatcccttacagggaggcccacccccctctcctggcggctgggtcagtcttcacccaggctccaggctggcgacgctcctagcatgggcaatggctacccccctcgagctaatgcttcacgattcattaatacagaaagcggcaggtacgtgtattccgctccgctgcgaaggcagctagcttcaagaggcagctcagtctgccacgtcgacgtcagcgataaggctggcgacgagatggacttggaggggatttccatggatgctccgggatatatgagtgacggtgacgttctcagcaagaacattaggacagatgatattacctcaggttatatgacagatgggggactgggcctgtatactagacgcctgaaccgtcttcccgatgggatggcagttgtgcgggagacactacaaaggaatacctcactcggccttggggatgcggattcttgggacgactcatcgtctgtatcatctggcatctccgataccatcgataacctgagcacggacgacattaatacctctagcagcatctcttcttatgccaacacccctgcctctagccgcaagaacctggatgtccagacagacgccgagaaacactctcaggtcgaacgcaattctttgtggagcggcgacgatgtgaagaagtctgatggagggtccgacagtggtatcaagatggaacccggatcaaagtggcggagaaacccttccgatgtgtctgacgagtctgacaagtccacttccggaaagaaaaaccctgtgatttctcagaccggatcctggagacgtggcatgactgcacaggtcggaataaccatgccgagaacaaaaccctctgcgcctgcaggtgccttgaagacaccaggcactgggaaaactgacgacgctaaggtgtcagaaaagggacgcttgtctccaaaagcatcccaggtcaaacggtccccatctgacgctggcaggtctagtggggacgagagcaagaagcctctccccagctcctctcgcacgccaaccgctaatgcaaactcatttggattcaagaagcagagcggctctgcagccggattggcaatgattactgcttcaggcgtgacagttacctccaggagcgcgaccttagggaagatcccaaagtcctctgccttggtgtcccgcagcgccggacgtaaatcctctatggatggagcccagaatcaggatgatggctatttggctctgtcttcccgcacaaacctccagtatcgctcactccctcggccaagtaaaagcaattcgcgtaacggggctggaaaccgtagctcaacctcaagcatagactctaatataagctctaagagtgctggtctcccagttcccaaactcagagaaccgtctaagactgccctgggatcctcattgcctggactggttaaccagacagataaggaaaaaggaatcagctctgacaacgaatcagtggcttcttgcaactccgtcaaagtcaatccagccgcacagcctgtgtccagccctgcgcagacatccctgcagcccggtgccaaataccctgacgtagctagtcctaccctgaggcgactgtttggcggaaagccaaccaagcaggtgcctatcgccacagccgaaaatatgaaaaattctgttgtgatcagcaatccccacgcaacaatgacccaacaaggcaacctggactcaccatccgggagtggtgtgctgtccagtggtagcagcagccccctgtattccaaaaacgtggacctgaatcaatcaccgttggctagcagtccgagctcagcccattctgcgccaagcaactcacttacttggggtaccaacgcgtccagtagttctgccgtgtccaaggacggactggggttccaaagcgtttctagcctgcatacaagttgcgaaagcatcgatatctctctcagcagcgggggtgtcccttcccataatagcagtactgggctgattgcctcaagcaaggatgacagtttaacccctttcgtgagaactaacagcgtaaaaacaacgttgagcgagagtcccttaagctcccctgccgcaagccctaaattctgccggtcaacgctgccaagaaaacaggactcagatccacatcttgaccgaaacaccctcccgaagaaaggacttagatatacgccaacaagtcaattacgcacgcaggaggacgccaaggagtggttgagaagccatagtgcaggcggtctgcaggataccgcagccaactctccgttctcatccggatcgtctgttacttccccttctggcactaggtttaactttagccagctggcctcgccaaccacagtgacacagatgtctttgtctaacccgaccatgcttcgcacccactctctgagcaatgccgacggtcaatatgacccttataccgattccaggtttaggaacagtagcatgtcactggacgaaaaaagtcggacaatgagccgatctggcagttttcgcgacggcttcgaggaggtgcacggctctagcctgtccctcgtatcctccacctcttctgtttactctacgcccgaagaaaaatgtcagtctgaaattaggaaattgagacgggaactggacgcgagtcaggaaaaagtgtccgccctgaccactcagcttacggcgaatgcacatcttgtggcagcttttgagcagtccctgggaaatatgaccataaggctgcagtcactgactatgacagcggagcagaaagactcagaacttaacgaactgaggaagaccattgagctgctcaaaaagcaaaatgcggcagcgcaggcagccatcaatggagtgattaatacaccagagctgaattgtaaaggaaacggcacggcacagagcgcggacctgcgcattaggcggcaacatagctccgatagcgtcagttctatcaacagcgcgacctctcacagttctgttggcagtaacatcgagagtgacagcaaaaagaagaaaaggaagaattggctgagaagttcttttaagcaagcctttggcaaaaagaaatctccaaagagcgcttccagccattctgacatcgaagagatgacggacagtagcctgccttcgtcccccaagctgcctcataacggcagtactgggtccacccccttactgcgcaactcacattcgaattccctgatcagtgagtgcatggacagcgaggctgagaccgtcatgcagttgcggaacgagctgagggataaggaaatgaagctgacggatatccggcttgaagcattgagcagtgctcatcaactggaccagctacgcgaagccatgaaccgtatgcaaagtgagatcgaaaagctcaaggccgagaacgaccgcctgaagtcagaaagccagggtagtgggtgtagtcgggcaccatctcaggtttccatctctgcttcccctaggcaaagcatgggcctttcccagcacagcctcaacctgaccgagtcaacctccctcgatatgttactagacgatactggtgaatgctccgctaggaaggaagggggtcgccatgtaaaaatcgttgtgtcctttcaggaggaaatgaaatggaaggaggatagccgtccccatctgttcctgatcggttgtattggagtgtctggcaagacaaaatgggacgtcttagacggggttgtgagacgtctcttcaaggagtacatcatacatgtagatcccgtgtcccagctgggcttgaactcagattcggtgctcggctactccattggcgaaatcaagaggtctaacacctctgaaaccccagagctacttccatgcggctacttggtcggcgagaacactaccatttctgtcaccgtgaagggcctggcggaaaatagccttgattccttggtttttgagagtctcattcccaagcctatcctgcagcgttatgtatctctgctgattgagcaccgtagaatcatcctgtctgggcctagcggaacaggaaaaacatatttagcaaatagactgtccgaatatattgtgctgagggaaggcagggagctcaccgatggagtgattgccacatttaatgtggatcacaagtcttctaaagagctgaggcagtaccttagtaatctggccgatcagtgcaactccgagaacaacgcagtcgatatgccgctggtcatcattctcgataacctgcaccatgtgagctccctgggagagatctttaatgggctgctcaactgtaagtatcacaaatgcccgtacatcattggaaccatgaatcaggccacaagtagtacaccaaacctgcagctgcaccataattttcgctgggtactctgcgcaaaccacacagaacccgtgaaggggtttctaggcaggttcctacgtcgcaagctcatggaaaccgagatcagtggccgtgtgcgcaacatggagctggtgaagatcatcgattggattcctaaggtgtggcaccatcttaacagattcctggaggcacactcatccagcgacgttaccatcggccctagactgtttctttcctgtcccattgacgtggacggaagtagagtttggtttaccgacctgtggaattatagcatcataccctatttgttggaggccgttcgggagggacttcagctttacggcaggagggccccttgggaagatccggcaaagtgggtgatggatacttacccttgggctgcttcacctcagcagcatgaatggccgcctttactccagctccgacccgaagacgtaggtttcgacggatacagcatgcccagggaggggtcgacctccaagcagatgcctccctccgatgcagagggggatcccttaatgaatatgctgatgcgactgcaggaagcagccaactatagctcgcctcagtcatatgacagcgatagtaattctaattctcatcacgacgacattctggacagctcgctggagagcactctgta

SEQ ID NO: 232480 - DNA, 1089 bp, synthetic construct
  misc_feature 1..1089: note = Description of Artificial Sequence: Synthetic coding sequence
  source 1..1089: mol_type = other DNA
atgttcagtagcgtggctcatctagcgagggctaacccctttaacacgcctcacctccagttagtgcacgatggcctcggagacctgcgcagttccagcccagggcctacagggcagcccagacggccacgtaaccttgctgcggcagctgtcgaggaacagtattcatgcgactatggttccgggaggttcttcatactgtgtggactcggtggaattattagctgtggcaccacacacacagccctggtcccacttgatttggtaaaatgccgaatgcaggtggaccctcagaaatataaaggtatcttcaacggcttcagtgtgaccctcaaagaggacggtgtcagaggactggcaaagggctgggcccctactttcctaggatactccatgcagggcctgtgtaaatttggcttctacgaggtttttaaagtcctgtatagcaacatgctgggagaggagaacacgtacctgtggcggacctccctgtatctggctgccagcgcctcagccgaattctttgccgatatcgcgctggcccctatggaggccgcaaaggtgcgaatccagacacaaccgggttacgccaacacactcagggatgcagctcccaaaatgtataaggaagaaggcctgaaagctttctataaaggcgtcgccccactgtggatgcgtcagatcccctacactatgatgaagttcgcctgcttcgaaagaacggtggaagcactctacaagtttgtggtccccaaaccgcgaagcgaatgtagcaaacccgagcaattagttgttacattcgtcgctggctatatcgctggggtattctgtgccatcgtttcacatcccgctgatagcgttgtgtctgtgctcaacaaggagaaaggaagctccgcttctctggtccttaagcgactggggttcaagggagtgtggaagggccttttcgcacgaattataatgatagggactctaaccgcactgcagtggttcatctacgactcagtcaaggtctattttcgactgcccagacccccacctcccgagatgcctgagtcattgaaaaagaagcttgggctcacccaatag

SEQ ID NO: 232481 - DNA, 6561 bp, synthetic construct
  misc_feature 1..6561: note = Description of Artificial Sequence: Synthetic coding sequence
  source 1..6561: mol_type = other DNA
atgccagtcctcggtgtcgcctcaaaactacggcagccagccgtgggttctaagccggtgcacacggcgttacccattccaaaccttggcaccacaggcagtcagcactgttcatcccggcctctcgagctgactgagactgaaagttccatgctgtcatgccagttggctctcaagtcaacatgcgagttcggggaaaagaaacccttgcaggggaaagcaaaggaaaaggaggacagtaaaatttatacagactgggcgaaccactacttagcaaagagcgggcataaacgcctcatcaaagatctgcagcaagatatagctgacggggtcctgctagccgagatcatacagattatcgccaatgagaaagtcgaagatatcaacggctgtccaagaagccaaagccagatgatagaaaacgtggacgtttgtttgtcatttctggccgctaggggagtgaatgtgcaaggcctgtccgccgaggaaatcaggaatggtaatttgaaggcaattttgggtctgtttttctccctgtctagatacaagcagcagcagcatcaccagcagcagtactaccaatcactggttgagcttcagcagcgcgtgacacacgcgtccccgcctagcgaggcctcacaggcaaagacacagcaggatatgcagtcctcgcttgccgctcgatacgccacacagtccaaccactcgggtatagctacatctcagaagaagccgacacgcctgccaggcccatcccgtgtacctgctgcaggttctagcagcaaagtgcagggcgcttccaacctgaacagacggagtcagagttttaactctatcgacaaaaataaaccacctaattacgccaacggtaatgagaaagattcaagcaaagggccacagtcaagcagtggagttaacggtaatgtgcagccaccttctaccgccggacagccgccagctagcgctatccccagccccagcgccagcaagccttggcgaagtaagtccatgaacgtaaagcacagcgccacttctaccatgttgacagtgaagcagagcagcacggcaacaagcccgacaccctcatcggatagactcaagcccccagtaagcgagggagttaaaaccgccccaagcgggcaaaagtcaatgctcgagaagttcaaactggtcaacgccagaaccgccctgagacctccccaaccaccgagctcggggcctagcgatgggggtaaggatgacgatgcattttctgagtccggtgagatggagggtttcaattcaggcttaaactctggagggagcaccaatagtagccccaaagtgagccccaaactcgccccacccaaagctgggtccaaaaatctttcaaataaaaaatcactgctgcagcccaaggaaaaggaagaaaagaaccgagacaagaacaaggtttgcacagagaagcctgtaaaggaggagaaggatcaggtcacggagatggcccctaaaaaaacaagcaaaattgcaagtctgatccccaagggttcaaaaaccactgcggctaaaaaagagtcacttataccatcttccagcggtatccctaaaccgggatccaaggtccctacagtcaagcagactatatctcctggatctacagcatccaaagaaagtgaaaagtttcgaacaaccaaagggtcgccatcccagtccctatcgaagccaattaccatggaaaaggcatcagctagctcatgtcctgctccccttgagggcagagaagccggtcaggccagcccatccggcagctgcaccatgaccgtcgcgcagagttcaggtcagtctactggaaacggcgcagtacagctcccgcaacagcaacagcacagtcaccccaatacggcaacggttgcacctttcatttaccgggctcacagtgaaaacgaggggaccgctctgcctagtgctgacagctgtacatctccaacaaaaatggacctgtcctactctaaaacggcaaaacaatgccttgaagagattagtggagaagaccctgaaactcggaggatgaggaccgtgaaaaatatagccgatctacggcaaaatcttgaggaaaccatgtcctcccttaggggaacacaaattagtcactctactcttgaaaccactttcgattccacggtcactacagaagtaaacggcaggaccattcctaacctgacttctcggcctaccccgatgacttggcgtttagggcaggcctgtcctcgcctgcaggccggagatgcccctagtctcggagccggttaccctaggtccggaacttccaggtttatccatactgatcccagccgctttatgtatactacgcctttgcgccgagccgctgtttctaggcttggcaacatgagccagatcgatatgtccgagaaggcaagctcagacttagatatgagcagtgaggtcgacgtcggcggatatatgtctgatggcgacattcttgggaaaagcttgcgaacggacgatatcaatagtggatacatgacggacggaggcctgaacctctatactcggagtctcaataggatcccggatactgctacctctagagacatcatccagcgcggtgttcacgacgtcactgtggatgccgattcctgggatgattcgagctctgtatcctcaggcctctccgacactttagacaatatatctaccgatgacctgaacaccaccagttctgtgtcaagttattccaacatcacagtgcctagcaggaaaaatacacaactcaggacagacagtgagaaaaggtctactacagacgagacatgggatagccctgaggagctcaagaagccggaagaggattttgactcgcacggcgacgccggaggaaagtggaaaacggtcagctctggtctcccagaagatccggagaaagcagggcagaaggcttctctttctgtcagccagactggcagttggagaagaggcatgtccgcacaaggcggagcaccctctcgacagaaggctggtacctctgcccttaagacccctggcaaaacggatgacgcgaaggctagcgaaaaaggaaaagctccccttaaaggtagttcgctgcagcgatctccaagcgatgctggaaagtcatcgggcgacgaagggaaaaaacccccaagcggaattgggagaagcacagccacttcgagctttgggttcaaaaagccgtctggagtcggcagcagtgcaatgatcacctcaagcggtgctactatcacaagcggttcggctaccctggggaagataccaaagagcgccgctataggcggaaagagtaatgcgggacgaaaaacatccctcgacgggtcacagaaccaagatgatgtggtgctccatgtgtcctccaagaccactcttcagtacaggagcttacctagaccatcaaaatcctcaacgagcggcatccccggtagaggcggtcaccgctccagtacttctagtattgactctaacgtcagcagtaagagcgccggtgcaaccacctcaaaactcagagagccaacaaagattggatccggcagatcctctccagtcacagttaaccagaccgacaaagagaaggaaaaagtcgccgtctcagattccgagtccgtgtctctgagcggctctccaaaatcgtctcccacctccgcctcagcttgtggcgctcagggattgcgccagcccggatcaaagtatcccgacattgcttcacccactttcagacgatacaccccctccagtcgtcaggctaaccaggaagaaggaaaggaatggctgcgctcccatagtaccggcggactgcaagataccggcaaccaatcgccgttagtatctccctcagccatgagtagctcagcagctggcaagtaccacttcagcaatctggtatcacctaccaacctatcccagttcaatctcccaggaccgtcaatgatgcgcagtaactcgatccctgctcaggacagcagcttcgacttgtacgacgatagccagctatgtggaagcgccacatctctggaggaacgtcctcgggctatttcccattctgggtcatttagagatagtatggaggaagtccacggctctagtctaagccttgtgtcatctacttcaagcctgtatagcacagcagaggcagggggtagtcttgagcagatccacaaactcaggagagagcttgtggcttcacaagaaaaggtagccacactcacttcccagctaagcgcgaatgctcacctggtagccgcatttgaaaagtctctggggaatatgacggggaggctacagagtcttacaatgaccgccgaacaaaaggaatccgaactcattgagctccgtgaaaccattgagatgctgaaagcacaaaattccgccgcacaggccgctattcagggagccctcaatgggcctgatcatccacccaaggacttgagaatccggcgacagcattcctcagaaagtgtaagctcaatcaatagtgccaccagccactcctcaatcggctctggcaatgatgctgacagcaagaagaagaagaagaaaaattgggtgaattcacgtggaagcgagctacgatcatcttttaagcaggcatttggcaagaaaaaaagcacaaaacctccgagcagccatagtgacatcgaagagcttacagatagctctttgccggctagtcccaagctgccccacaacgccggtgactgcggtagcgcctccatgaagccaagccagagcgcaagcgctatctgcgagtgtactgaagctgaggctgaaattatcctccaactaaagtcagaactaagggaaaaggaactcaagctcacagacatccggttagaagccctgtcgtccgcccatcacctcgatcagattagggaagcaatgaaccggatgcagaatgaaatcgagatactcaaggcagagaatgatagactgaaggccgagacaggcaacacggcgaagcccacacgcccaccaagcgaatctagttcgtcaacgagctcgtctagcagtcggcagagcctcggcctcagtctaaacaatttgaacatcacagaggctgttagttccgatatattgctcgacgatgccggtgatgccaccggtcacaaggatggccgttctgtgaaaatcatcgtctcaataagcaaaggatacgggagagccaaggaccaaaagtcccaggcctacctgatcgggtccattggagtctctgggaagaccaagtgggacgtgctggatggtgtcatcaggcggctctttaaggaatacgtttttaggatcgacacctccacttccctagggctttcgtccgactgcattgcctcgtattgtattggagacctgattcgctcgcacaacctggaggtgcccgagctcctcccctgcgggtatctcgtcggggataacaacataatcaccgtcaacttaaaaggagtagaagaaaattccctggattcctttgtgttcgacacgctgatacctaaacctattactcaacgatacttcaatttgctaatggaacaccatagaatcatactctcgggaccatccggcacaggcaagacctatttagccaataaactggccgagtatgtgatcaccaagagcggccgaaaaaagacagaggatgccatagcaacttttaacgttgatcataaaagcagcaaagaactacagcaatacctcgccaatctggcagagcagtgcagcgcagacaataatggggtggaattacctgttgtcattattctggataatctccatcatgtcggctcgttgtccgacatctttaacggtttcctgaattgtaagtacaacaaatgtccttacatcattggcacaatgaatcagggggtgagtagtagcccaaatctggaactgcaccacaacttccgatgggtcctttgtgccaaccatactgagccagttaagggatttctaggtaggtacctgagaagaaaactgatagaaatcgagattgagaggaatatccgaaacaacgacctggtgaaaattatcgactggattcccaaaacatggcatcatcttaattcatttctggaaacccattccagcagcgatgtgactatcgggcctagactttttttgccatgtccaatggatgttgagggtagccgagtgtggtttatggacctgtggaattattctctggtgccctatatactcgaagctgtcagggaaggactccaaatgtacgggaagcggacaccttgggaggacccttcaaagtgggtcctggacacctacccatggagctctgcaacactcccccaggaatctcccgcactattgcagttgcggccagaagatgtcggctacgagtcttgcaccagcacgaaagaggcaacaacatccaagcatataccccagacagacactgagggtgatccactcatgaatatgcttatgaaattacaggaggcagcgaactactccagtacacagtcctgtgactctgagtcaacaagccatcacgaggatatcctggatagctccctagagtccaccctttat

SEQ ID NO: 232482 - DNA, 2376 bp, synthetic construct
  misc_feature 1..2376: note = Description of Artificial Sequence: Synthetic coding sequence
  source 1..2376: mol_type = other DNA
atgactagcctgcacacaagttctgagtccatcgatctgcccctcagccatcatgggtccctgagtgggctgaccacaggaactcacgaagtccagtcactcctgatgcggacaggttctgttcggtctactctttccgagcgctatacccccagcagcaggcaggcgaatcaggaagagggaaaagaatggctgcggtctcactccacaggagggctccaagacactggtaaccaaagtcctctagtgagcccatccgccatgagcagctccgctgccggtaaataccacttttctaacctggtgtccccaaccaacttgtcacagtttaatctgcccggaccttcgatgatgagatccaattccattcctgcacaggatagctcctttgatctttacgacgacagtcagctctgcggttcagcaacctctctggaagagagacctcgggcaatcagccactcagggagctttagggattccatggaagaagttcacgggtcgagtctctctctggtttcgagcacttcaagcctgtatagtactgccattcagaagcctaatatccagcagattcacaagctgagaagagagctggttgcatcacaggagaaagtggctaccttgacctcgcagctgagtgcgaatgcacacctggtagccgcattcgagaagagtttggggaatatgactggaaggttacaatccttgaccatgaccgctgagcaaaaggagagcgagctgattgaattgagagagaccatcgaaatgttgaaagcgcaaaatagcgcagcgcaagcagcaatccagggcgcacttaatgggccagaccacccgccaaaggacttgcgaatacgcagacagcacagcagtgagagcgtatcctccattaactctgctacttctcatagctctatcggctcaggcaatgatgctgatagtaagaagaagaagaaaaagaattggttaagatcgtcctttaaacaggcctttgggaagaaaaagtctacaaaacccccatctagccactccgatatagaagagctgaccgattcctctctgcccgcttcccctaagctgccccataatgcaggggattgcggcagcgcctcaatgaagccaagccagagcgcctcagccatctgcgaatgtacggaagctgaggctgagatcatactccagttaaagtccgagctgagagaaaaggaactgaagttaaccgatataaggcttgaggcactatccagcgcacaccatctggatcagattagggaggcaatgaacagaatgcagaacgagattgaaatactgaaagccgaaaatgaccggttgaaagccgagacaggcaataccgctaaacccaccagacccccatcggaatcaagctcgtccacgtccagcagcagctctaggcaatcacttggcctttcattgaataacttaaatattacagaagcagtgtcgagcgacattctactggatgacgcaggagacgccacgggccacaaggacggcaggtctgtaaagatcattgtctccattagcaaaggctatggacgcgctaaagatcaaaagtcccaggcatatttgattgggtctatcggggtttcaggtaagaccaagtgggatgtactcgacggcgtgattcgacgcctcttcaaggagtacgtctttcgaatcgacaccagcacgtccctgggcttatcttcagactgcatcgcaagttattgcattggggacctgatcaggagccacaatctcgaggtgccggaactcttaccttgcggttacctggtgggtgacaacaatatcataaccgtaaatttaaaaggggttgaggagaacagtcttgatagctttgtgtttgatacactgatccccaagccaattacgcaaaggtacttcaatctgctgatggaacaccaccgcataatattatccggcccaagtggcacggggaagacctacttagcaaacaaactggcagagtacgttataactaagtccggcagaaagaagacggaggacgccatcgcaactttcaacgtcgatcacaaaagcagcaaagaactgcagcagtatctagcaaatttggctgagcagtgttcggccgacaataacggcgtggagttgcccgtggttatcatactggacaaccttcatcacgtggggtctttatcagatatcttcaatggcttcctgaactgtaagtataataagtgtccatatatcattggtacgatgaatcaaggggtttcttcctcgccaaaccttgagttgcatcacaacttcaggtgggtgctgtgtgccaaccatactgaacccgtgaagggctttctcggcagatacttaagaaggaaactcatcgagatctag

SEQ ID NO: 232483 - DNA, 7158 bp, synthetic construct
  misc_feature 1..7158: note = Description of Artificial Sequence: Synthetic coding sequence
  source 1..7158: mol_type = other DNA
atgcccgtgctgggggtggccagtaagctcaggcagccagcagtggggtccaaacccgtgcacactgccctgccaattcccaatttgggaacaacaggttctcagcactgttccagtcgccctctggagctgaccgaaacagagagttcaatgctttcatgtcagctggcattaaagtccacctgtgaattcggagagaaaaaacctctgcagggcaaagctaaggaaaaggaggactctaaaatttacaccgactgggcaaatcactatctggcaaaatcaggacataagaggctgattaaagacctgcagcaggacatcgccgatggggtgctcctggccgaaatcatacagattatcgcgaacgaaaaggtggaggatatcaacgggtgccctcggtcccagtcgcaaatgatagaaaatgttgacgtgtgcttatcctttctcgccgcaaggggagtgaacgtgcaggggctatctgctgaagaaattcgaaacgggaatctgaaggctattcttggactgtttttcagcctatcccgctacaagcagcagcaacaccaccagcagcagtactatcagagcctggtagagctgcaacagagagttacacatgccagcccaccatcggaagctagccaggcaaagacgcagcaggatatgcaatcttctctcgccgcacgctatgccacgcaaagcaaccattccggtattgctactagccagaaaaagcctaccaggctgcccggtcctagcagagtacccgctgcgggatcctcgagcaaggtacaaggggcatccaatctcaatcgccgatcacagagcttcaattccatcgataaaaataagcctcccaactacgcaaacggtaacgagaaagacagcagcaaagggccacagtctagctcaggcgttaacgggaatgtgcagcccccaagcaccgctggacagcctcctgcctcagcaattccatcaccctcagcatccaaaccatggcgcagcaaatctatgaacgtcaaacactcagccacatcaaccatgctgacagttaaacaaagctccacagcgacttccccgactccctcttcagatcgattgaaacctcctgtgtccgaaggagtaaagacagctcccagcggacagaagtcaatgctggagaaattcaagctggtgaacgccagaactgccctcagaccccctcagcccccaagctctggtccttctgacgggggtaaagatgatgacgcattcagcgaatccggcgaaatggagggatttaacagcggcttgaactccggcggatccaccaactcttccccaaaagtgtctccaaaactagcaccaccgaaggcagggtccaagaacctgagtaacaagaaaagcctcctccagccgaaggaaaaggaggaaaagaacagagacaagaataaggtatgtacagaaaaacctgttaaagaagagaaagaccaagttacagagatggcccctaaaaaaactagtaagatcgcctctttgatccctaagggttccaaaaccacagcggctaagaaggagtcgctgatacccagcagctccggcattcctaagcctgggtcaaaagtgccaacagtgaagcagactattagcccgggttcaacagcatcgaaagagtccgagaagttccgtaccacgaaggggagtcctagccagtccctgagcaagcccattaccatggagaaggcgagtgcgtcctcttgtcccgctcctctggagggtcgtgaggccggtcaggcgtcacccagcggaagctgcacgatgactgtcgcacaatccagtggtcagagcaccggcaacggcgctgtccagcttcctcagcagcagcaacattcccaccccaacaccgccaccgtggctccttttatctatagagcccattctgaaaatgaaggaacggccctgcctagcgcagacagctgtacctcccccacaaaaatggacctgtcctacagtaagaccgccaaacagtgcttggaggagatctcgggggaagatcctgaaacgcgaagaatgcggaccgttaaaaacatcgctgacctacggcagaacctggaggaaaccatgagtagcctccgagggacacaaatcagccactccaccttggaaactaccttcgactccacagtaacaactgaggtcaacgggcgaactatccctaacttaacttcccggcctactccgatgacgtggagactaggccaggcatgcccacgactacaggcaggagacgcgccaagccttggggctggatacccacgctcgggcacgagccgttttattcacaccgacccatcgcgatttatgtatacaacacctcttcgtcgtgctgctgtgtcacgcctcgggaacatgtcccagatcgacatgtcggagaaagcgtcctctgatctggatatgagctcagaagttgacgtgggtgggtacatgtctgacggcgacatcctggggaagtccctgagaaccgatgacatcaacagtgggtacatgacagatggtggactgaacttatatactagatcccttaaccgcattcccgacaccgcaacatccagggatatcatccagcgcggagtgcatgacgtgaccgtcgatgcggattcctgggacgactctagcagtgtgtcttcagggttgagtgataccctcgacaacatttccaccgacgaccttaatactacatcttcagtttcttcttactctaatatcactgtgccatcgaggaaaaatactcagttacggaccgattccgagaaacggagcactaccgacgaaacctgggattcacctgaggagctaaaaaagcctgaggaggacttcgactcacatggagacgcagggggaaaatggaaaaccgtctctagcgggcttcccgaggacccggagaaggctggccagaaggcctcactgagtgtgtcacaaacaggctcctggcgacgtggcatgtctgctcaggggggagcgcctagtcggcaaaaagcaggaaccagcgctctaaagactccaggtaaaacagatgatgccaaggcttccgaaaaggggaaggcccctttaaaaggcagcagtctccagcgaagcccatcagatgccggaaaatcctcaggagatgaaggcaagaaaccaccaagcgggattgggagatcaactgccacctccagttttggatttaaaaagccctctggcgtcggctccagcgcaatgattactagcagtggcgctacgattacttccggaagcgcgacactaggtaaaattcccaagagtgcggctatcggcggtaagtctaacgccggtcgaaaaactagcctggatggatcccagaatcaagacgatgtggtactccatgtgtctagtaaaacaactctgcagtaccgtagcctgcctcgacctagtaagtctagtacctctggcattcctgggaggggaggacatcgctcatccacaagttctattgatagcaatgtctctagcaagtccgccggagctaccactagtaagctgagagagccgactaaaatcggaagtggcaggagctcaccggtcaccgtgaatcagacagataaggaaaaggagaaggtcgcagtgtcagactccgaaagcgtgagcctgtcaggaagcccgaaaagcagtcctacatccgctagcgcctgtggagcccaggggttgcgccagcccggttctaaatatccagatatcgcctcaccgacattccgaaggctgttcggggcaaaagcagggggtaagagcgctagtgcacctaacacagagggcgtgaagtcaagtagcgttatgccatccccctccaccacgctggctaggcagggtagtctagaaagcccaagcagcggcaccggatcgatgggatctgcgggtggactgtccgggtcgtcctcacctctgtttaataagccctccgaccttaccacagatgttatttcgctcagtcactcactggcaagttcccctgcatccgtccattcctttacctcaggcggtctagtctgggcagcaaacatgtctagttccagcgctgggagtaaagacaccccgtcttatcagtcaatgaccagtttgcatacctccagcgagtcaattgatcttccactcagtcaccacggatccctgtcaggactcacaaccggaacgcacgaggtgcaatcactgcttatgagaactggttccgtcaggtccacattaagcgagagtatgcagttggatcggaatacattgccaaagaagggcctgaggtacactccgtcaagtcgccaggcgaaccaggaagaagggaaggagtggctgaggtctcattctaccggcggactgcaggacacaggaaatcagtcccccctggtgagcccatctgcaatgtcctctagcgccgctgggaagtaccacttcagtaaccttgtgtctcctacaaacctgagtcagtttaatctccctggccctagtatgatgcgctccaactccatccctgcgcaggactccagcttcgatttgtatgacgacagccaactgtgtgggagcgccacttcattggaggagaggcccagagccatctcacactctgggagcttccgagacagcatggaggaagtccatggcagctccttatccctggtcagcagcactagctctttgtactccaccgcagaagagaaggcacactccgagcagatccacaagctacgccgtgagctggtagcctcccaggaaaaagtcgctaccctgacatcccagctttctgctaacgcacaccttgtggccgcttttgaaaagtctctgggcaatatgacgggaagactacaatctcttactatgaccgccgaacaaaaggagtcggaactgattgagcttagggagactattgaaatgctcaaggcccagaatagtgccgcacaggccgctatccagggggcactgaatggtcctgaccaccccccaaaggacctgaggatacgtagacaacactcctctgaatctgtgtcatctattaactcagctacatcccattcatctattggttccgggaacgacgccgactcaaagaaaaaaaagaagaagaattgggttaacagtaggggctctgaactgcgatcttcctttaagcaggcctttgggaaaaagaaatctaccaaacccccttcttcccattctgacatagaagagctcaccgacagctctctccccgcttctcccaagctcccccataacgcgggtgattgtggtagcgcttcaatgaaaccaagtcaatcagcgagtgccagccccctggtgtggccccctaaaaaacgtcagaatggtcccgtcatctacaaacaccgcagcaggatttgtgagtgcaccgaggcggaagctgaaattatactacagctcaaatccgagctccgagaaaaggaactcaaactgacagacattcgtttggaggcactgtcttctgcacaccatctggatcagattcgggaagcgatgaatcggatgcagaacgagatagaaatcttgaaggccgaaaacgacagactcaaggcggagaccggtaacacagcgaagcccactcgcccaccatcagagtcaagttctagcacctcctccagcagcagtaggcagagccttggcttgagtttgaataacttgaacataacagaagctgtctcaagcgacatcctcctggacgatgcaggggatgccactggccataaggacggtagaagtgtgaaaataatcgtctcaatctcaaaaggttacggtcgggcaaaagatcagaaaagtcaggcatatctcataggatcaatcggcgtctccggaaaaaccaagtgggacgtactggacggggttataaggagattgtttaaagagtacgtctttaggattgataccagcacctccctcggattaagctccgattgtattgcttcatattgcataggcgacctgataaggtctcataacctcgaagtgccggagctgctgccatgcggttacctggtcggcgacaacaatattattacagtaaaccttaagggggtggaggaaaatagcctggattccttcgtcttcgacactcttatccccaagccgatcacacagagatactttaatctgctaatggagcaccaccgcattatcctgtcaggccctagcggtacaggaaaaacctaccttgccaacaaactagctgagtacgtgataacaaaatccggacggaaaaagacagaagacgcaattgcaacttttaatgttgatcataagtctagcaaagagctccagcagtaccttgcaaatctagctgagcagtgtagcgctgataataatggagtggaactgccagtggtgatcatcttggataacctgcaccacgttggcagtttgtctgatatcttcaatgggtttctgaactgcaaatataacaagtgcccctatatcatcggtacgatgaatcaaggtgtctctagcagtcctaacttagagctccaccacaatttccgctgggtactgtgtgcaaaccataccgagccagtgaagggctttttgggccgttacttgcgcaggaagttaatagagatcgagatcgaacggaatatccgcaataatgatttagttaaaattattgactggatccctaaaacatggcaccatctgaactcctttcttgaaacgcatagctcttcagatgtcacgattggtcctcggctcttcctgccctgcccaatggatgtggagggcagtagggtgtggtttatggacttgtggaattatagtttagtgccgtacatccttgaggctgtgagggagggtctacagatgtacggtaagagaaccccttgggaagacccgtcaaaatgggtcctggacacttacccgtggtcatcagcaacactccctcaggaatctccagccttactgcagctaaggccggaggatgtgggatatgaaagttgtacttccactaaagaggctaccactagtaagcacataccccagaccgatacagagggggatccgttgatgaacatgttgatgaagctccaggaagcggctaattattccagcacccagagctgcgatagcgaatcaacttcgcatcacgaggacatactagattctagtctcgagtccaccttgtag

SEQ ID NO: 232484 - DNA, 7091 bp, synthetic construct
  misc_feature 1..7091: note = Description of Artificial Sequence: Synthetic coding sequence
  source 1..7091: mol_type = other DNA
atgcccgtgttgggcgttgcttcaaaattgagacaacctgcagttgggagtaaacccgtccatacagcgttgcccatccccaacctggggaccaccggaagccagcactgcagcagtcgacccctggaactgacagaaacggagtcaagcatgctttcctgtcagctcgccctgaaaagcacctgcgaattcggggagaagaagcccctgcaaggaaaagctaaggaaaaggaagactctaagatttacaccgactgggcaaatcattacttggcaaaatccggtcacaaacgattgattaaggacctgcaacaggatattgctgacggggtgttacttgccgagattatccagatcatagctaatgaaaaggttgaggatataaatggatgtcctcgctctcaaagccaaatgattgaaaacgtagacgtgtgcctgtcgtttctggctgctagaggcgtgaatgtccagggtctaagcgccgaagaaatacgcaacgggaatctgaaggccattctggggctctttttctcgctgagccgttataagcagcagcagcaccatcagcaacaatactaccagagcctggtggagctgcagcagagagtgacccacgctagcccaccttctgaggcctcccaggcgaagactcagcaagatatgcaaagctcgctggctgctaggtacgcgactcagagcaaccacagcggaattgccacatctcagaaaaagcccacacgcctgccaggccctagccgagtaccagcagctggatcatcttcgaaagtgcagggcgcaagcaacttaaacagacgcagccagagttttaactcaattgacaagaataagcctcctaattatgccaacgggaatgaaaaggactcttctaagggaccccagtcaagctccggagtgaacggaaatgtgcagcctcctagtacagcgggtcagcctccagcatctgcgatcccgtccccatcagcaagcaagccatggcggtccaaatcaatgaacgtcaaacattctgcgacctcaaccatgctgacagtaaagcaatcaagcacggcgacctcacccacacccagctccgacagattaaagccccctgtgtctgagggggtgaaaacggctccctctggccagaaatccatgctcgagaagttcaaactcgtcaatgctaggaccgctctgaggccccctcagccaccgtcgagtggcccttccgacggaggtaaagacgacgatgcattttctgaatcaggcgaaatggaggggttcaatagcggactcaactcaggcggaagcaccaacagtagcccaaaggtgtccccaaaactggctccaccaaaggcaggaagcaagaacctgtccaacaaaaaatccctactgcagcccaaggaaaaagaggagaagaaccgggataagaataaggtctgtaccgagaagcccgtcaaggaggagaaagatcaggtaacagaaatggcaccaaagaaaacgagtaagattgcctcattgatcccaaaaggctcgaagacaaccgcagcaaaaaaggagagcctcataccgtccagttccggaattccaaaacctgggtccaaggttccaaccgtgaaacagacaatttctcctggcagtaccgcaagtaaggaatcagaaaagtttcggacaacaaaggggtccccatcccagtcactgtccaagcctataaccatggaaaaggcctcagccagtagttgccctgcccctctcgagggaagagaggctggtcaggcgtccccctccggatcctgtactatgacagtggcccagtcaagtgggcagtctaccggaaatggcgctgttcaactcccccagcaacagcagcacagtcatccaaatacggccacagttgctccgttcatctatagagcacatagtgaaaatgaaggaactgctctcccatccgctgactcatgtacctctccaacgaagatggacctgtcctactcaaagaccgcaaaacagtgtttggaagagattagtggagaggacccagagacacgacgcatgaggactgtgaagaatatcgccgatctgcgccagaaccttgaagagacaatgagttcccttaggggaactcagatatctcacagtacactcgagacgacatttgatagcacggtcactaccgaggtcaatgggagaaccatccctaacctgacctccagacccacgcctatgacgtggcggctaggccaggcatgcccgagattgcaggctggcgacgccccttctctgggcgcaggctaccctcgatccgggacgagccggttcatccacaccgatccctcaagattcatgtatacaactcctctgcggagggccgctgtgtctcggctggggaatatgagccagatcgatatgagtgaaaaagccagcagcgatctggatatgtccagtgaggtggatgttggaggttatatgagcgatggcgacattctgggaaagtccctccgaacagatgacatcaattctggctatatgacggacggtggcctgaacttgtatactcggagtctgaaccgtatccccgacaccgcaacaagccgggatatcatccagcgcggtgtgcacgacgtgaccgtggatgcggactcatgggacgattcctcatccgtgtcgtctggattatccgacaccttggataacatttcaaccgacgacctgaacaccaccagtagtgtgagctcctattcaaacataaccgtgccctctcgaaagaatactcagctaaggactgacagcgagaaaagatccacgaccgatgaaacgtgggatagccccgaggaactgaagaagccggaggaagattttgactcccacggcgatgcaggtggcaagtggaaaaccgtaagctctgggctgccagaagatcctgaaaaagccggtcagaaagcatctctctcagtgagccagacaggctcctggcgtaggggcatgtctgcgcaggggggagcccctagccgtcagaaagcaggcacatccgccttgaaaacacccggaaaaacggacgacgctaaggccagcgaaaagggaaaggcaccgctgaaaggttctagtttgcaaagaagtccttctgatgcaggaaagtcatctggggacgaaggcaagaagcctcctagtggtattggcaggtccaccgcaacgtcaagtttcgggtttaaaaagccatctggtgtgggctcatcagcaatgataacctctagcggcgcaactattacatcagggagcgcaaccctgggaaagataccgaaatctgcggctataggaggaaaaagtaacgccggacggaagacctcacttgacggaagtcaaaaccaggatgatgtcgttttacacgttagcagtaagacgacacttcagtataggtctttacccaggccctcaaaatccagcacaagcggaataccgggaagagggggtcaccgcagcagtacctctagcatcgactcaaacgtgtcaagcaagtccgcaggagctacaacctcaaaactgagagaacccacgaagattggtagtgggaggtcctcccctgtgacagtgaatcagactgataaggagaaggagaaggtggcggtatctgatagcgagagcgtaagtctgtcaggaagccccaagtcgagccccacttccgcaagtgcctgcggtgcccagggccttcgtcagccgggaagtaagtacccagacatcgcctctccaacctttaggcgacttttcggcgctaaggccggtgggaagtctgcatctgccccaaataccgaaggtgtcaaatctagcagtgtcatgcccagtccgtctacaactctggcaagacagggcagcctggaatctccctcatccggcactggctctatgggatctgctgggggactctccgggagctcgtcgcctttgtttaacaagcctagcgatctaacgactgatgtcatcagcctcagccactctctcgcttcgtccccagcgagcgtccacagctttacttcgggtggactggtatgggcagccaacatgtccagttcttctgcgggatctaaggatactccttcctatcagtcaatgactagcctacacactagtagcgagtctattgatctccctctttcgcatcatggaagtttgtctggtctgaccactggcacccatgaggtgcagtctctcttaatgcgtacagggagcgtccgaagtacactctccgagagcatgcagctagaccggaataccttaccaaaaaaggggctaaggtacacaccttcctcgaggcaggcgaatcaggaggagggcaaggagtggctgcgaagtcacagtactggaggcctgcaggacacagggaaccagtcccctctggtgtccccaagtgccatgtccagctccgccgctggcaaataccatttcagcaaccttgtttcccctacgaaccttagccaatttaaccttcccggtccctccatgatgaggtcgaacagtatccccgctcaggactccagcttcgacctgtacgatgacagccagttgtgtggcagcgctacatccctggaggaacgccctcgagctatttctcattccggcagttttagggattctatggaggaagtgcatggaagctcactgtccctagtttccagcacgtcatccctctactcaactgcggaggaaaaagctcactctgaacagatccacaaactccgcagggagctggtggcaagccaggaaaaggtggctaccctgacaagtcaactgtctgctaatgcacatctcgtggcagccttcgaaaagtcattgggtaatatgacgggccgtctacaaagcctgacaatgacggcagaacagaaggagagcgaactaattgagcttagagagacgattgaaatgctcaaggcacagaattccgctgcacaggctgcgatccagggtgccctaaatggacccgatcatcccccaaaagatctgagaattaggaggcagcatagctctgaatctgtttccagtatcaacagcgccacctcacatagcagtatcggatctggcaacgatgctgacagcaaaaagaaaaaaaagaagaactgggtgaacagtcgtgggtctgagctcaggagttcctttaagcaggccttcggaaagaagaagtccacgaaacccccaagctctcatagtgatatcgaggagttgaccgatagcagcctcccagccagccccaagctgccacataacgccggtgattgcgggtctgcttctatgaaaccaagccaatccgctagcgctatctgtgaatgtactgaagcagaggccgagatcatactgcaactaaaaagcgaactcagggagaaagagctgaaattgactgacatcaggctcgaggcactgagttccgcccatcacctcgaccagatccgggaggccatgaatagaatgcagaatgagattgagattctcaaagcagaaaacgacaggcttaaggccgaaacaggcaacaccgccaaacccactaggcctcccagcgaaagttctagcagcaccagctctagctcctcacgtcaaagtctgggccttagccttaataatctgaatataacagaggctgtgtcctcagacatccttttggacgatgccggagatgccaccggacacaaggatggccgttccgtcaaaattatcgttagcatttctaagggttacggccgagccaaggatcagaaaagccaggcttacctgatcggcagcatcggcgtatcagggaaaactaagtgggatgtgctagacggagtgatcaggcgcctgtttaaggaatatgtgtttcgtattgatacatcaacttccctcgggttgtcttcagattgtatcgcttcttattgcataggcgatctgatccgatcccataatctggaggtgccagaacttctgccctgtggctatcttgttggggacaataatattatcaccgtgaatctgaaaggggtcgaggagaacagtctggatagctttgtgttcgacaccctgattcccaagcctataacccagcgatactttaatctgctgatggagcatcatagaattatcctgtccggcccttccggaaccgggaaaacatacttggcaaacaagctcgcggagtatgttattaccaaaagtggacggaagaagacagaggacgcgattgccacatttaacgtggatcacaaaagttcaaaagagctccagcagtacttagcaaaccttgcagagcagtgttccgctgataacaatggcgttgagttgcccgtggtgattatcctggacaatcttcatcacgtcggtagtttgtctgatatcttcaatggctttcttaattgtaagtacaacaaatgtccatacataatcgggactatgaaccagggtgtgagtagttcaccgaatctggaactgcaccacaacttccgttgggtgctttgtgcaaaccatacagagccagttaagggcttcttgggtagatacctgagacgtaaactgatcgaaatcgagattgaacgtaacatcaggaacaatgatctggtgaaaataatcgattggattccgaagacgtggcaccatttaaactcttttctggaaacacacagtagtagcgacgtgaccatcggcccacgattattcctgccatgcccaatggacgtggaggggtctagagtgtggttcatggacctgtggaactatagtctggtgccttatattctggaggcagttcgcgaaggactccagatgtacggcaagaggaccccttgggaagacccatccaaatgggttctcgacacatacccctggtcctccgcaaccttgccccaggaatccccggcactactccagttgcggccagaggatgtcggctatgagtcctgcacttcaaccaaagaagccaccactagcaaacatattccacagaccgacactgaaggcgacccccttatgaacatgctaatgaaactgcaggaggccgctaattatagtagcacgcagtcttgcgattctgagtccacaagtcaccacgaggacatcctggactcaagtttggaaagcaccttgta

SEQ ID NO: 232485 - DNA, 648 bp, synthetic construct
  misc_feature 1..648: note = Description of Artificial Sequence: Synthetic coding sequence
  source 1..648: mol_type = other DNA
atgaaaaggtgggtcctgtgtgctaatcacacagagcccgttaaagggtttttggggagatacctcaggcgaaaactcatcgagatcgaaattgagcggaacatcagaaataacgatctggtgaagatcatcgactggatacccaagacttggcaccaccttaactctttcctggagacccattcgtcttctgacgtgacaatcggaccaaggctgtttctcccctgtccaatggatgtggaaggttctcgcgtctggttcatggacctctggaactactctttagtcccctacatcctggaagccgtccgcgaggggcttcagatgtatggaaagcggacaccttgggaggatccatccaagtgggtgttggatacatatccctggagctctgccacgctgcctcaggagagccccgctttgctccaactccgcccagaagatgttggctacgagagctgcacatctacaaaggaagccacaacttccaaacatattccacagacagacactgagggggacccgctgatgaatatgctgatgaagctgcaggaggcggctaattactcctcaacccagtcatgtgattccgagtccacttctcaccatgaggatatccttgatagcagtctggagtcgacattgtag

SEQ ID NO: 232486 - DNA, 573 bp, synthetic construct
  misc_feature 1..573: note = Description of Artificial Sequence: Synthetic coding sequence
  source 1..573: mol_type = other DNA
atggggaagtcaaacagtaaactgaagccggaggtggttgaggagctgacaagaaagacatacttcaccgagaaggaggtccaacaatggtataaaggtttcatcaaagactgtccctccgggcaacttgacgccgcaggatttcaaaagatttataaacagttcttcccattcggcgatccgacaaaattcgcaacatttgtttttaacgttttcgacgagaacaaagatgggagaattgaattttctgagttcatacaggccctgtctgtcaccagcagaggcaccctggatgagaaactcagatgggcatttaaactttacgacctagataatgacggatatatcactcgaaatgaaatgctggacatagtggatgcgatctaccagatggtcggcaacactgtggagttacccgaggaagagaatactcctgaaaaacgggtcgaccgcatcttcgctatgatggacaaaaatgccgacggcaagctcacgttgcaggagtttcaggaggggagtaaggctgatccatctatcgtgcaggccttatctctttatgatggattagtttag

SEQ ID NO: 232487 - DNA, 519 bp, synthetic construct
  misc_feature 1..519: note = Description of Artificial Sequence: Synthetic coding sequence
  source 1..519: mol_type = other DNA
atggcaacgatcactgagaaggaggtgcagcagtggtataaagggtttataaaggactgcccctccggccagctggacgcagccggtttccagaagatttacaaacagttcttcccctttggggatcctacgaaatttgccacattcgttttcaatgtgtttgatgagaacaaagacgggcgtatcgagtttagtgaattcatacaagccttatccgtcacttcaagaggaaccctcgacgaaaagctgcgctgggcctttaagctgtacgatctcgacaatgatgggtatatcacccggaatgagatgctggacattgtagatgctatctatcaaatggtgggtaataccgttgagctgcccgaggaggaaaacacccctgagaagcgggttgacagaattttcgccatgatggacaaaaatgcagatgggaagctgacgctccaggagttccaggaagggagcaaagctgatccttcaatagtccaggcactttcgctttacgacggcctggtgtag

SEQ ID NO: 232488 - DNA, 3552 bp, synthetic construct
  misc_feature 1..3552: note = Description of Artificial Sequence: Synthetic coding sequence
  source 1..3552: mol_type = other DNA
atgcagcttaaaattatgcctaagaaaaagaggctgtctgccggtcgtgtgcccctgatcctgttcctgtgccaaatgatttcagccctggaggtccctcttgacctcgtgcaaccccctaccattacacagcagtctcctaaagattacattattgatcctagggagaacattgtgatacagtgtgaggccaaaggaaaacctcccccaagtttttcatggactcgcaacgggacccattttgatattgacaaagatcctttggtgacgatgaagcctggcaccggaaccttgatcattaacattatgtccgagggcaaagcagaaacatacgaaggcgtttaccagtgtacagcaaggaacgagcgaggggcagccgtctcaaacaatatagtcgttcgaccaagtcgtagccccctgtggaccaaggagaaacttgaaccaattactctgcagagcggtcagagtctagtcctgccttgccggccaccaatcggcctcccacccccaattatcttttggatggacaactccttccagcgcctgcctcagtccgaaagagtgtcccaagggctgaatggggacctctatttctcgaatgtcctgccagaggatactcgtgaggattacatctgttacgctcggtttaatcatacccagacgatccagcaaaagcaaccaatttcggtgaaagtgatctcagttgacgaattaaatgatacaatcgcggctaatctttcggacacagaattctacggagcgaaatccagccgcgaacggccaccaactttcctgaccccagagggcaatgctagcaacaaggaggagttacgtgggaacgtactttctctagagtgtattgcagaggggcttcccaccccaataatttactgggcgaaggaagatggcatgttgcctaagaacagaacggtgtacaaaaacttcgagaaaacactgcagatcatccacgtgtccgaggcagactccggaaattatcagtgcatagccaagaacgccttaggcgctattcaccataccatttccgtgcgcgtgaaagctgccccatattggatcacggctccacagaatctggtcctgtcacccggagaagacgggacactgatctgccgcgctaatggcaatcccaagccccgaatctcttggcttacaaatggtgtgccaattgagatcgcacccgacgatccatcacggaaaatcgatggggataccatcatcttctctaatgtgcaggagaggtcttcagcggtgtatcagtgcaatgctagcaacgagtatggctacctacttgctaacgcctttgttaacgttcttgccgaacccccaaggatcctgacgcccgcaaatactctttaccaggtaattgccaatcgcccagccctgctggactgtgccttctttgggtcaccactccccaccatcgaatggtttaaaggagcgaaggggagcgcactgcacgaggatatatacgtcttgcacgagaatggaaccttagagataccagtggcccaaaaggattcaaccggcacctacacctgtgtcgccaggaacaaactgggcatggccaaaaacgaggtgcatctagaaataaaggaccctacttggatcgtgaagcagcccgagtatgctgtggtgcagagggggagcatggtttctttcgaatgcaaagtgaagcacgaccacacactcagcctgactgtactgtggctcaaagacaatagggagctgccttctgatgaacgcttcaccgttgacaaggatcacctcgtggtcgctgatgttagcgacgacgattcaggcacctacacttgcgttgcaaatactacactcgactcggtatcggctagtgcggtcctgagtgtggtcgatgtcccgaacccccctttcgacctcgaactcactgatcaactcgacaagtcagtacaactgagctggaccccaggagatgataacaactcgccaattacaaaattcataatagagtatgaagatgctatgcacaagcctggtctttggcaccaccagactgaggtctctggcactcaaacaacagcccaactgaaattaagcccttatgtgaactatagcttcagagtgatggccgtaaattctatcggtaaatcactgcccagcgaagccagtgagcaatacttgacgaaggcatccgagcctgacaagaaccctactgcagtcgaaggactgggcagcgaaccggataatctggtcatcacctggaagccactgaatggttttgagtccaacggccctgggctccagtacaaagtctcttggagacagaaggacggggacgacgagtggacaagtgtggtggtcgccaacgtcagcaaatatattgtcagcgggaccccaacatttgtcccttatctaatcaaggtgcaagccctgaacgatatgggcttcgcacccgaacctgctgtggtgatgggacacagcggcgaggacctgcctatggtggctccaggaaacgttcgcgtgaatgtggttaactcgacactagccgaagtccactgggatccagtgcccctcaagtcaatcaggggccacctgcagggctacagaatttactattggaagactcagagcagctcaaagagaaaccgccgtcatattgagaagaagatcttgactttccagggtagcaaaactcacggaatgttgccaggccttgagcccttcagccactatactctgaacgtcagggtagtcaatggaaagggggagggccctgcctcacctgaccgggtctttaatacgcctgagggtgtgccttccgctccaagcagtttgaaaattgtgaacccgacactggattccttaactttggaatgggatccacctagtcatcccaatggcattctgactgaatacaccttgaagtatcagccaatcaattctacacatgaacttggacctttggtcgatcttaagatacccgctaataaaacaagatggaccctgaagaacctgaacttcagcacacgctataagttctacttttacgcccagacttccgccggtagtggtagtcaaattaccgaagaagctgtgacaactgtggacgaagctatggcttccaggcaggttgacattgccactcaggggtggttcattggcctcatgtgcgcggtggctctgctgatcctgatcttactgatagtctgcttcatccgcaggaacaagggcggtaaatatcccgtgaaggaaaaggaggacgcacatgccgatcctgaaatacagccaatgaaggaagacgacgggacctttggagagtactcagatgccgaggaccataagccgttgaaaaagggaagcaggacacccagcgacagaaccgtcaagaaagaagatagcgacgacagtctggtggattacggggaaggggtgaatggacaattcaatgaagatgggagcttcattggacaatattctggaaagaaggagaaggaacctgccgaagggaacgaaagctctgaagcgccatcacccgtcaacgccatgaacagttttgtctag

SEQ ID NO: 232489 - DNA, 3711 bp, synthetic construct
  misc_feature 1..3711: note = Description of Artificial Sequence: Synthetic coding sequence
  source 1..3711: mol_type = other DNA
atgcagctcaagatcatgcccaaaaagaaacgcctgtccgccggaagagtccctttgatcctgtttctctgccagatgatcagcgctttagaggtgcccttggatcaaaagtctactgaagtgatggtacagccccctaccatcacccagcagtcccccaaagattacatcatcgaccctagggagaacattgtcattcaatgtgaggccaaaggcaagccaccaccatcttttagttggacccggaatgggacgcatttcgacatagacaaagatcccctggttaccatgaagccaggcactggcactctgatcattaacattatgtctgaaggaaaggctgaaacatatgaaggcgtgtatcagtgtactgcacgcaatgagcgcggagcagctgtgagcaataatatcgtggttagaccttctaggagcccactatggactaaggagaagctggagccaatcactctccaatcaggccagagtctcgttttgccatgcagacccccaattggcttaccacccccaatcatattttggatggacaatagcttccagcgcctaccccaaagcgagcgcgtcagccagggcctgaatggcgacctctattttagcaacgtgctcccggaggatacgagggaagactacatttgttatgcccgattcaaccatacccagaccatccagcagaaacagccgatctcggtcaaagtaataagcgtcgacgagctaaacgataccattgctgcgaatttgtctgataccgaattttacggggctaaatcatcccgcgagagaccacctacctttttgacaccagaaggcaatgcttcaaataaggaagagcttcggggtaacgttctttccttagaatgcatcgcggagggcttacccactccgatcatatactgggccaaggaggatggaatgctaccaaagaaccggaccgtgtacaagaacttcgagaagactttgcaaatcatccacgtttctgaggccgacagtggcaattatcaatgcattgccaaaaacgcccttggagctattcatcacaccatctcagtcagagtaaaagccgcaccctactggatcactgccccacagaatctcgtgctgtctcctggtgaagatggcacgttgatttgcagggctaatgggaatccgaagcccagaatctcctggctgaccaatggcgtgccaattgaaatcgccccagacgatccttctaggaaaatcgatggtgatacaattatttttagcaatgtccaggaacggagctccgccgtgtatcaatgcaacgcctctaatgagtacggttatcttctggccaacgccttcgtgaacgtcctcgccgagcctcctcggatcctaactccagccaacacactgtaccaggtgattgccaatcggccagccctactggactgtgctttttttggctcgcctctgcccacaatagaatggttcaagggggctaaaggctcagccttacatgaggacatttacgtcctgcatgaaaatggtacactcgaaatccccgtggcgcagaaggatagtacgggaacctatacatgtgttgcacgcaacaagctggggatggcaaagaatgaagttcacctggagattaaggaccctacctggatcgttaaacagccagaatatgcggtcgtgcagcgcggatctatggtgtctttcgagtgtaaggtgaagcacgaccacacattatctcttacagtcctttggctcaaggataacagggagttacccagtgatgaaagatttacggtcgacaaagatcatctagtagtggcggacgtgtccgacgatgattccggtacctatacatgtgtggccaatacgactctggatagcgtgtccgccagtgcagttttgtctgtggtggctcctacaccaacacctgcaccggtctacgacgttccaaacccccctttcgatctcgagctcacagatcaactggataagtctgtccagctatcgtggacacccggagacgacaataatagccctataactaaatttatcattgaatatgaggatgccatgcacaagcctgggctctggcatcatcagaccgaggtctctggcacacagactactgctcagctgaagctaagcccgtacgtgaactactctttccgcgtgatggccgtgaatagcatagggaagtccctgccttcagaagcatcagagcaatatctcacaaaggcctctgagcccgataaaaaccccacagcagttgagggcctggggtcagagcccgacaacttagttattacttggaaacctctcaacggttttgagagcaatggcccagggcttcagtacaaagtgtcttggagacagaaagatggggatgacgagtggaccagcgtagtggtagcaaacgtttccaaatatatagtcagcgggactccaacatttgtgccatacttaatcaaagtccaggcgctgaatgacatgggtttcgctcccgaacccgcagtggtgatggggcattcaggcgaagacttacctatggtggcacccggaaatgtgagagtaaacgtggtaaactccacccttgccgaagtacactgggacccagtaccacttaagtccattcgcggtcacctgcagggataccgcatctactattggaagacacagagctcttccaaaagaaatagaagacacatcgaaaagaagatcctaactttccagggctcaaaaacccacgggatgttgccaggtctcgaaccattttctcattatactttaaacgttagggttgtgaatggcaaaggggaagggccagctagtcccgatagagtgttcaacacccctgaaggcgttccatcagctcccagctccttgaagatcgtgaaccccaccctggatagtctgacgctggagtgggaccccccaagtcaccctaatggcattctcacagaatacactctgaagtatcagcctatcaatagtacacatgagctcggaccactggtggacttaaaaatcccagccaacaagactaggtggacactcaagaatctgaattttagtacccgctacaaattttacttttacgcccagactagcgccggatccggcagtcagattaccgaggaggcagttactacagtcgatgaggccggtatcctgcccccagatgtcggagcaggtaaagtacaggctgttaaccctaggatatcaaatttgaccgcggcagccgctgaaacatacgccaatattagctgggagtacgagggccctgagcatgtcaacttctatgttgaatacggtgttgcgggtagcaaggaggagtggcgtaaggaaattgtaaatggcagcagatcctttttcgggctgaagggtcttatgccaggaacagcctacaaagtgagagtgggggctgttggtgactctggatttgtctcgtctgaggacgtcttcgagaccggtccggctatggcttctcgccaggtcgacattgctactcagggctggtttattggactgatgtgcgcggtcgcactgctgattctgattctgctgattgtatgctttatacggcgaaacaagggaggtaagtaccctgtgaaggaaaaagaggacgcacacgccgatcccgaaattcagccgatgaaagaggacgatggcacatttggcgaatataggctattcagttttgtttcatcggcaagtttttag

SEQ ID NO: 232490 - DNA, 3579 bp, synthetic construct
  misc_feature 1..3579: note = Description of Artificial Sequence: Synthetic coding sequence
  source 1..3579: mol_type = other DNA
atgcagcttaaaatcatgcccaaaaagaaacgcctctccgccggacgcgttccactgatactctttctgtgtcagatgatcagcgccttggaggtgcctctggacccgaaactgttggaagacctagtccaacctccaacaatcacacagcagtccccaaaggattatattatcgacccgagggagaacatcgtgatccaatgcgaggccaaagggaaaccacctccatccttttcctggacccggaacggaacacattttgatattgataaagatcctctggtgaccatgaagcccggaactgggactctcatcatcaatattatgtccgaagggaaagccgaaacatacgaaggtgtgtatcagtgtactgcaagaaatgaacggggagctgctgtgtctaataacattgtagtacggccatctcgttccccgctgtggacaaaagagaagctggaacccattaccctccaaagtggccagtccctggtgttgccctgtcggccacccatcggtctgcctccccctatcattttttggatggataactcttttcaaaggttgccccagtccgaacgggtctctcaaggattgaacggcgatctgtacttttccaatgtgctgcccgaagacacacgtgaggactatatttgttatgctcgcttcaaccatacgcagaccattcagcaaaagcaacctatcagcgttaaagtaatttcagcaaagtccagtagagaacgaccaccaacttttcttacacccgagggcaatgctagcaacaaggaagagctgcggggaaacgttctatcactggaatgtatcgctgagggtctccctactcctatcatctactgggccaaggaggacggtatgttgcctaaaaatcgtacagtatacaagaattttgagaagacattacagattattcatgtgtctgaggccgattcagggaattaccagtgtattgccaagaacgcgcttggagccatccaccatacaatttccgtgagagtgaaggccgctccctactggatcactgcgcctcagaatctggtactgagccccggtgaggacggaacactgatttgccgcgcaaatgggaaccctaaacctcgaatctcctggctgacaaacggcgtccctatagaaattgcccctgacgacccttcacgcaagatcgacggggacactatcatcttttccaacgtccaggagaggtctagcgctgtgtaccagtgtaacgcatctaatgaatatggctacttgctggccaacgcttttgtaaatgttctcgccgagcccccacggattctgacgccggctaacactttataccaggtcattgcaaaccgcccagccttgctcgactgcgccttctttgggtccccactgcctacaattgaatggtttaagggcgcaaagggcagcgcactacacgaagacatatacgtgctgcacgaaaacggtacattggagattcctgtcgctcagaaagattctactgggacctacacctgtgttgcaaggaataagctgggcatggcaaagaacgaagtgcacctggaaatcaaagacccaacttggatcgtgaagcagccagaatacgcagtcgtgcaaaggggcagcatggtcagcttcgaatgcaaggttaagcatgatcacactctcagtcttaccgtgctgtggttgaaagacaaccgcgagctgccctccgatgaaaggttcactgtcgataaagatcaccttgtggtcgccgacgtctcagacgacgactcaggcacatatacatgtgtagctaatacgaccctggacagtgtgagtgcatctgcagtactgtctgtagtggctcctacacccacccctgccccagtgtatgatgtacccaacccccctttcgatctcgaacttaccgaccaactggacaaatctgtccagctcagctggacccccggagacgacaataattctccaatcacgaagtttatcattgaatatgaggacgcgatgcataagccaggactgtggcatcaccaaacagaggtctcaggaactcagactaccgcgcagctaaagttatcgccttacgtgaattacagcttcagagtgatggccgtcaattcaattggcaagtcgctgccttccgaagcctctgagcagtacctgactaaggcctccgagccagacaaaaacccaacagctgtggagggcctaggtagcgaaccagacaatttggttattacctggaagccactcaacggctttgagtccaacggacccggtctccaatacaaggtgtcttggagacaaaaggacggcgacgacgagtggacaagtgtggtggtcgctaatgtttctaaatacatagttagcggtacacccacatttgtgccttaccttattaaagtgcaggcattaaatgacatgggcttcgcgccagaacccgctgtggtaatgggccacagcggcgaggatctgccaatggtggcacccggtaatgtgcgcgttaacgtggtgaatagcacactcgctgaagtccattgggaccctgtcccactcaaaagcatccgcggacacctgcaggggtatagaatctattactggaaaacccagtctagtagcaaaagaaatagacgccatatcgagaaaaagatccttactttccaggggagtaaaactcacggaatgctccccggtcttgagccttttagtcactatacactgaatgtgcgggtggtgaatggtaagggcgaaggcccagcctctccggacagggtttttaatactcctgaaggggtgccttccgccccatcctctctaaaaattgtgaatcccacgttagattcactgaccctcgagtgggaccccccttctcacccaaatggaattctgaccgagtacactctgaagtatcaacccatcaactctactcatgaactggggcctctagtggacctgaagatccccgctaataaaacacgttggacactcaagaacctgaacttctcaactcgatacaagttctacttttacgcccagacgagcgcaggctccggcagtcagattactgaggaggccgtgaccactgtggatgaggccggtatactgcctcctgacgtcggggctgggaaggccatggccagccggcaggtcgacatcgcaacacaaggctggtttattgggcttatgtgcgccgtagccctgttaattctcatcttattgatagtttgtttcatcagacgaaacaaaggtggtaagtatccagttaaggaaaaagaagacgctcatgcggacccagagattcagccaatgaaagaagacgatggtacttttggagagtactccgacgcggaagaccacaagcccctgaagaagggatcgaggacaccatcagatcgtaccgtgaagaaagaagacagtgatgactctctggtggattatggtgagggcgttaacgggcagttcaacgaagatggttctttcatcgggcagtattctggtaaaaaggaaaaggagcccgctgaaggaaatgagtcaagcgaggctcccagcccagtgaatgccatgaactcctttgtttag

SEQ ID NO: 232491 - DNA, 3915 bp, synthetic construct
  misc_feature 1..3915: note = Description of Artificial Sequence: Synthetic coding sequence
  source 1..3915: mol_type = other DNA
atgcagctgaagattatgcccaagaagaagcgcctgtccgcaggtagggtcccactgattctctttctgtgccagatgatctccgcactcgaagtgccactcgatccaaaactgctggaggaccttgtgcagccacccacaatcactcaacagtcaccaaaagactatattatagacccaagagaaaacatcgtgattcaatgtgaagctaaagggaagccgcctccttccttcagttggactagaaacgggactcacttcgacatcgataaggacccattggtcacaatgaagcccggaactggaaccctgataataaatatcatgtccgaggggaaggcggagacatatgaaggggtttatcagtgcactgccagaaacgaaaggggggctgccgtcagcaacaatatagtcgtacgaccatctcggtcacccttgtggaccaaagaaaagttggaacctatcacgcttcagtctggacaatcgctggtgctcccctgtagacccccaataggcctcccacccccaatcatcttttggatggataattcttttcagaggctccctcaatcagaaagggtgtcacagggcttgaacggagacctatacttctccaatgtcctgccagaagacaccagggaggactacatttgctatgccagattcaatcatacccagaccattcaacagaagcagcctattagcgtcaaagtgattagcgtggacgaactcaatgacacgatcgctgccaacttatccgacactgagttctacggcgctaagtcctcaagggaaagaccacccacgttcttgaccccggaaggaaacgcttccaacaaagaggagctgaggggcaacgtactatccctcgagtgtatagctgagggcctccctactccgatcatttattgggccaaagaggacgggatgctgccgaagaaccggacggtgtacaaaaactttgagaagacccttcagattatccatgtatctgaagcagatagcggaaactaccagtgtatagccaaaaatgctctcggggcaattcaccataccatttcagttcgagtgaaagctgcgccatactggataacagcaccccagaatctagtcctgtccccgggagaagacggaaccttaatctgtcgggcaaacggaaatcccaaacccaggatatcttggctgacgaacggcgttcctattgaaatagccccagacgaccctagcaggaaaatcgatggggacaccatcattttttcgaatgtacaggagcgttcctccgctgtgtaccagtgcaatgccagcaatgaatacggttatctgctggctaatgcattcgtcaatgttctggccgagccacctagaatcctcacgccagccaacactctgtaccaggtgatagctaaccggccagcgttgctcgactgcgccttcttcgggagtcccctgcctactattgagtggttcaaaggcgctaaagggagcgccctccacgaggacatctatgtcctgcacgagaacggaaccctggagattccagttgcgcagaaggactcgacgggcacatatacttgtgttgcccgtaataagcttggcatggctaagaatgaagtgcacttggaaataaaagacccgacttggattgtgaagcaacctgagtacgcagtggtgcagcgcggttctatggtctcatttgaatgtaaagtcaagcatgaccataccttaagccttactgtgctgtggctgaaggataaccgcgaactcccctccgacgagcgctttacagtcgataaagaccatttggtcgttgcagacgttagtgatgacgactccggtacttacacatgtgtcgcaaacaccactctagacagcgtgtcagcttccgcggtcctttcagttgtggccccaaccccgacgcccgctcctgtgtatgacgtaccaaatccaccattcgacctggagctgacagaccaactggacaaaagtgtgcagctgagctggacccccggagacgacaataattcccctatcacaaaatttatcatcgagtacgaggacgcaatgcacaagccaggcctgtggcaccaccagaccgaagtgtcggggacccagaccaccgcacagctcaagctttctccctacgtaaattattcatttagggtcatggccgtgaactcaattggcaaaagtctcccctctgaagcctcagaacaatacctcactaaggcatccgagcccgacaagaaccccaccgcagtcgaaggcctcggtagcgagcccgataaccttgtcataacatggaagcctctgaacggtttcgagagcaacgggcctgggttgcagtacaaggtcagctggcgccagaaggacggggacgacgagtggactagcgtggtggtcgcaaatgtctccaaatacatcgtgtccggaacccccacttttgtcccgtacctgattaaagtccaggctctcaatgacatgggcttcgctcctgaacctgcagtcgtcatggggcatagcggcgaagaccttcccatggttgcacccggaaatgttcgagtcaatgtggtgaactctaccttagccgaagtgcactgggatcccgtcccccttaaatcgattcggggacatttgcagggttaccgcatctattactggaagactcaatcctctagtaaacgaaaccgcaggcatatagagaagaagatactgacattccagggcagcaagacccatgggatgctgcccggacttgaaccgttcagccattacacactgaatgtgcgagtagtgaatggcaaaggagaagggcctgcatcccccgaccgcgtcttcaacacccccgaaggagtcccttcagcccctagttctctgaagatcgtcaacccgacattggactctttgacacttgagtgggacccccctagccaccccaatggaattctgacagaatataccttgaaataccaacccatcaactccacccacgaactagggccactggtcgatttgaagatccccgctaacaaaactagatggactttgaagaacctcaatttttctactaggtacaagttttacttctatgctcaaacctctgccggttcaggctcgcagattacagaagaagccgtcacgaccgtcgatgaggctgggatactgcccccagatgtcggtgctggcaaagtgcaggcggtgaatccacgtatttcgaatctcactgctgccgcagcagagacctacgcgaacattagttgggagtacgaggggcctgagcacgtgaatttctatgtcgagtacggcgtcgctggaagtaaggaggaatggcgcaaagaaatagtgaacggaagccgcagcttcttcggcctgaagggcctgatgccaggcaccgcttacaaggtcagggtgggcgcagtgggggatagcggatttgtgtcatccgaagacgttttcgaaacggggcctgccatggccagtagacaagttgatattgctactcaaggctggttcattggtcttatgtgcgccgtcgcattactaatcctgatcctgttgattgtgtgctttattaggaggaataaagggggaaagtaccctgtgaaggagaaggaagacgctcatgctgatccagagatccagccgatgaaggaggacgacggcaccttcggagagtactctgacgcggaggatcataagccactgaagaaagggagcaggaccccatctgaccgaactgtcaagaaggaggatagtgatgacagcttggttgattacggtgagggcgttaatggccaatttaatgaagatggatccttcatcggacagtactccggtaagaaggagaaagaaccagccgaagggaatgagtcctccgaggcaccttctccagtgaatgccatgaattcctttgtctag

SEQ ID NO: 232492 - DNA, 3927 bp, synthetic construct
  misc_feature 1..3927: note = Description of Artificial Sequence: Synthetic coding sequence
  source 1..3927: mol_type = other DNA
atgcagctcaagattatgccaaaaaaaaaacgactgagtgctggcagagtccctttgatcctgttcctttgtcagatgataagcgcattagaggtgcccctagatcagaagtcaactgaagtcatggtgcaaccacctacaattactcaacaatcccccaaggactatatcattgacccaagagagaatatagtgatccagtgcgaggcaaagggcaagccgccaccaagcttcagctggaccaggaacggtacacacttcgatatcgacaaagatccactggtcacaatgaagccaggaacagggaccctgatcatcaacataatgtcagagggcaaggcagaaacttatgagggcgtctaccagtgcaccgcaaggaatgaaagaggagccgctgtgtcgaataacatcgtggtgcgaccttccaggtcaccactctggaccaaagagaagttagaaccaatcaccctccagagcggccaatcccttgtcctcccgtgcaggcctcccatcgggttaccccctcctatcatattctggatggataatagttttcagaggctgcctcagtctgagcgagtgagtcagggacttaacggagacctgtacttctccaacgttttacccgaagataccagagaggattatatctgctacgccaggttcaatcacacacagacaattcagcagaaacagccaattagtgtcaaggtgatcagcgtggacgagctgaacgataccatagccgctaacctgtcggacacagagttctacggtgccaagagctccagagagcgacccccaacgttcctcactcccgagggaaatgcttcaaacaaggaggagctgcggggaaatgtgttatccttggagtgcatagcagaaggattgccaacccccatcatctattgggctaaagaagacgggatgttgcccaagaacaggacagtctataaaaacttcgaaaagacgctgcagattattcatgtcagcgaggctgactcaggcaattaccagtgcattgccaagaacgcactaggagcaatccaccacaccatatctgtacgggtgaaagccgcaccctactggataacagcccctcagaacttggtgctttcgccaggagaggacggaaccctgatctgccgagctaacggcaatcccaaaccacgtatcagttggctgaccaacggagttccaatcgagatcgctcccgatgacccatcgagaaaaatagacggcgataccatcatcttcagcaatgtacaggagcggagcagcgccgtgtaccagtgcaacgcttcaaatgagtacggatacctgcttgccaatgctttcgtcaacgttctggctgagccacctcgaatactaacccctgcaaacactctttatcaggtcattgcaaaccggccagctctgctcgattgcgcattttttggctccccattgcccacaatcgaatggtttaagggtgccaaagggagcgctctacacgaagatatctacgtcctgcatgagaacggtactcttgaaatacccgttgctcagaaggatagcaccggaacctacacatgtgtggcccgtaacaaactcggtatggctaagaacgaggtgcaccttgagattaaggaccctacttggattgtcaaacagcctgagtacgctgtcgtccaacgcggttcgatggtaagtttcgagtgtaaggtgaagcacgatcataccctttcccttactgttttgtggcttaaggacaaccgggagctaccaagtgatgagagattcaccgtcgacaaggatcacctcgtggttgccgatgtcagcgatgacgactcgggcacctacacgtgtgtcgcaaacactaccctggacagcgtgagtgccagcgcagttctatcggttgtcgccccaaccccaacacccgcacccgtgtatgatgtgccaaatccaccctttgaccttgaacttactgaccagttggataagagtgtgcaactttcatggaccccaggggacgataacaacagccccatcactaagttcatcatagagtacgaagacgctatgcacaaaccaggattatggcatcatcagactgaggtctctgggacccagaccaccgctcagctaaagctgagcccgtacgtgaattatagcttccgcgtgatggctgtgaactctattggtaaatccttgccttccgaggccagtgagcagtatttgacaaaggcaagtgaaccagacaaaaacccaacagccgttgaaggattgggctcggagcccgataatttggtgattacctggaaacctctcaatgggttcgagtctaacgggcctggactgcagtacaaagtctcctggcgacagaaagatggtgacgatgagtggacctcggttgttgttgctaatgtcagcaagtacatcgttagtggcacacccacgtttgtgccatatcttataaaagtgcaggcactcaacgacatgggatttgctcctgaacctgccgtcgtgatggggcattcaggcgaagatctacccatggtggccccagggaacgtaagggtgaacgtggtcaatagcactctggctgaggtccactgggatccagtgccattgaaaagcatccgtggtcatctacagggctatagaatctactattggaagactcagtctagttccaagcgaaacaggcgccacatagaaaaaaaaattcttacctttcagggatctaagacccatgggatgctgccagggcttgagccttttagtcattatacattgaatgtgagggttgttaacggcaagggggagggacccgctagccccgatcgagtgttcaatactccagagggagtgccaagtgcccctagctcactcaaaatagtcaatcctacactcgactctctcacgctggagtgggatcctccgtcccaccccaatgggattttgaccgagtataccctcaagtatcagccaataaattctacgcatgaactgggccctcttgtggacctgaaaatccccgctaacaagactagatggacgctgaaaaacctgaacttttccacacgatataaattttacttttacgcacagacatcagcaggatccggctcccagatcaccgaggaggctgtgaccactgttgacgaggccggaattctgcctcccgatgttggcgctgggaaggtccaggcggttaatcccagaatttccaacctgaccgcggctgccgctgagacctatgctaacataagctgggagtacgaggggcctgagcatgttaacttctacgtggaatacggagtggctggttcaaaagaggaatggcgcaaggagattgtgaatggttcccggtccttctttgggctgaaaggtttaatgccaggtacagcttacaaagtgagggtgggagcggtgggagattcaggattcgtgtccagcgaggacgtcttcgagactggacccgctatggcgagtcggcaggtggatattgctacccagggatggttcatcggccttatgtgtgctgttgctctcttgatcctcatactgctgatagtgtgctttataaggagaaataagggtggaaagtaccctgtgaaggaaaaagaggacgctcatgccgaccccgagatccagcccatgaaggaagacgatggaacgtttggagagtactcctcactgaaaaatgacgccgaggatcataagccacttaagaaaggcagcagaactccgtctgacaggacagtgaaaaaggaagattcagacgacagtctggtagactatggcgagggggtcaatgggcagttcaacgaagatggtagtttcattgggcagtacagcgggaagaaagaaaaagaaccagcagagggcaatgagagttcagaagcaccaagtcctgtgaatgctatgaactcatttgtgtag

SEQ ID NO: 232493 - DNA, 3543 bp, synthetic construct
  misc_feature 1..3543: note = Description of Artificial Sequence: Synthetic coding sequence
  source 1..3543: mol_type = other DNA
atgcagctgaagatcatgcctaagaagaaacgcttgtccgccggtcgggtgcctttaatcttgtttctgtgtcagatgatctcagctctggaagtgcccctggatcagaagagtaccgaagtgatggttcagccacccacaattacgcagcaatcccccaaggactatattattgatccaagggaaaatatagtgatacagtgcgaagccaagggcaagccccctccttctttttcctggacacgaaacggtactcactttgatattgacaaagaccctctggtgacgatgaagcccggtaccgggaccctgatcattaatattatgtctgaggggaaggccgagacctacgaaggcgtgtatcagtgtaccgcacgcaacgagagaggtgcagccgtatcgaacaatatcgtggtgaggccttcaaggagtcccctctggaccaaggagaaattagagccgatcaccctccagtcgggacagtcgcttgttcttccttgtaggccccctatcggactccctccgccaattattttctggatggacaactcattccagaggttaccccagtctgagcgggtttcacagggtctcaacggagatctgtatttcagtaatgtgctgcccgaggatacacgggaagattatatctgttacgccagatttaatcacactcagacaattcaacagaagcagcccattagcgtgaaagtgatctctgctaagagttccagggagaggcccccaacgtttttgacacctgaaggcaacgcatctaataaagaagagctgcggggtaacgtcttatcgctggaatgcattgcagagggcctaccgacacctattatatattgggcaaaggaggacggaatgctcccaaaaaaccggaccgtctacaagaattttgagaagaccctgcaaatcattcatgtgtccgaggccgattccggtaactatcagtgcatagcaaagaacgctttgggggcaatccaccacacaataagcgtgagggtgaaagccgcaccctattggattactgctccccagaatctggtgttgtccccaggggaggacgggaccctgatctgcagggccaacggaaacccaaaaccccgaatctcctggttaacaaacggtgtacccattgaaatagcaccagacgaccctagccggaagatcgacggcgacaccatcatctttagcaacgttcaggagcgctcctccgcagtgtaccaatgtaatgccagcaacgaatatggttacctgctggccaatgcctttgttaatgtgcttgcagagcctccccgaattttgacacctgccaacacactctatcaagtgattgccaatagacctgccctgcttgactgtgctttttttgggtccccattgcccaccatagagtggttcaagggagctaaaggctccgctctccacgaagatatctatgtgcttcacgagaacggaacacttgagataccagtcgcccagaaagatagcaccggaacttatacttgtgtggcacgcaataagttaggcatggcaaagaatgaagtgcatttggagatcaaggaccctacttggattgttaagcagccagaatatgctgtggtgcagcggggttcaatggtatcctttgagtgcaaggtgaagcacgaccataccctcagtctgactgtactgtggctgaaggacaatcgcgagctcccttcggatgaacgatttaccgtggataaagaccatcttgtggtcgcggatgtgtccgatgacgattcagggacatacacctgtgtagctaacactaccctcgactccgtgtctgcttcagccgtgctctctgtagtcgcccctacgccgactccagctcctgtatacgacgtgcccaatccgccatttgacctggaactgacagaccagctggataagtccgtccagcttagctggacacccggtgacgataacaatagcccaatcactaaattcataatcgagtacgaagacgccatgcacaaacctggactgtggcaccaccaaacagaggtgtccggaacccagactactgcccaactgaagctttcaccctacgtgaactactcttttcgcgtgatggcagtcaacagcatcggaaagagtttacctagtgaagcctcggaacagtacctgaccaaggcgtccgaacctgataagaaccctaccgcagtggaaggcctggggagcgaacctgataacctggtaattacttggaaacctctaaacggattcgagagcaacggcccaggactgcagtacaaggtgagctggagacagaaggacggtgacgatgagtggacctcagttgtcgtcgctaatgttagcaagtatatcgtttcaggtacgcctaccttcgtgccctacctgatcaaggtccaagccctgaacgacatggggttcgcgcctgagcccgcagtagtcatggggcatagcggggaggatctacctatggtggctccaggcaacgtgagagtgaatgtggtgaatagcaccctggccgaggtgcattgggatcctgttccactcaagagcatccgcggtcacctccaggggtataggatctattattggaaaacccagtcttcttccaaacggaataggcggcatatcgagaagaaaatccttaccttccagggaagcaaaacacacggtatgctgccaggcctggagccattcagtcattatacgttgaatgtgcgtgttgttaacgggaagggtgaaggacctgcgtctcccgacagggtgttcaatacacctgagggagtgccaagtgcgccttccagcctcaaaatagtgaacccaacactagacagcctgacactagagtgggacccgcctagtcatccaaatggaatactgacggagtatacacttaaataccaacccattaatagcacccacgaacttggaccccttgtggaccttaagatcccagccaacaaaacaaggtggacgttaaagaaccttaacttcagtacgcgttataagttctacttttatgcccaaacctcagcaggttccgggagccagataactgaggaagccgtgactactgttgacgaagcaatggctagtcgacaggtagacatcgcgactcagggttggttcatcggcctgatgtgtgcagtggcacttctgatcctcattctgctgattgtctgttttatccggagaaataaggggggaaagtatccggtaaaggagaaggaggatgctcacgctgacccagaaattcagccaatgaaggaggatgatgggacctttggggagtactcagacgcggaagatcataagccgcttaagaagggcagccggacaccgtccgatcgaacagtcaagaaggaggattctgatgactcccttgtggattacggggaaggggtgaatggacagttcaacgaggacggcagctttattgggcagtattccgggaaaaaggagaaggagcccgctgaaggtaacgaatcaagtgaggcccctagtcccgtcaatgctatgaacagcttcgtgtag

SEQ ID NO: 232494 - DNA, 1296 bp, synthetic construct
  misc_feature 1..1296: note = Description of Artificial Sequence: Synthetic coding sequence
  source 1..1296: mol_type = other DNA
atgcagttgaagatcatgcctaaaaaaaagaggctcagcgccggtcgggtaccgctgatccttttcctgtgtcagatgataagtgcgctggaggtgcccctagacctggtgcagccccctaccattacccagcagagtcctaaggattatattattgatccaagggagaacattgtgatccagtgcgaagctaagggaaaacccccaccaagttttagctggactcggaatggtacccactttgacattgacaaggatccactggtgaccatgaagcccggaaccggtacactgatcattaacataatgtccgagggaaaagccgagacgtatgagggtgtctaccagtgtacagccagaaacgaaaggggtgctgccgtgtccaacaatatcgttgtgcggccttccagaagtcctttgtggaccaaggagaagcttgaaccaatcacactgcagtccggccagtcactggtactgccatgccgccctccaataggcctccccccaccaattatcttttggatggacaattcttttcagcgtctaccccagagcgagcgggttagccaaggcctgaatggcgacctgtacttttccaatgtgctgcccgaggacacccgtgaagactatatatgctatgctcgcttcaatcatacacaaaccattcagcagaagcagcctatttcggtcaaagtgatctctgttgacgagctgaacgatacgattgccgcaaatcttagcgataccgagttctatggggcaaaaagctccagagagcggcctccaacgttcctgacaccagaaggcaatgccagcaacaaggaagagctgcgaggtaatgtcctgagtctggaatgtatagccgagggcctgccgacgccaatcatttactgggcaaaggaagacggaatgcttcccaagaacagaactgtgtacaaaaattttgagaagactcttcagatcattcacgtttctgaagctgatagcggcaactatcagtgcatcgctaagaatgctctgggagcaatccatcacacaatctctgtgagggtgaaggcagcaccgtactggatcacagccccacagaatctggtcctcagccccggagaggacggcaccttaatctgccgtgctaatggaaaccccaagcccaggattagctggttgactaatggagttcccattgaaatcgccccagatgacccctccaggaagatcgatggggataccatcattttcagcaatgtgcaagaacgttccagcgccgtgtaccagtgcaacgctagcaacgagtag

SEQ ID NO: 232495 - DNA, 186 bp, synthetic construct
  misc_feature 1..186: note = Description of Artificial Sequence: Synthetic coding sequence
  source 1..186: mol_type = other DNA
atgcagctgaaaatcatgcctaagaagaagaggctctctgccggacgcgtgccactcatattattcctctgccagatgatttccgccttggaggtgccactcgaccctaaactcctggaagacctggtgcagccccctaccataactcagcaaagtccgaaagactacattattgaccctaggtag

SEQ ID NO: 232496 - DNA, 321 bp, synthetic construct
  misc_feature 1..321: note = Description of Artificial Sequence: Synthetic coding sequence
  source 1..321: mol_type = other DNA
atgcagctgaagataatgccgaaaaagaaaaggctgagtgctggaagagtacctcttattcttttcttatgccagatgatatctgccctggaagtacccctcgacctggtccagcctcccactattacacagcagtctccaaaggactacatcattgaccccagggaaaatattgttattcagtgcgaagctaagggtaagcccccaccctcgttcagctggacccgtaatggaacgcattttgatattgataaggatccattggtaaccatgaaacccggaacaggcactctgatcataaacatcatgtctgaggggtag

SEQ ID NO: 232497 - DNA, 3915 bp, synthetic construct
  misc_feature 1..3915: note = Description of Artificial Sequence: Synthetic coding sequence
  source 1..3915: mol_type = other DNA
atgcagctcaaaatcatgcccaaaaagaaaagactgagtgctggaagagtgcctctgattttgtttctgtgtcagatgatctcagccctcgaggttccactcgatcctaagttattagaggacctcgtgcagcctccaaccatcacccagcagtccccaaaagattacattatcgatcccagggaaaatattgtgattcagtgtgaagcaaaggggaaaccacctccgagtttcagttggacccgaaacggcacccacttcgatattgacaaggatccactggttacgatgaaacctggcacgggtacattgatcataaatatcatgtccgaggggaaagctgaaacatatgaaggcgtgtaccagtgtaccgctcgcaacgaaagaggtgctgctgtctccaacaacattgtggtcaggccttctcgctcaccactatggactaaggagaaacttgaacctatcacactgcagtcgggccaatctcttgtgctgccctgcaggccccctatcgggcttcctcctcctataattttctggatggataattccttccagagactgccgcagtccgaacgagtgtcacagggactgaacggcgatctttacttttccaatgttcttcccgaggacaccagagaggattacatttgttatgcccgtttcaaccatacacagacaatccagcagaagcaaccaattagcgtaaaagtcataagcgtggatgagctgaacgacactattgccgcaaacctgtccgataccgagttttatggcgcaaagagctcccgagaacgccctcccacttttctcactccagaggggaatgccagtaataaagaagagttacgcggtaacgtgctgtccctggaatgtattgctgaagggctccctacacctatcatctactgggccaaggaggatggtatgctgcctaaaaataggacagtctacaagaatttcgaaaagaccctgcagattatccatgtgagtgaagcggacagcggtaattaccagtgcattgctaaaaatgctttgggggctatccatcacaccatctctgttcgtgtgaaagctgccccatattggataactgcaccccagaacctggtgctttccccaggggaggacggcaccctgatctgccgagccaatggaaaccccaaacctcgcatctcatggctgactaacggcgttcccattgagatcgctccagatgatccctcccggaaaatcgacggcgacacaattatttttagcaacgtgcaggagcgaagtagcgcagtgtaccagtgtaacgcctcaaatgagtatggatacctcctggccaatgcttttgtgaatgtgctcgcagagccacctagaatcctgaccccagccaacacgctgtaccaggtaatcgctaatcgccctgccctgctcgattgcgcgttttttggctccccacttccaacaatcgaatggttcaagggggctaaaggatctgccttacatgaagacatctatgttctccatgagaacgggaccctggaaataccagtcgctcagaaggatagcactggtacatacacttgcgtggcacggaataagcttggtatggccaaaaacgaagttcacctggagatcaaggacccgacctggatcgtcaagcaaccagagtacgctgtcgtgcaacggggaagcatggtctcatttgagtgcaaagtcaaacatgatcacacgctgtctttaaccgtgctctggctgaaagacaatagggaacttccttctgatgagcgctttaccgtggacaaggatcaccttgtggtggccgacgtcagcgatgacgacagtggtacatacacttgtgtagccaacactacgctcgattctgtgtcggcgagcgccgtcctcagtgtggtcgctcccaccccaacccctgcgcctgtgtacgacgtccctaatcctccatttgatcttgaacttacagaccaacttgacaagtctgtccagctgtcttggactcccggagacgacaataatagccctatcacaaagtttataattgaatacgaggacgccatgcataagcccggtttatggcaccaccaaactgaagtttcaggcacccagaccacagctcagctaaagctcagtccctacgtgaactatagctttcgggttatggccgtcaactccattggcaagagcctgccttcagaagcgtccgaacaatacctgacaaaagcttccgagcctgataaaaaccccaccgccgtggaaggtctgggctcagaacccgacaacctagtgattacctggaagcctctgaacggattcgagtccaatggcccaggccttcaatataaggtgagttggagacaaaaagatggcgatgacgaatggacgtccgtagtggtcgctaacgtttctaagtatatagtttccggaacacctacgttcgtcccttacctcataaaggtgcaggctctgaatgatatgggattcgcacctgaacccgctgttgtgatgggccattctggcgaggacctgccgatggtggccccaggcaacgtgcgagtgaacgtggtgaactctacacttgcagaggtccactgggaccctgttccactgaagagcataagaggccacctacagggttatagaatctattattggaaaacacaaagttcatcaaaaagaaatcgcagacatatcgagaaaaagatcttaacctttcaaggttctaagacgcacgggatgctgcccggtttggaacctttttcacactatactctaaacgttcgggtggtaaacggtaagggtgaggggccagctagtcctgatagggtcttcaacacacccgagggagtaccatctgccccatcatctctaaaaattgttaaccccaccttggatagtctcacgctcgaatgggacccaccaagccacccgaatggcatcctcaccgaatacacgcttaagtatcaacctattaatagcacccatgaactaggacccctggtggacctcaagattccagctaacaagactagatggacactgaagaatctgaacttctccactcgttacaagttctacttttacgctcaaacatccgcaggctccgggagtcagattacggaagaggcggtgaccacagtagatgaggccggaatcctccccccagatgtgggagccggtaaagttcaggccgttaaccccaggattagtaatctgactgctgctgccgcagagacatacgctaacatctcatgggagtatgaaggccctgaacacgtcaatttttacgtggagtacggagtggctgggagtaaagaagaatggcgaaaggaaatagttaatgggagtcgatccttttttggactcaaaggcctcatgccaggcactgcgtataaagtcagagtgggcgctgtgggcgactcgggcttcgtgtcctcagaagacgtattcgaaactggccctgccatggcgagcaggcaggtcgacatagctacgcaaggatggttcataggtctcatgtgcgctgtcgccctgctgattcttatactcctgattgtctgcttcatcagacgaaataaggggggtaagtatcctgtgaaagagaaagaagatgcgcatgctgatcccgagatccagcctatgaaggaggacgatggcactttcggcgaatactctgacgccgaggatcacaagcctctcaagaaaggcagccgaacaccatccgaccgcacagtgaagaaggaagattccgacgatagcctggtagattacggagaaggcgtaaacggccagttcaatgaagatggctcgttcattgggcaatatagcggtaagaaggagaaggaacctgcagaggggaatgaatccagcgaggcaccaagcccagtaaacgctatgaatagctttgtctag

SEQ ID NO: 232498 - DNA, 447 bp, synthetic construct
  misc_feature 1..447: note = Description of Artificial Sequence: Synthetic coding sequence
  source 1..447: mol_type = other DNA
atggccagcaggcaggtggacattgccactcaaggctggttcattggcctgatgtgcgctgtggcgctgttgatcctaatcctccttatcgtctgcttcatcagacggaataaggggggaaaatatcctgtgaaggagaaggaagatgcccacgcagatcccgaaattcagccaatgaaagaggatgatggcactttcggcgagtattctgatgccgaggaccacaaacccctgaaaaaaggatcgagaacgcctagtgaccgcaccgtgaagaaagaggactccgacgatagtctggtggactacggagaaggtgtgaatggccagtttaatgaggacgggtcattcattggccaatactccggaaagaaggagaaagagcccgctgagggcaacgagtccagcgaagcaccttcccctgttaacgcaatgaattcgttcgtctag

SEQ ID NO: 232499 - DNA, 357 bp, synthetic construct
  misc_feature 1..357: note = Description of Artificial Sequence: Synthetic coding sequence
  source 1..357: mol_type = other DNA
atgcaacttaagatcatgcccaaaaaaaagcgcctgtcagccggtcgcgttcctctgattctctttctttgtcaaatgatatctgctctggaagtgcccctggatcccaagctgctcgaagacctggttcagcctcctacaattacacagcaaagcccaaaagactatatcattgacccaagagaaaatatcgtaatccagtgcgaagccaaagggaagccgccacccagctttagttggacaagaaacggaacccacttcgacatcgacaaagacccactagttactatgaagcccggaaccggaaccctgatcattaacatcatgtccgagggtaaagcagagacgtacgaatag

SEQ ID NO: 232500 - DNA, 2316 bp, synthetic construct
  misc_feature 1..2316: note = Description of Artificial Sequence: Synthetic coding sequence
  source 1..2316: mol_type = other DNA
atgcagctcaaaatcatgccgaaaaaaaaaaggctaagcgctggcagggtacctctcatcctgttcctctgtcagatgatttccgcccttgaagttccattggatctggttcaaccgccaaccataacgcagcagagccccaaggactatattattgatccccgagaaaacatcgtcatccagtgcgaagccaaggggaagccccctccctccttctcatggacacggaacggtacccattttgatatcgataaagatccactcgtgactatgaaaccgggaaccggcacattaattatcaatatcatgtctgagggcaaggctgagacttacgaaggcgtgtatcagtgcacagcgagaaacgagcgcggtgcggctgtctccaataatattgtggtgcgtccatcccggtcccctctctggacaaaggaaaagctggaaccaattacattacagagtgggcagagcctggttctgccatgcagaccccctataggtctgccgcctccaatcatattctggatggacaattcctttcaaaggctccctcagagcgaacgggtgtcacagggactgaacggggacctgtatttctctaatgttctgcctgaggacacgagagaggactatatctgttatgctcgatttaatcacactcagactattcagcagaagcagcccatttccgttaaagtgatctcggtggacgagctgaacgacaccatcgctgccaatctgtccgataccgaattctacggtgccaagtcctcccgcgaacgtccccctacctttctcactcccgagggaaatgcgtccaacaaagaggagcttcgcggaaacgtgctgagcctggagtgcatcgcagaaggcctgcccaccccaatcatatattgggccaaggaggacggaatgcttccaaagaatcgtaccgtgtacaaaaacttcgaaaagaccctacagatcatacacgtgagcgaggcggacagtggcaattatcagtgcatagccaagaatgcactgggtgccatccaccataccataagtgtcagagtcaaagcagcaccatactggattacggcccctcagaatctggtactgagtcccggagaggatggaacccttatctgtagagccaatgggaacccaaagcccagaatctcgtggttaaccaacggggtgcctatagagatcgccccagacgacccgagcaggaaaattgatggagacactataatatttagcaatgtgcaggagcgctcctccgccgtttatcagtgcaacgccagcaatgaatatggctatctgctggccaatgcctttgtgaatgtccttgctgaacctccaagaattctgactcccgcaaacacactgtaccaagtgatcgcaaataggccagcactgttggactgcgctttctttgggtctcctttacctactatcgaatggtttaagggggctaaggggagcgccctccacgaagacatctatgttctgcacgagaatggaactctggagatccccgtcgctcaaaaagacagcaccggcacatacacttgcgttgcaaggaataagctgggaatggctaagaatgaggtccatctggagatcaaggaccccacctggatagtgaaacagccagaatatgctgttgtgcagcggggttctatggtgtccttcgaatgcaaggtaaaacatgaccatacactaagcctgaccgttctgtggctgaaggacaaccgcgagcttcctagtgacgagcgttttacagtggataaggatcatctggtagttgccgacgtaagtgatgatgattctggaacttatacttgtgttgctaacacaaccctggactcggtgagtgcctcagctgtgctttcagtggttgatgtccctaatcccccattcgatctggagctgacggaccagctggacaaatccgtgcagctaagctggactcccggtgacgataacaattctccaattacgaaattcataatcgaatacgaagacgctatgcacaagccagggctatggcaccaccagaccgaggtgagcggtactcaaacaaccgctcagctgaagctctctccctacgtcaactatagcttcagggttatggccgtgaactctattgggaaatctctgccctccgaagcctcagagcagtacctgactaaggcaagcgaaccggataaaaatcctacagccgttgagggcttaggcagtgaacccgacaacttagttattacctggaaacctttaaatgggtttgagtcaaacggaccgggactgcagacttcaactgcgtcattctag

SEQ ID NO: 232501 - DNA, 321 bp, synthetic construct
  misc_feature 1..321: note = Description of Artificial Sequence: Synthetic coding sequence
  source 1..321: mol_type = other DNA
atgcagcttaagattatgccgaaaaagaagcgacttagcgcgggacgggtgccactgattctcttcttgtgtcagatgatatccgcgctcgaggtcccgctagacttggtacagccccctaccatcacccagcagagccctaaagactatataattgatccaagggaaaacatcgtcatccagtgcgaagccaaaggcaaacctccgcctagcttcagttggacccgtaacggaacgcattttgatattgacaaggatcccctggtcaccatgaagcccggaaccggcacccttatcatcaatatcatgtcagaggggtag

SEQ ID NO: 232502 - DNA, 3462 bp, synthetic construct
  misc_feature 1..3462: note = Description of Artificial Sequence: Synthetic coding sequence
  source 1..3462: mol_type = other DNA
atgcagctcaagattatgccaaaaaaaaagaggctgtccgccggtcgcgtacctctgatcttattcctgtgccaaatgataagcgccctggaggtaccactggaccagaaatccaccgaggttatggtccagcctccaaccattactcagcagtcacccaaggattacatcattgatcccagagaaaacattgtgattcagtgtgaggctaagggcaagccccctccttctttctcctggacgaggaatggaacccactttgacattgataaggatcctctcgtgactatgaaaccaggtaccgggaccctgatcataaacatcatgtctgaaggaaaggcagagacctacgagggtgtgtaccagtgtaccgcccgaaatgagaggggtgccgcagtgagcaataacattgtcgttcggccttctagaagtcctttatggactaaggagaaactggagcctattacgctgcaatctggccagtctctggttttgccctgccgccctcccattggcctgccgccaccgatcatattttggatggacaactcctttcagcgccttcctcagagcgagcgggtgtcccagggtctaaatggggacctttacttctccaacgtgctgcccgaggatactcgtgaggattacatctgctacgcacggtttaaccatacccaaaccattcagcaaaaacagcccattagcgtgaaagttatttcggtggacgagcttaacgacacaatcgctgccaatttgtcagacacagagttttatggcgcaaagagctcgcgcgagagacctcctactttcttgactcccgaaggcaatgcgtctaataaagaagagttgcgtgggaatgtcctgtcactcgagtgcatcgccgaggggctgccgacccctattatctactgggcaaaggaggatgggatgctgcctaagaaccgaacggtctacaaaaacttcgaaaagactctgcagatcatacatgtgtccgaggctgattctggcaattatcagtgcatcgcaaagaacgcactcggcgctattcaccatacaatttcggttagggtgaaagccgctccgtactggataaccgctccgcagaatctggttctctctcctggagaagatgggaccctaatctgtcgcgctaatgggaacccaaagcccaggatcagctggctgaccaatggggttcccattgagatcgccccagatgacccatctaggaagattgacggcgatacgattattttttctaatgtccaggaacggtcttctgcagtctaccagtgtaacgcgtctaatgagtacggatatctgttagcgaatgccttcgttaacgtgttggctgagccaccaagaattcttacccccgcaaatacgctctatcaggtgatcgcaaaccgtcctgccctgctagactgcgcatttttcggatctcccctccccacgattgagtggtttaagggtgccaaaggctccgccttgcatgaggatatctatgtgctccacgagaatggaactttggaaattcccgtggcgcagaaagacagcacaggcacatacacttgcgtagctaggaacaagctgggcatggctaaaaacgaggtacacctggaaattaaggacccgacatggatcgtcaagcagccggaatatgcagtcgtgcagcgaggcagtatggtctcattcgagtgtaaagtgaaacacgatcataccctcagcctgacagtcctgtggcttaaagataaccgggaactaccgtccgatgaacgttttactgtcgataaggaccatctcgttgtcgctgatgtgagcgatgacgactcaggcacatatacttgtgtcgccaacaccacactcgacagtgtgtccgcttctgccgtcctgtctgtggtagctcccacccccactcccgcacccgtgtatgacgtgcccaatcctcccttcgaccttgagctaacggatcagctagacaagagtgtccagctttcctggacacctggggacgacaacaattccccaatcacgaagttcattatcgagtacgaggatgccatgcacaaaccagggctgtggcatcatcagactgaggtgtccgggacccagaccaccgctcagctgaaactgtcaccttacgtcaattactccttcagagtgatggcagtgaatagtatcggaaaatccttgccgtcggaggcctcggaacaatacctgactaaagccagcgagccagataaaaacccaaccgctgtcgaggggctaggtagtgagcccgataatctggtaatcacatggaagcccctgaacggatttgagtctaatggacctggcctgcaatacaaggtttcttggcggcaaaaagatggggatgatgaatggacatcagtggtcgtagcgaatgtgtccaaatacattgtgtccggcactcccacattcgtgccctatctgattaaggtccaggcactcaacgatatgggatttgctccagaacctgcagtcgtgatgggccacagcggggaggacctgccaatggttgctcccggtaatgtgagggtcaacgtggtcaactcaaccctcgcagaggtccattgggatccagtacccctcaagtcgatcagggggcatctgcaagggtacaggatttactactggaaaacccagagtagctcgaagaggaatcgacgacacattgaaaagaagatcctgacatttcaaggatctaaaacccacggcatgttgcccggtctggagccattctctcactacaccttaaacgtgcgagttgtaaacgggaaaggcgaggggcctgcaagtcctgatagagtgttcaatacccctgagggggtaccaagtgctcctagctccttgaaaatcgtcaatccaaccttggactctctgaccctggaatgggatcctcctagccatcccaatggcattttaaccgagtacactcttaagtaccaaccaataaattccacccacgaacttggaccccttgtcgacctgaagatacccgctaataaaactagatggacactcaagaacttaaatttctccacccgctataagttctatttttacgctcagacgagtgctggcagcggcagtcagatcacagaggaagccgttaccactgtcgatgaggcgggaatcttacccccagatgttggcgctgggaaagcaatggcgagtaggcaggtggacattgcaacacaggggtggtttatagggttgatgtgcgccgtggcgctgctaatactgatcctcctgatcgtatgcttcattcgtcgcaataaaggaggtaaatatcctgttaaagagaaagaggacgctcacgcagacccagaaattcagcccatgaaggaagacgatggcacgttcggtgaatacagcgacgcggaagatcacaaaccgctcaagaagggaagtcgcaccccaagcgaccgaaccgtgtag

SEQ ID NO: 232503 - DNA, 681 bp, synthetic construct
  misc_feature 1..681: note = Description of Artificial Sequence: Synthetic coding sequence
  source 1..681: mol_type = other DNA
atgcaggtgcatctcacagtacaggttcctccaaagatctatgacatatcaaacgatatgacagtcaacgaaggaacaaatgtgactctcacctgtctggcaaccgggaaaccagagccctccattagctggaggcatatttccccgtcagcgaaaccgttcgaaaacggtcaatacttggacatttatgggatcactagggatcaagctggcgaatacgagtgtagtgctgaaaacgatgtttcattccccgatgtgagaaaggttaaagtggtggtcaattttgccccaactattcaggagatcaagtcgggcactgtgacacctggaagatccggcttaattcgttgcgagggagcaggcgtgcctccccctgcattcgagtggtataagggcgaaaaaaagctgttcaacgggcaacagggtattatcattcagaacttctcaacccgatccatccttaccgttaccaatgtgacccaggaacactttgggaattatacctgcgtggccgcaaataaacttggaaccacaaacgcaagcctgcctctgaacccgccttcaacagcccagtacggaataacaggttccgcggacgtcttgttctcatgctggtacctcgtgctgactctctctagtttcacgtccatcttttacctgaagaacgccatcctccagtag

SEQ ID NO: 232504 - DNA, 1065 bp, synthetic construct
  misc_feature 1..1065: note = Description of Artificial Sequence: Synthetic coding sequence
  source 1..1065: mol_type = other DNA
atggatatgatgctgcttgtccagggcgcttgctgctccaaccagtggcttgctgcagttttgctatccctgtgctgcctgttacccagctgtctgcctgcaggacagtctgttgactttccctgggccgctgtggacaacatgatggttaggaagggagacacagccgtgttacgatgctatcttgaagatggtgcttctaaaggggcttggctgaaccgctcatctatcattttcgctggtggggataagtggtctgtggatccccgtgtctctatctcgaccctgaacaaaagggattactcactgcaaatccaaaacgttgatgtgactgatgacggaccttacacctgttccgtgcagacccagcacacacccagaaccatgcaggtgcacctgaccgtgcaggtcccccctaagatttatgacatcagcaatgacatgaccgtaaacgagggtacaaacgtaactttgacttgccttgccacagggaaacctgaaccttcgatttcatggcgccatatcagcccatccgcgaaacctttcgagaacggccagtacctcgatatatacggcatcacccgagatcaggccggtgaatacgaatgctccgccgaaaacgatgtctcgttcccggacgttcggaaggtgaaggtagtcgtgaacttcgccccaacaatccaggaaattaaaagtggcactgtgacacccggacggtctggcctgattcggtgtgaaggggcaggagtgccccctcccgctttcgagtggtataaaggggagaagaaactgtttaatgggcaacaaggaataattattcagaatttcagtactagatctattctgaccgtgaccaacgtaacccaggagcacttcggcaattacacctgcgtcgccgcaaacaagctgggaactactaatgccagcctgccccttaacccacccagcaccgctcagtacggcattaccgggtcggctgatgttctattttcgtgttggtatctggttctcaccttgagcagctttaccagtattttttacctgaaaaacgctattctccagtag

SEQ ID NO: 232505 - DNA, 927 bp, synthetic construct
  misc_feature 1..927: note = Description of Artificial Sequence: Synthetic coding sequence
  source 1..927: mol_type = other DNA
atgatgttgctggttcagggggcttgttgttctaatcagtggttggcagccgttttgctgtctctgtgctgtctgctgccctcttgcttacccgcagggcagtcagtcgacttcccttgggccgctgtggataacatgatggttcgaaaaggcgacacggctgtgctgaggtgttaccttgaggatggtgctagtaaaggcgcatggctgaacagatctagcatcatcttcgctggaggcgataaatggtccgtggaccctcgcgtgagcatcagcaccttaaataagagggactatagcctccaaatacaaaacgtggatgtcaccgacgatggaccatacacctgctctgtgcagacgcagcacactcccagaaccatgcaggttcatttgacggtgcaggtccctccaaagatctatgatattagtaatgatatgaccgtcaacgagggcacaaatgtgaccctgacatgtctcgccaccgggaaacctgaacctagcataagctggaggcacatttctccatcagtggccccaaccatccaggagatcaagtccgggaccgtgaccccaggtagatcaggcctgatccgatgtgaaggcgcaggagtgccccctccggcttttgagtggtacaagggcgagaagaaactttttaatgggcaacagggaattattattcaaaacttttcaactcgaagtatacttaccgtaacaaatgtgacacaggagcacttcgggaactacacgtgtgtggccgcaaacaagctggggaccactaatgcttccctgcccttgaaccccccatccaccgcgcagtacggtatcaccggcagcgccgacgttttgttttcttgttggtacctggtgctaaccttaagctccttcacctccattttttatctcaaaaacgccatcctgcagtag

SEQ ID NO: 232506 - DNA, 2133 bp, synthetic construct
  misc_feature 1..2133: note = Description of Artificial Sequence: Synthetic coding sequence
  source 1..2133: mol_type = other DNA
atggagactagggagtcagaagacctcgagaagacaagaagaaaatctgcttctgaccagtggaacaccgacaacgagccagctaaagtaaagcccgagttactcccagaaaaggaggagacaagtcaggcggatcaggatatacaagataaggaacctcactgtcatattccaattaaacgcaatagtatttttaatcggtcaatcaggagaaaatctaaggcaaaagccagagacaatccagagagaaacgcctcttgtttggccgactcacaggataatggtaagagtgtgaatgagcctctgacccttaacattccatggagccgcatgcccccatgtcgcactgccatgcagaccgatcctggagcgcaggagatgtccgaatccagcagtactcccggaaatggagccactcctgaggagtggcccgcactcgccgatagccctaccaccctaacagaggcactgagaatgatccatcctattcccgctgattcatggcgtaatctgattgagcagattggcttgctatatcaagaataccgggacaaatcaacccttcaggagatcgagacacggagacagcaggacgctgaaattgaggacaacacaaacggaagccccgcatcagaggacacccctgaagaggaagaagaggaagaggaggaagaggagcctgcatctcccccagaacgaaaaaccctaccccagatctgtcttctcagcaatccacatagccggttcaacctttggcaggacctacctgaaatcagatcatccggtgtccttgagatcttgcagccggaagaaatcaagcttcaggaggcgatgttcgaattagtgacttccgaggcgtcctactataaatctttgaacctattagtatcacacttcatggaaaacgagaggattcgaaagattctgcacccgtctgaggcacacatacttttcagtaatgttctcgatgtgttagcggtgagtgaaagattcttacttgagctagaacaccgcatggaggagaatatcgtgatttcagacgtgtgcgatattgtctatcgctacgctgcggatcacttctcagtgtacattacatatgtgagtaatcagacatatcaagagcgaacctacaagcagttactccaggaaaaggccgcttttagagagctcatcgcacagctcgagctggaccctaagtgcaggggtttacctttctcctcattcttgatcctgcccttccaacgcataactcggctgaagctgctcgtgcagaacatcctgaaaagagtggaagagagatcagagcgagagtgtaccgcccttgacgcccacaaagagctcgagatggtggttaaagcttgcaacgaaggagttagaaaaatgagcagaacagagcagatgatctcgatacagaaaaaaatggaatttaaaattaagtccgtgcctattattagccactctcggtggttattaaaacagggcgagctgcaacaaatgtcagggcctaaaacctctaggacactccggaccaagaaactgtttcatgaaatatatctgttcctctttaatgacttgctggtgatctgtagacagatcccaggagataagtatcaggtgtttgatagcgccccaagaggcctgcttcgggtggaagaactggaagatcagggtcagaccctggccaacgtttttatcctgaggctgcttgagaacgccgatgacagagaggctacctacatgctaaaggcctcaagtcaatcggaaatgaagagatggatgacgtctcttgctccgaacaggaggacaaaatttgtcagcttcactagcaggttgctggactgtccgcaggtgcagtgcgtgcatccttatgtggcacagcagcctgatgagttaacgttagaactggcagacatactgaacattctggataagaccgatgatgggtggatctttggggagcggctgcatgaccaggaaaggggctggtttccttcaagcatgacagaggagatactgaatccaaagattcggagccagaatctgaaggaatgttttagagtgcacaagatggacgacccacagaggagccagaataaagacaggagaaaactcggttcgagaaacagacaatag

SEQ ID NO: 232507 - DNA, 1857 bp, synthetic construct
  misc_feature 1..1857: note = Description of Artificial Sequence: Synthetic coding sequence
  source 1..1857: mol_type = other DNA
atggagctgctggctgcagccttttctgcggcttgcgcggtcgatcacgacagcagtacctctgaatcagacgccagagacagcgccgcaggtcacttgcccggatcggaatctagcagcacgccaggaaatggggcaacccctgaagagtggccggcactggccgattcacccactacattgaccgaggctctccggatgatccatcctatccccgcagattcgtggcgtaatcttatcgaacagatcggccttctgtaccaggagtatcgagacaagtcaacattacaagagatcgaaacccgcagacagcaggacgctgagatagaggacaacaccaatgggtctccggctagtgaagacaccccagaggaggaagaagaggaggaagaggaagaggaacccgcaagcccccctgagcggaagacactgccccaaatctgcctcctcagtaacccccactcgagattcaacctttggcaagacctgcccgaaattagaagtagcggagtgctggaaatactgcagcccgaagagatcaaactgcaggaagcgatgtttgagctggtgactagcgaagcaagttactacaaatcccttaacctcttggtgtctcatttcatggaaaacgagagaattagaaagattttacatccctcggaggcccacatcctattctccaacgtgctagacgtcctggccgtgagcgagcggtttcttctggagctggaacacaggatggaagaaaatatagtaatttcagatgtgtgtgacatagtttaccgctacgcagccgatcatttctctgtttatataacctacgtctcaaaccagacataccaggagcggacctacaagcagctgctccaagaaaaggccgcttttcgtgaactcatcgctcagctggaactcgaccccaaatgtaggggtttgccatttagcagtttcctgattctacctttccaacgcataactagactgaaactcctggtgcaaaacattttaaagcgggtcgaggagcggtccgagagagagtgtacggctttagacgcgcacaaggagctcgaaatggtcgttaaggcctgtaacgaaggagtccggaagatgtctaggaccgaacaaatgatctcaatccagaagaagatggagtttaaaatcaagagcgtgcctattattagtcactctcggtggctgctaaagcagggggagctccaacaaatgtctggccctaagacctctcggactctgcggaccaaaaagctgtttcacgagatttacttattcttgtttaacgatctgctcgttatctgtagacagatacctggggacaaatatcaggtgttcgactcagcccctcgcggtctgttgcgggtcgaggagctggaagatcaagggcagaccctggccaacgtgttcatcctgagactgctcgaaaatgccgatgaccgagaggccacgtatatgcttaaagcctcctcccagtccgagatgaaaagatggatgacgagcctcgcacccaatagacgtactaaattcgtcagtttcacaagcaggctattggattgcccacaggtgcagtgtgtacacccttacgtggcacagcaacctgacgagctgaccttggagttagccgatattctcaacattcttgacaaaaccgacgatggctggatatttggcgagagactgcacgaccaggaaaggggatggttcccaagctccatgacggaggagatactgaatcctaagatccgctctcagaacctgaaggagtgctttagggttcacaaaatggacgacccccagagatcacagaataaggacagaagaaagctaggatccaggaacaggcagtag

SEQ ID NO: 232508 - DNA, 717 bp, synthetic construct
  misc_feature 1..717: note = Description of Artificial Sequence: Synthetic coding sequence
  source 1..717: mol_type = other DNA
atggagctgctggccgcagcattctcagcagcctgcgcggttgatcatgattcatctacttccgagtctgatgcaagggattcggctgctggacatctccctgggagtgaaagctctagcactcccggaaatggggcaactcctgaggaatggcccgctctggctgattctcctactaccctgaccgaggccttgcgcatgatccaccccatacccgcagatagttggcgcaatctgatagagcagatagggctgttgtatcaagaataccgagataaatccacgctgcaggagattgagacaaggaggcagcaggacgccgagatagaggataataccaacggatctcctgcatccgaggacactcctgaggaggaagaagaagaagaagaagaggaggaacctgcttcacctcccgaacgcaagacattaccccagatttgtcttctgagcaacccacacagtaggttcaacctgtggcaggatcttcccgagatccgatcatcaggggtgctcgagatcttgcagccagaagaaattaaactccaggaagcaatgttcgaactggtcacttcagaagcctcatattataagtccctgaacctattggttagtcattttatggagaacgaacgtataaggaaaattctacacccatcagaggctcatatactcttttccaatgtgttagacgttttggctgtgagcgagcgctag

SEQ ID NO: 232509 - DNA, 1302 bp, synthetic construct
  misc_feature 1..1302: note = Description of Artificial Sequence: Synthetic coding sequence
  source 1..1302: mol_type = other DNA
atgttcgaactggtgacctccgaagcatcatactataaaagcctaaacttgttagtgtcccactttatggaaaatgagcggattcggaaaattctgcaccctagcgaggctcacatcctgttttctaatgtgttagatgtgctggcggtgtctgagaggttcctgttggagctagaacacaggatggaggagaacattgtgatttccgacgtgtgcgatattgtataccgttatgctgccgaccacttctcagtgtacatcacatacgtgtctaaccagacctatcaagagcggacgtataagcagttgttgcaagaaaaggcagctttcagggaacttatagcccaactggagttggatcctaaatgtcgaggactgccgttcagctccttcctgatcctccctttccagcggatcacaagattgaagctgctcgtgcagaacatactcaaacgggttgaagaaagaagcgagcgggagtgcactgctctggatgcccacaaagagcttgaaatggtcgtgaaagcctgcaacgagggggtgaggaaaatgagtagaacagagcagatgatttcaatccagaagaaaatggaattcaagatcaagtctgtcccgatcatctctcacagtagatggctgttgaagcagggggaactccagcaaatgagcgggccaaaaacatccagaacactgcggacaaagaagctctttcacgaaatctatctctttctcttcaatgacctcttagtgatttgtaggcagattcctggagacaaatatcaagtgtttgattccgctcctagaggactgctgcgcgtggaggagcttgaagatcagggccagacgttagctaatgtgtttatcctgcgccttctggagaatgccgacgatagagaagcgacatatatgctgaaggcctcatcacagagcgaaatgaagcgatggatgactagtctggccccaaaccggagaactaaattcgtctctttcacatcaaggctgctcgactgtcctcaggttcagtgcgtgcacccctacgtggcccagcaaccagatgagctcacccttgaacttgcagacatcctcaacattctggataagactgacgatggttggattttcggtgaacggctgcatgatcaagagcggggatggttcccttcctcaatgaccgaagaaatattgaatccaaaaatcagaagccagaaccttaaggagtgcttccgggtgcataaaatggacgacccccagcgatctcagaataaggatcggaggaagttgggctcgcgaaatagacaatag

SEQ ID NO: 232510 - DNA, 1803 bp, synthetic construct
  misc_feature 1..1803: note = Description of Artificial Sequence: Synthetic coding sequence
  source 1..1803: mol_type = other DNA
atgccaccctgccggaccgcaatgcagacagatcctggggctcaggaaatgagcgaatcttccagtacacccggaaacggcgcaactcctgaggagtggcccgctctggccgattccccaaccacccttaccgaggccctcagaatgattcatcccataccggcagatagctggcgtaatctaatagaacagatcggtctgctctaccaggaataccgagataagtccacgcttcaggagattgagacaagaaggcaacaggacgcagagatcgaggataatacaaatgggagccccgcttccgaggatacccctgaggaggaggaagaggaggaggaggaggaggaacccgctagcccaccggagaggaagacactgcctcagatctgcctgctcagtaacccacactctaggttcaacctgtggcaggacctccctgagatccgctcctccggcgtcctggaaatcttgcaaccagaagagatcaagcttcaagaagctatgtttgagctcgtaactagtgaagcttcctattacaagtctctgaacctcctggtctctcatttcatggagaacgagcgcattaggaagatcctgcaccccagcgaggcacatatcctgttctccaatgttcttgacgtgctcgcagtgtccgaacggttcctgcttgaattagagcatcgtatggaggagaatatcgtgatcagtgatgtgtgtgacattgtataccggtatgctgcagaccacttctccgtgtatatcacttatgtgagtaaccaaacctaccaggagaggacttacaagcagctcctgcaggagaaagcggcatttcgtgagcttatcgcgcaattggagctggatcctaagtgtcgcggtctgcctttttcatcctttctaatcttgccatttcagaggattacacggctgaagctcctcgtgcagaacattctgaagcgcgtggaggaaaggtcagagcgtgagtgtacagccctggacgctcacaaagagctggagatggttgtaaaagcctgcaacgagggagtgcgtaaaatgtccagaaccgagcaaatgatttccattcagaaaaagatggaatttaagatcaagtctgtgccaatcattagccattcccgctggctgctgaaacagggcgaacttcagcagatgtctggacctaaaacaagtcgcacgctacggactaaaaagctgtttcatgagatctacttattcttgtttaacgaccttctagttatctgtagacagattcccggagacaaataccaagtgttcgatagcgccccaaggggcctcttgagagtggaagaactcgaggaccagggccagacactggcaaacgtcttcatccttcgcctcctcgagaacgcggacgacagagaagcaacttacatgcttaaggcctctagccaaagcgaaatgaagcgttggatgacttccctggcaccaaaccggaggactaagttcgtgagctttacctctcgactcttggattgtccccaggttcagtgcgtgcacccttacgtagcacagcagcccgatgagttgaccctggagctggccgacatacttaatattcttgataaaacagatgatggctggattttcggggagagacttcatgaccaagaaagaggctggttcccaagctcaatgactgaggagatactgaatccaaagatacgaagtcagaacctgaaagagtgcttcagggttcataagatggatgatccacaaagatctcagaataaggataggcgtaagttgggatccagaaaccgacagtag

SEQ ID NO: 232511 - DNA, 705 bp, synthetic construct
  misc_feature 1..705: note = Description of Artificial Sequence: Synthetic coding sequence
  source 1..705: mol_type = other DNA
atgactggcagtagtgtgttcgactacatccatcccggtgaccatagtgaagttctcgagcagcttggactgcgtacaccaacccccggaccaccgaccccccctagtgtgtcttcctcatcatcctccagctctagtttagccgacacaccagaaattgaggcaagcctgactaaagtgcctccaagctctttggtgcaagaacggtcctttttcgttaggatgaagtccacactaacaaaacggggattacacgtcaaagccagtgggtacaaagtgattcatgtcacgggcagactgcgggcacatgccctcggcctcgtggcgctgggtcatacactgccacctgccccactcgctgagttaccactgcacggccatatgattgtattcaggctctcgcttggactgactattctggcctgcgaatctcgggtgagcgatcatatggacctaggcccaagcgaactcgtggggcgatcctgctatcagttcgtacatggtcaggatgcaacaagaatccgtcagagccacgtggactcctgtcggggtctccgggttgcagccgtgtgtgggcacagcggatgggaacgggaggaaccacgaggagccccatgtgccctggggcagccacgtgcccagcctagtcggggatggccaaacagcttcggatgcctccccgcttcctcgcagaggggcctgtag

SEQ ID NO: 232512 - DNA, 1773 bp, synthetic construct
  misc_feature 1..1773: note = Description of Artificial Sequence: Synthetic coding sequence
  source 1..1773: mol_type = other DNA
atggctgctccttacccaggaagtggagggggaagtgaggttaagtgcgtggggggtagaggcgctagcgtgccatgggacttcctgcctgggctgatggttaaagctccctcaggaccatgcctgcaggcccagcggaaggaaaagtctcgtaatgctgctcgcagtcgcagagggaaagaaaaccttgagttctttgagcttgctaagttgctccctctgcctggcgcaatctccagtcaacttgataaagcaagtattgtccgactgagtgtgacctatttgcgactccgacgtttcgccgctctgggggcacctccgtggggcctcagagctgcgggtccaccggctggcctcgcaccaggcaggcgaggacccgcagccctcgtctccgaggtgtttgaacagcatttgggtggccatatacttcagtcactcgacggctttgttttcgctttaaatcaagagggaaagttcctttacatcagcgagacagtctctatctatctcgggctcagccaggttgagatgacaggaagctctgtattcgattacattcatcctggcgatcacagcgaggtactggagcaactcggattgaggacccctacacctggcccaccaactccaccctccgtctccagcagcagctcatcctccagcagcctggcagacactcccgagatcgaggccagccttaccaaggttccgccttcaagccttgtgcaggaacgatccttctttgtgcgtatgaagtccacccttactaaaagaggcctgcacgtaaaagcgtcaggatacaaagtaatccacgtgactggacggctgagggcccacgccttgggactggtcgctctgggccacaccctgccgccagcaccccttgccgaacttcccctgcatggacatatgattgtcttcaggctgtcactaggattaaccattctggcgtgtgaatctcgagttagtgaccacatggatttgggaccctctgaactggtaggtaggtcatgttatcaattcgtccacggacaggatgctactcgcatcagacaatcgcatgtggatttgctggataagggccaggtgatgacgggatattaccggtggttgcagagggctggcggattcgtgtggctccagtccgtggccaccgttgccggtagtgggaagagccccggagagcatcatgtgttgtgggtgtcccacgtcctcagccaggccgaaggaggtcagacaccactcgacgctttccagttacccgcatccgtcgcttgtgaggaagcctctagccctggccctgagccaacggaacccgaaccaccaacagaaggcaagcaggccgcacctgccgaaaatgaggccccacagacccagggcaagcggatcaaggtggaaccaggcccaagggaaacgaagggctccgaggactctggagacgaggacccgagcagtcaccctgcaaccccacgacctgagttcacctctgttattcgcgcaggggtgctgaaacaagatccagtgagaccatggggactggcccctcctggagatcccccacctaccctgctgcacgcaggttttttgccgcctgtcgttaggggcctctgcacgccgggaactatccggtatgggccagcagaattaggtcttgtgtatccgcacttgcaacggcttggccctgggccagctctgcctgaggcattctaccctcccctgggtctgccctatccgggtccggctgggacacgacttcccaggaagggggattag

SEQ ID NO: 232513 - DNA, 2475 bp, synthetic construct
  misc_feature 1..2475: note = Description of Artificial Sequence: Synthetic coding sequence
  source 1..2475: mol_type = other DNA
atggatgaggatgaaaaggatcgcgcaaaacgtgccagtcgcaacaaatctgagaagaagcggagagatcaatttaacgttttaataaaagagctctccagcatgctccccggaaatacccggaagatggacaagaccaccgttctggaaaaggtgattggtttcctgcagaagcataatgaggtctccgcacagactgagatttgcgatattcagcaggattggaaacctagcttcttgagcaacgaggagtttacccagctaatgttggaggccttggatgggttcataatcgcagttaccaccgacggtagcataatctacgtcagcgattctatcacaccactgctggggcacctgcccagtgacgtgatggaccagaatctcctgaactttctgcctgagcaagagcacagcgaagtgtataagatattgagttcccatatgcttgtgacagattctccgtcgccagaatacctgaaatccgactcagaccttgagttttattgccatttactgagagggagcctgaacccaaaggaattcccgacttatgaatacataaagttcgtgggcaacttcagatcctataataacgtaccaagtcctagctgcaatggtttcgacaataccctgtcaagaccctgcagggtgcctctcgggaaggaagtgtgcttcatcgccaccgtccggctcgctactccgcagtttttgaaggagatgtgtattgtagatgagcctctcgaggagtttacctcgagacattccttagagtggaaattcctgttcctcgatcaccgcgctcctccaatcatcggctatttgcccttcgaagtgctggggacatccggttacgactactaccacattgacgacctggagctgctggctcggtgtcaccagcacctcatgcagttcgggaagggcaagtcttgctgttacaggtttcttaccaagggacagcagtggatttggctgcaaacccactactatatcacgtaccatcagtggaacagtaaaccagagtttatcgtatgcactcatagtgtagtctcctatgctgatgtgcgagtggaacgcagacaggaacttgctctggaggaccctccttcggaggctctgcactccagcgccctgaaggataaagggtctagccttgagcctagacaacattttaacacactcgacgtaggcgcaagcggcctgaacacttctcactcccccagcgccagttccaggtctagtcacaagagttcccataccgctatgtccgaacccacttcgacgcccacgaagttgatggcagaggcaagcacaccggcattaccaagaagcgctacgctacctcaggagttgcctgtgcccggtttgagtcaggcagccacaatgcctgccccactgcccagtccctccagctgtgatctaacgcagcagcttctgccccagacagttctccagagcacccctgcaccaatggcccagttttccgcacaattctccatgttccagacaatcaaagatcagctggaacagcggacccgtattctgcaggccaatattcgttggcagcaggaggaactccacaaaatccaagaacagttatgcctggtgcaggatagtaatgtgcagatgttcttgcagcagcctgcagtctctttatccttttcatctacacagaggccagaggctcagcagcaactacagcagagatccgctgccgtgacacagccgcagctgggtgcgggacctcagctgccgggacagatcagtagcgctcaggtgacaagccaacatttattgcgagaaagctcagtcatcagcactcaaggcccaaaacccatgaggagctcccaattaatgcagtctagtggacgctccggctcctccctggtctcaccattttcctcagcaacggccgcactccccccatctctgaatttgactactccagcatcaacaagtcaagatgccagtcagtgtcagcctagccccgatttctctcacgaccggcagctgaggctgctgctcagccagcccatccagccgatgatgcctgggtcctgtgacgcccgacagcccagcgaggtttcacgcaccggcaggcaggttaaatatgcccagagtcaaaccgtatttcagaatccagacgctcatccagccaacagtagttcagcgccaatgcccgtgctgctaatgggccaggcagtcctgcacccttcttttccggcaagccaacccagtccactgcagcctgctcaggcccgacagcagccaccacagcactacctccaagtacaagcgccaacgagcctgcactcagagcagcaagacagccttctgctgagcacctatagccagcagcctggaacacttggctacccacagccccctccagctcaaccccaacccctgagaccaccaagacgtgtatcatcactgagtgagagttcaggcctccagcagccgccaaggtag

SEQ ID NO: 232514 - DNA, 2670 bp, synthetic construct
  misc_feature 1..2670: note = Description of Artificial Sequence: Synthetic coding sequence
  source 1..2670: mol_type = other DNA
atgtacgcatacgggttcgtgggtagatgcgcacccttcccagccgaagaaggcaggaccttcgatttatccgaggaattaggcagatcagtgacacgggagggtacaggtaccacccggcttaactctgagcctgtgcctctgctttgtctcccacttcttaactgttctcgtaaaaactgcatagagaacctgatggatgaagatgagaaagatcgcgcaaagcgggcttcccgcaacaagtctgagaagaagcggcgtgatcagttcaacgtgcttatcaaggaacttagtagcatgttaccaggtaacacccggaagatggacaaaacaacggtgctcgagaaagttattggctttctgcagaagcataacgaggtgtccgctcagaccgagatctgtgatattcagcaggactggaaaccctctttcctgagtaacgaggagttcacccagctgatgttagaggcgttagacggattcattattgctgtcactactgacggtagcatcatctacgtcagcgattcaattactccgttgcttggccacttaccttccgatgtgatggaccagaaccttttaaacttcctgccagaacaagagcatagtgaggtttacaagatcttgtcctctcacatgcttgtcaccgattccccgagcccagaatatctaaagtctgactccgacctagagttctactgtcacctgctccgtggcagcctgaacccaaaggagtttccaacttacgaatacataaaattcgttggtaatttcaggtcttataataacgtgccgtccccctcctgcaacggctttgataatactctttccaggccgtgtagggtcccactgggcaaggaagtttgcttcatcgctacagtgcggctggccaccccccagtttctgaaagagatgtgcattgtggatgagccgctggaagaattcacctcccgacactccctggaatggaagtttcttttcctagatcatagggcaccaccgattattggctacctgccctttgaagtcctgggaacatctggctatgactattatcatattgatgatctcgagctgctagctcgttgccaccagcatctaatgcagttcgggaaaggtaaatcttgttgttataggtttctgaccaagggccaacagtggatttggctgcagactcactattatattacctatcaccagtggaattccaagccagagtttatcgtctgtacccattccgtggtgtcttacgctgacgtgagagtggagaggagacaggagctggctttagaagacccgccaagcgaggctctgcactcctctgctcttaaggacaaggggtcctccctggagcctcggcaacacttcaacaccctcgacgtcggtgctagtggactaaacacttcgcattcccccagtgctagtagtcgctcatctcataaaagtagccacacggcaatgtccgaaccaacgtccacacccaccaagctgatggccgaggccagtactccggctctgccccgaagcgccacgctcccacaggagctaccagtccctggcctaagccaggccgctactatgcctgccccattacccagtcctagctcctgtgatctcacgcagcaactgctgccgcagacagtcctccaaagtactccggcaccgatggctcagtttagtgcacagttctccatgtttcagaccataaaggatcagctggaacagaggactcggatacttcaagccaatattcggtggcagcaggaagaactccacaaaatacaggaacagctttgcctcgtgcaagatagcaacgttcagatgtttctgcagcagcccgctgtctcgctgagcttcagtagtacccagcgcccagaggcccaacagcagctacagcagcgtagcgcagccgtcacacagcctcagctcggtgccggaccccagcttcccggtcagatcagttctgctcaggtgaccagtcaacatctcctgcgagaaagctcagtgatctccacgcagggtcccaagcctatgaggtcctctcaactgatgcagtcatccggacgaagcgggtcaagtctggtcagcccatttagttccgctactgcagccctcccgcctagcttgaatttgaccacacctgcgagcacaagccaagatgcatcccagtgccagccgagcccagatttttcacatgacagacagctgagacttttgctttctcaacccattcagccgatgatgcccggatcttgtgacgcaagacaaccgagcgaggttagtaggactggcagacaagtcaagtacgcccagtctcagacagtcttccagaatccggacgcccatcctgccaacagtagctccgctcctatgcctgtgctactaatgggccaagcagtcctccacccgtccttccctgctagccaaccctcgcctctgcaacccgcacaggccaggcagcagccaccccagcactatcttcaggtgcaggccccaaccagcctgcactcggaacagcaggactccttattgctaagtacctattctcagcaacccggaacactcgggtacccacagcccccacctgctcagccccagcccctccgacccccacgtagagtgtctagcttaagcgaaagctccggactacagcagccacctagatag

SEQ ID NO: 232515 - DNA, 774 bp, synthetic construct
  misc_feature 1..774: note = Description of Artificial Sequence: Synthetic coding sequence
  source 1..774: mol_type = other DNA
atggcgcctacaaagccctcttttcaacaggaccctagcagacgggaaagaattacagcacagcaccctcttcccaatcagagcgaatgcagaaagatttaccgctacgatggaatctactgcgaatctacctatcaaaacctgcaggctctgcggaaagagaagagtcgtgacgctgcaaggagccgcagagggaaggaaaatttcgaattttacgaactggccaagctgctccctctgccagccgctattactagtcagctagataaggcaagtatcatccgcttaactatatcctaccttaaaatgagagatttcgccaatcagggcgaccctccttggaatttgcggatggaagggcctccacccaacacttcggtgaaggtcataggcgcacagaggagacgctccccttctgccttggctattgaggtgttcgaggctcaccttggtagtcacatcctgcagagtctggatggtttcgtgtttgccctcaatcaggaggggaagtttctgtacatctccgagaccgtttccatttatctgggactttcccaagtcgagctcaccggtagttccgtttttgattacgtgcatccaggggatcatgttgaaatggctgaacagctcggcatgaaactccctcctggtaggggcctcttgagtcaaggcacagctgaagacggggcttcatcagcaagctcctcctcccagtccgagaccccagaacccgttgtctgcttccctcccgcttctgaccagttcttactgtag

SEQ ID NO: 232516 - DNA, 2706 bp, synthetic construct
  misc_feature 1..2706: note = Description of Artificial Sequence: Synthetic coding sequence
  source 1..2706: mol_type = other DNA
atggcccctaccaagcccagctttcagcaagatcctagtcggagagagcgcctacaagccctgcgcaaagaaaagagcagagacgccgctcggagtcggcgtgggaaggagaacttcgagttctatgaactcgctaagctgctgcccctgcccgctgcaattacctcccaactcgacaaggcgtctatcattaggctgactattagttatctcaagatgcgggattttgcaaatcagggagatcccccatggaatttgcggatggaggggcctccacccaacacatctgtcaagggagcccagagacggcgaagtccctccgccctcgcaatagaggtcttcgaagcacacctgggctcccatattcttcaatctctagacggctttgtattcgcgttgaaccaggaaggcaaatttctgtacatcagtgaaactgtgagtatctaccttggactgagtcaagtagaactcaccgggtcaagtgtattcgactacgtccacccaggcgaccatgtggaaatggcagagcagctaggtatgaaactgcccccaggcaggggactgctgtcacaggggaccgccgaggatggcgcaagttctgcctcttcctccagccaaagcgaaaccccggagcccgtagagtctacctcccccagcctgcttacaacagacaatacactggagagatcattctttattcgaatgaaatctacactgaccaagcgcggagtgcacattaaatcctctgggtacaaagtcattcacattacgggaagactccggctgcgggttagcctgtcccacggacggaccgtcccttcgcagataatgggactcgtggtggttgcacatgcgttgcctccgccaacgatcaacgaagtccgcatagactgtcatatgttcgtcacaagagtgaacatggacctcaacattatctattgcgaaaaccgcatcagtgactacatggacctgacccctgtggatatagtgggtaaacgatgttatcatttcatccatgctgaagacgtcgaggggatcaggcactcacacttggacctgctgaataagggacagtgcgtcacaaaatactatcgttggatgcaaaagaacggcggatatatctggattcagtcttcagccacaatcgctatcaacgctaaaaacgccaacgaaaagaacatcatatgggtgaactaccttttatcaaacccagagtacaaggacacaccgatggatatcgctcagcttccgcatctgcccgagaagacaagcgagtcctctgagacctctgattcagaatcagattctaaggacacctcaggaattactgaagataatgaaaattccaagtcagatgaaaaaggcaatcagagcgagaatagcgaggaccccgagccagatagaaaaaagtccggtaatgcctgcgacaacgatatgaactgtaatgatgacggccactcaagttcaaaccctgattccagggactcagatgattcttttgagcattcagatttcgagaatcctaaagctggggaggacggcttcggggcactcggcgctatgcagataaaagtcgagaggtatgtggagtccgagagtgatcttaggctgcaaaattgtgaatctctaacttccgacagcgcgaaggattcagactcagcaggcgaagcgggtgcacaggcaagctccaaacatcagaaaagaaagaaacgacgcaaacgacagaaaggcggttccgccagcagacgtcggctgagctccgccagtagtccgggagggctcgacgcaggcctggtggagccgccaaggttgttgtcttcacccaattcggcgtcagtactcaagattaaaactgaaatttctgagcccattaatttcgacaatgacagtagtatctggaactatcccccaaatcgagaaatcagccgcaacgaaagcccttattcgatgacaaaaccacccagcagcgagcactttcctagcccgcagggaggcggagggggagggggtggtggaggcggactgcacgtagccatccccgacagcgtattgactccgcctggggctgatggggcagcggctcggaagacccagtttggtgctagcgcgacggccgcactggcaccagtcgcctctgatccgctgtcaccccctctcagtgcctcccctagggacaaacatcctggcaatggaggagggggtggcggtgggggtggcggtgctggaggcggaggaccatctgcctccaatagcctgctgtacaccggcgacttagaggctctgcaacgactacaggctggaaacgtcgtgttacccttggtgcatcgcgtaacaggcactctggccgcaacatcaacagctgctcagcgggtttacacaacaggcacaataagatatgctccagccgaggtcactctagccatgcagtcaaatctgctgcccaacgctcacgctgtgaactttgtggatgtaaactctcccggatttggactggacccaaaaactcctatggagatgctttatcatcacgtgcaccggctcaatatgtccggcccatttggcggtgctgtatcagcggcttctcttacacagatgcctgccggtaacgttttcaccaccgcagagggcctgttctccactctccccttccccgtgtatagcaatggcatacatgcggcacagacactggagcggaaggaggactag

SEQ ID NO: 232517 - DNA, 2802 bp, synthetic construct
  misc_feature 1..2802: note = Description of Artificial Sequence: Synthetic coding sequence
  source 1..2802: mol_type = other DNA
atggcccctactaagcctagctttcaacaggatccatcacgaagagagcggatcacagcccaacatcccctgcctaatcagtcagaatgcaggaagatttatcgttacgatggcatctattgcgaatccacataccagaatctgcaggctctaaggaaagaaaaatctcgggacgcggcaaggtccagacgcggaaaggagaatttcgaattttatgaattggccaaactcctccctcttcccgctgcaatcactagccagttggacaaggccagcataatacgcttgacaatttcttacctgaaaatgcgcgattttgccaaccaaggcgacccaccatggaatctgcggatggagggccctcctcctaacacttcggtaaaagtgatcggagcacaacggaggaggtctccctcagcgctcgcaatagaggtattcgaggcacacctggggtctcacatcttacagagtctggacggctttgtctttgcccttaatcaggaaggtaaattcctatacatatcggaaacggtcagtatatatctagggctgtctcaggtggagctaaccggatcttccgttttcgactacgtacatccaggcgatcatgtcgaaatggctgaacaactcggtatgaagcttcctcctggcagagggctgctgagccagggaacagcggaggacggagcaagctctgcatcgagctccagccagtccgaaaccccagagccagtagaaagcactagtccttcactgctcacaactgacaatacgctcgagagatcttttttcatccgcatgaaatcaacacttacaaaaagaggcgttcatatcaagtcatccggctacaaggtgattcacatcactggcaggctacgactgcgggtctcactaagtcatggcagaactgtgccttctcaaatcatgggtttggtcgtggttgcccatgctcttccccctcctaccattaatgaggtacggatagattgccatatgtttgtcaccagggtcaacatggacctgaatattatatactgcgagaataggatttccgactatatggatcttacaccagttgacatagtcgggaaacgctgctaccactttatccacgccgaggacgttgaggggatacgacattcccaccttgaccttctcaacaaaggccagtgtgtcaccaagtactaccgctggatgcagaagaacggaggctacatctggatccaatctagcgcaactattgccattaacgctaaaaatgccaacgagaagaatatcatttgggtaaactatctgttgtccaatccagagtataaggacacacccatggatattgcccagctaccacatctgcccgaaaagactagtgagagtagcgaaacctctgattccgagagcgacagcaaggacacttccgggatcacggaagacaacgagaacagtaaatctgatgagaagggaaaccaatctgagaactccgaagatcctgaaccggataggaagaagagtggtaatgcttgcgacaacgatatgaactgcaatgacgacggccactctagctccaacccggacagtcgggactctgatgacagctttgagcacagcgacttcgaaaatccaaaggccggtgaggacggatttggcgcattgggcgctatgcagatcaaagtcgaacgatacgttgagtccgagagcgatcttcgtcttcagaactgcgagtcacttacatccgactccgctaaagactcagacagcgcaggagaagcaggggctcaggcctccagcaagcaccagaaacgaaagaaaagacgcaaacgccagaaaggagggtccgccagtaggcgtaggctatcctcagcttcttcacctggcggactggatgccggacttgtagaaccgccaaggcttctgagctccccaaattctgcgtccgttctcaaaatcaagaccgaaatcagcgaaccaatcaatttcgacaatgactcctcaatatggaactatccccctaacagggagatttctcgcaatgaaagtccctactctatgactaagcctcccagtagcgaacacttcccatcaccacaaggaggtggtgggggaggcggaggtgggggtggtctgcatgtggcaatccctgactcagttctgacgcctcctggggctgatggtgcagcagccagaaagacacaatttggcgcatctgcaacagctgccctggcacctgtggcttctgacccattgtcgccccctttgagtgcctcaccccgtgacaaacacccaggcaatgggggaggcggagggggaggcggaggcggagcaggtggaggcggaccttcagctagcaactccttgctctacaccggggaccttgaagctcttcagcggctgcaggctggtaacgtggttctaccactggtgcaccgcgtaactggcacattggctgctacctcaaccgctgctcaacgggtatacacgaccgggacgatcaggtatgcccctgcggaggtgactctggccatgcagtccaatctgctgccaaacgcccacgccgtgaacttcgtggacgtcaatagtccagggtttgggctcgatcctaaaactcctatggaaatgctctatcaccatgtgcatagactgaatatgtctgggccattcggaggcgctgtgtcagctgcatccttaactcagatgcccgctggaaacgtcttcacaacggctgaagggctcttcagcactctgccttttcccgtatacagtaacggaatccatgccgcacaaacgctggagcgaaaagaggattag

SEQ ID NO: 232518 - DNA, 2763 bp, synthetic construct
  misc_feature 1..2763: note = Description of Artificial Sequence: Synthetic coding sequence
  source 1..2763: mol_type = other DNA
atggcacccaccaagccaagtttccagcaggatccctcaaggagggagcgccttcaagctttgcgaaaggaaaagagtcgggatgcagctagatctcggcgtggaaaagagaactttgagttttacgaactcgcgaaactcctgcctcttcccgcagccattacaagccagctggacaaggctagcattattcgtcttaccatatcttatctgaaaatgcgtgactttgccaaccagggcgaccccccttggaacttgcgcatggagggtccaccgccaaataccagcgtaaaaggcattcaaatgtggaaatctgagttatgcatgcgcaaaaccccatgcgaggtcatcggcgcacagagaagaagatccccaagcgccctggctatcgaggtgttcgaagcacatcttggatcccatatccttcagagtttggatggcttcgtctttgccctcaaccaggagggcaaatttctttacatttcagaaacagtttccatctatctgggcctctcccaggtggagctgactggcagcagcgtattcgattatgtgcaccccggagaccatgtggagatggcagagcagctaggcatgaaactgccaccaggaaggggtctgctgtctcagggcactgccgaggacggagcgtcatccgcctctagctcaagtcaatccgagactcccgaacccgtggagtctacgagcccaagcctgctgactacggataatacccttgagaggagtttcttcattcggatgaagtctacactaacaaaaaggggggtacacatcaagtcaagtggatataaggtgatccatatcacggggaggctccgcctgagagtatctctaagtcacggcaggacagtgccgtcgcagatcatgggtttggtagtggtggcacatgctttacctcctccaaccataaatgaagtgcgcatagattgccacatgttcgtgacacgggtaaatatggacctgaacattatctactgtgaaaacaggatctcggactatatggaccttacccccgtcgatatcgtggggaaacgctgttaccactttatccacgcagaggacgtggaagggattcggcactcacatctcgacctgttgaataaaggtcagtgtgtgaccaaatactacaggtggatgcagaagaacggcggatatatctggatccagagttcggccactatcgcaatcaacgccaagaatgcgaacgaaaaaaatatcatttgggtgaactacctgctttcaaatccagagtacaaggacacacctatggatatcgcacagctgccacatctgccagaaaaaaccagtgagagctctgaaacctccgattctgagtccgattccaaagacacaagtggtataaccgaagataatgaaaacagcaagtctgacgagaaagggaatcagtcagagaacagtgaggaccctgaaccggatcggaaaaagagcggtaatgcttgtgataacgacatgaattgtaacgatgatggccactctagttccaacccggacagccgggatagcgatgactcctttgaacattccgactttgaaaaccctaaagccggtgaggatggttttggtgctcttggcgcaatgcaaatcaaggtagaaagatacgtggaatccgagtcagatctacgcctacagaactgtgaaagtcttacctcagacagcgccaaagatagtgattcagcaggcgaggctggggcacaggcctcaagtaaacatcagaagcgtaagaaaaggagaaagcgtcagaaaggcggaagtgcttcccgccgtcggctgagctcagctagcagcccaggtgggctcgatgccggactggtcgaacccccaaggctgctgtcgagcccaaatagcgcttctgtcctcaaaattaagactgaaatctccgagccaatcaattttgataacgattctagtatttggaactacccacccaatcgagagatttcaaggaacgagtctccctacagtatgaccaaaccacccagcagtgagcacttcccctcgccgcagggtggcggagggggaggcggtgggggagggggtttacacgtggctatacccgattctgtgctgacgccaccgggtgcggatggagcagctgctcggaagactcagttcggagcctctgccacagcagccctggcccctgtggctagcgatcctttgtctccaccactgtcggccagcccccgtgataaacaccctggcaatggaggaggcggtggaggaggagggggaggggcagggggaggtggaccctcagcttcgaatagtcttctgtatactggagatctcgaagctcttcagaggctgcaggccggaaatgtggtgctgccactggttcaccgtgtcacagggacactagccgcaaccagcacagcagcccagcgcgtctacaccaccgggacaattagatatgcccctgcggaggtgacattagcaatgcagtccaatttgcttcccaatgcccacgccgttaactttgtcgacgtcaatagccccggtttcggcttagaccccaagactcccatggagatgctgtaccaccatgtacaccggctcaatatgtctgggcctttcggcggagcagtttcagcagcaagccttacccagatgccggcagggaacgtttttaccaccgctgagggcctattctcgaccttaccttttcctgtctatagtaacgggattcatgctgctcagactctggagagaaaagaggattag

SEQ ID NO: 232519 - DNA, 462 bp, synthetic construct
  misc_feature 1..462: note = Description of Artificial Sequence: Synthetic coding sequence
  source 1..462: mol_type = other DNA
atgagagacttcgccaaccagggcgacccaccttggaacttgcggatggagggtcccccaccaaatacctctgtcaaaggagcccagcggaggaggagcccctcggcactggccattgaagtgttcgaagcccacctcgggtcccacattctgcagtctctggatggctttgtgtttgccttgaaccaggagggaaagttcttgtacatttcagaaaccgtgagtatttatctgggactaagtcaggtggagctgaccggaagctcagtgttcgactacgttcaccccggagaccatgtcgagatggccgaacaacttggtatgaagctcccccctgggaggggtctgctgtcccagggaacggctgaagatggggcatcctcagcctcaagttcatcacaaagtgagacaccagaacctgtggtgtgttttcccccagccagcgaccaattcctcctgtag

SEQ ID NO: 232520 - DNA, 2712 bp, synthetic construct
  misc_feature 1..2712: note = Description of Artificial Sequence: Synthetic coding sequence
  source 1..2712: mol_type = other DNA
atggccccaaccaagccttccttccagcaggatccttcccggagggaacgtctgcaggcactgaggaaggagaagtctagagacgctgcccgttctcgccgaggaaaggagaatttcgagttttacgagctggctaagctgctgcccctccccgcagccatcacgagtcagctggacaaggctagtattatcaggcttacaattagctatcttaaaatgcgtgactttgccaatcagggtgaccctccatggaatctgaggatggaaggaccgcctcccaatacgtcagtgaaggtcattggagcacagaggcggcgatccccgtctgctctggccatcgaagtttttgaggcgcacctaggctcacacatcttacagagtttggacggctttgtattcgccctgaaccaggagggcaagtttctctatatctcagaaacagtgtcaatctacctgggactctctcaggtggaacttacaggctcctccgtgttcgactacgtccaccctggcgaccatgtcgagatggcagagcaacttggcatgaaactgccacctggcagagggctgcttagtcaaggaacagctgaagacggtgcgtcgtctgcctccagtagtagccagagtgaaacaccagagcctgtcgaaagcaccagtccatccctcctgacaacagacaataccctggagagaagcttttttatacgcatgaagagcaccctgaccaagagaggagtccacattaagtcctctggctataaagtgatccacatcacagggcgtctacgccttcgagtttccctgtcccatggaaggaccgtgccaagccagattatgggcctcgtagtggtggcacatgcacttcctcccccaacgatcaatgaggtcaggattgattgccacatgttcgtcacccgagtaaatatggacctaaacataatctactgcgagaatagaatatctgactacatggatctgaccccggtggacattgtgggtaagaggtgctaccacttcatccacgccgaggacgttgaaggaattaggcattctcatctcgacttattgaacaagggacagtgtgtgactaaatattatcggtggatgcaaaagaacgggggttacatttggatccagagcagcgctaccatcgctatcaatgccaagaacgccaacgagaaaaatatcatctgggttaactacttactttctaatccagagtacaaggacacgcccatggacatagcccagttgcctcatctgcccgagaagactagcgagagcagcgaaacgtccgactccgagtccgatagcaaggatacaagcgggatcaccgaagataacgagaactctaaaagtgatgaaaaaggcaaccagtccgaaaactccgaggatccggagccagaccgcaagaagtcaggaaacgcttgcgacaatgacatgaactgtaacgacgatggccacagttcttcaaaccctgattctcgcgactctgatgatagctttgaacattcggacttcgagaacccaaaggccggagaggatggcttcggtgcccttggagctatgcagatcaaagtggaaagatacgttgaaagcgagagcgatctccgccttcaaaactgcgagtcgctcacttctgattccgccaaagactccgattctgctggagaagcgggtgcgcaggcgtcctctaaacaccaaaaaaggaagaaacgcaggaagcgtcagaagggcggttcggctagccggagaaggctgtcatctgcctctagccctggcggtctcgatgccggactagtggaaccaccgagactgctctccagtcctaactcggcgtctgttctcaaaataaagacggagatctccgaaccaatcaactttgataacgactcatccatttggaattaccccccaaaccgggagatctcccgcaacgagtccccatactccatgacaaaacctcccagcagcgagcacttcccatctccacagggcggtggcggaggaggaggcggtggtggagggctccacgtggctatccctgacagcgtcctgacaccgccaggagcagatggggcagccgcaagaaaaacacagtttggggcttccgccacagcggctctcgctcccgtggcaagtgatcctttaagccccccattgagcgcgagcccaagggacaaacatccaggaaatgggggtggcggaggcggaggcggaggtggagctggaggaggcggacctagtgcatccaactctttgctctatactggagaccttgaagccctgcagcgactgcaggccggtaatgtagtgctgccactggtgcaccgtgtaacgggcacacttgccgcaacatccaccgcggcacagcgggtgtacactacaggaaccatcagatatgccccagctgaagtaactctggccatgcagtcgaatttgctcccaaacgcccatgccgttaatttcgtagacgtgaacagccctggcttcggcctggatcctaaaacacccatggagatgttgtatcaccatgtgcacaggctgaatatgtccggaccgtttgggggtgctgtgtcggcagccagcctgacgcagatgccagccggtaacgtgttcacaactgctgagggtctttttagtacactgcctttcccagtctattctaacggtatccacgccgcacagaccttggagcgtaaggaggattag

SEQ ID NO: 232521 - DNA, 2409 bp, synthetic construct
  misc_feature 1..2409: note = Description of Artificial Sequence: Synthetic coding sequence
  source 1..2409: mol_type = other DNA
atgtaccgcagcaccaagggggctagtaaagctcggagggatcagatcaatgcagagattagaaatctcaaggaactactgcctctcgccgaagcagataaggtgaggctctcatacctgcacattatgagcctcgcgtgcatttacacgaggaaaggagtgttcttcgcagggggaacgcctctggccggacccactggcctcctgtccgcccaggagctcgaggacatcgtcgctgcgctgccaggctttcttctcgtgtttactgcagagggcaagctgctttacctgagcgaaagcgtcagtgaacacctcggtcacagtatggtggatttggtggctcagggagactcaatatacgatattatcgatccagccgatcacttgacagtgcgacagcagttgactcttccatctgcattggataccgatagactcttccggtgtaggttcaatacctctaagtccctaaggcgacagagcgccggtaataagctggtgcttattcggggacggttccatgcgcacccgccaggtgcgtattgggccggtaatcctgtgttcactgctttttgcgcgcctctcgaacctcgtccacggccaggccctggcccagggccaggaccagcctcgctgttccttgcaatgttccagagcaggcatgcaaaggacttagctttactggacatttcagaaagcgtcttgatctacctggggttcgagagaagcgagttactctgcaaatcatggtatggcctgcttcaccctgaggatctggcccacgcttccgcacagcattacaggctattagcagagtccggcgatatacaggcagagatggttgtgcgcctgcaggccaaaactggcggttgggcctggatatattgtttgttgtactcagagggccctgaaggacccattaccgccaacaattacccaatatccgatatggaagcttggtccctcaggcaacagctcaactcagaggacacacaggcagcatatgtgctcggcaccccaacaatgttgccctcgtttcccgaaaatatactatcgcaggaggagtgctcatcaacaaatccgctattcaccgccgcactgggggctccgagatcgactagcttcccctccgcgcctgagttaagcgtggtgagtgccagcgaggaactaccacgacccagtaaggaactggatttctcctatctaaccttcccatccggaccagagccctcacttcaagctgagctgagcaaggacctggtgtgtacacccccttacaccccacaccagcctggtggatgcgcctttcttttcagtctgcatgagcccttccagacacatcttcccacaccaagttccacactgcaggaacagcttaccccttctactgctacattctccgaccagctgactccctccagcgctactttcccagatccgctgaccagccccctgcagggccagctcaccgaaaccagtgtgcgctcctacgaagaccagctgactccctgtaccagcacttttcccgaccagctcctaccatctactgctacctttcctgaacctctgggttctcccgctcatgaacagctgacacctccatctacggctttccaggcacatcttgactcccctagccagacatttccggaacagctgtctcctaaccccactaagacatatttcgcacaagaggggtgctcttttctgtacgagaaactgccgcctagcccatcttcacccggaaatggcgactgcacactattagctttagctcagctgaggggtcctctctcagtcgacgttcctctggtgcctgaggggctgcttacgcctgaggcttcccctgtgaagcagtcctttttccactacagcgagaaagagcagaatgaaattgacagactcattcagcagatctcacagctggcacaagggatggacaggcctttctccgcagaggcaggcactggaggcctagagcccctcgggggactggaaccgctggattccaacttatctctgagcggggcagggccacccgtgctatctctggacctgaagccgtggaaatgtcaggagctggatttcctggccgatcccgataacatgtttttggaagaaactccagtggaagacattttcatggatctgagcacacccgatccttccgaagaatggggcagcggggaccccgaggctgagggtcctggcggtgccccatcaccctgcaataacttgtcaccagaagaccactcattcctcgaggatcttgcgacatatgaaactgcctttgagacgggcgtgtctgccttcccgtacgacggcttcacagatgagctgcatcagctccagagccaggttcaagactccttccatgaggacggctcaggaggtgagcccaccttttag

SEQ ID NO: 232522 - DNA, 705 bp, synthetic construct
  misc_feature 1..705: note = Description of Artificial Sequence: Synthetic coding sequence
  source 1..705: mol_type = other DNA
atgtaccgtagcactaaaggcgctagtaaagcgaggcgggaccagattaatgccgagataaggaacttgaaggagctgctcccactggccgaggcagacaaggtaagactcagctatctccacataatgtctctggcctgtatttacacccgcaaaggcgttttctttgcgggaggtacccccctcgcaggtccgactggactcctgtctgcccaggagctagaagatattgtggctgcgttgcctggctttctgcttgtatttacagcagaaggcaagctgttgtacctctcagagtccgtgtctgagcacctgggacattcaatggtggacttggtggcccagggagacagcatttatgacatcattgaccccgcagaccatctgactgtacgccagcagttaactctgccttctgctctcgacaccgaccgcctgttccggtgccggtttaatacaagcaaatcccttcgcagacaatccgccggaaataagctggtactcattcgagggcgttttcacgctcatccgccaggcgcatactgggccggaaacccagtgtttacggcattctgcgccccacttgaacctagaccacggccaggtccgggacccggacccggaccagcatctctgttcctggcgatgttccagagcaggcacgcaaaagacctcgccttgctggacatcagcgagagcggatag

SEQ ID NO: 232523 - DNA, 1299 bp, synthetic construct
  misc_feature 1..1299: note = Description of Artificial Sequence: Synthetic coding sequence
  source 1..1299: mol_type = other DNA
atgcccgctggcagggccgctcgtacctgcgctttgctcgcactgtgcctcttgggagcgggtgcgcaagacttcgggccaacgaggtttatctgtactagcgtgcctgtggatgccgatatgtgcgccgcatcagttgccgctggtggcgcagaagagctacgcagctctgtgctccaacttcgggagaccgtcctgcaacaaaaggaaaccattctgtcccagaaagaaaccatcagggagttaacagctaaattaggaagatgtgagtcacagtcaaccctggaccctggcgctggagaggccagagccggagggggtcgaaaacaaccaggtagtggtaaaaatacgatgggggacttatcccgcactcccgcagcagaaactttatctcagttgggacagaccctgcagtcattaaaaacaaggctggagaacttagaacagtattcccgcttgaacagttccagccaaaccaactccttgaaagacctcttacagtctaagattgatgagctggaacgccaagtgctgagccgggtcaatacattggaagagggcaaaggtgggcctcggaacgatacagaagagagagtcaagatcgaaactgccctcacttcactgcatcaaagaatctccgagctggaaaaagggcaaaaggataacaggccaggggacaaattccagcttactttccccctgaggaccaactacatgtatgctaaggtcaaaaaatcactgcctgagatgtatgcgttcaccgtgtgcatgtggcttaaaagttccgccacgcctggcgtcggcacccccttcagctacgctgtgcccggacaagcgaacgagctggtgcttatcgaatggggaaataatccaatggagatactgattaacgacaaggtcgctaaacttccctttgtgatcaatgatggcaagtggcaccacatttgcgtcacctggactacacgggacggggtttgggaagcctatcaggatggtacgcaggggggaagtggcgagaacctcgccccttatcacccaatcaagccccagggagtgttagtcctcggacaggagcaagacacactaggagggggtttcgacgccacacaagccttcgtcggggaactggcccattttaatatctgggacagaaaattaacaccgggagaagtgtacaatctggcaacttgctctacaaaagctctgagtgggaacgtgatagcatgggctgaaagtcacatcgaaatctatggtggcgctactaagtggactttcgaagcctgccgccaaatcaactag

SEQ ID NO: 232524 - DNA, 585 bp, synthetic construct
  misc_feature 1..585: note = Description of Artificial Sequence: Synthetic coding sequence
  source 1..585: mol_type = other DNA
atgtacgccaaggtaaaaaagtccctgcccgaaatgtacgcatttactgtatgtatgtggcttaaatccagcgcaactccaggggtcggcactccgttctcatacgccgtgcccggacaggcgaacgaattagtattgattgagtggggaaacaatcccatggaaattctgatcaatgacaaggtcgcaaagttaccatttgtaataaacgatggcaagtggcatcatatctgcgtcacctggaccacccgcgacggtgtttgggaagcctaccaggacggtacccaggggggatcaggtgaaaatttggcaccgtatcaccctataaagccacagggcgtcttggtgttgggccaagaacaagacacccttggagggggttttgatgccacacaggcatttgtgggcgaactcgctcatttcaacatttgggataggaagctcactccaggggaagtttataacttggccacttgctcaacaaaggccctgagcggcaatgttatcgcgtgggctgagtcccatattgagatctatggtggtgctacgaaatggacgttcgaggcttgtaggcagatcaattag

SEQ ID NO: 232525 - DNA, 1296 bp, synthetic construct
  misc_feature 1..1296: note = Description of Artificial Sequence: Synthetic coding sequence
  source 1..1296: mol_type = other DNA
atgctcgctctccttgcagcctctgtggctttggctgtggctgcaggcgctcaggactcacctgctcctgggtctagattcgtctgtacggccttaccacctgaggcggtgcacgctggctgtccgttacccgctatgcctatgcagggcggtgcacaaagtccagaagaagaacttcgagccgctgtgctacagctaagggaaactgtcgtccagcagaaggaaacactgggggcacagcgcgaagccattagagagcttaccggaaaactggcaagatgcgagggcctagcaggtggcaaggcaagaggcgctggggctactggaaaggataccatgggagacctcccccgtgacccaggacacgtggtcgaacagttgtctaggagcctgcaaacattgaaagataggttggaatccctcgagcatcagctcagggcaaacgtgagtaacgccggtctcccaggcgattttagggaggtgctgcagcagaggttgggagagttggaaagacagctgttaaggaaggttgccgagctggaggacgagaagtcattgctccataatgagaccagtgctcaccggcagaagactgaatctactctcaacgctctgttacagcgtgttaccgagctggaaagaggcaattccgcctttaagtcccccgatgcgtttaaagtgagcttacctctcagaaccaactacctctatgggaaaattaaaaagacacttccagagctgtacgcattcaccatttgtctctggttgagatcaagtgccagtccaggaattggtacgccattcagttatgctgtacccggtcaggccaacgagattgtactaattgaatggggaaataatcctatcgagttgctaatcaatgataaagttgctcagctgcccctctttgtttctgatggtaagtggcatcacatatgcgttacttggaccactagggatggtatgtgggaagcgtttcaggatggagaaaaactggggaccggtgaaaatttggcgccttggcaccccataaagcccggtggcgtgcttattctggggcaggagcaagacactgtcggaggcagatttgacgctacacaggcttttgtgggagagctgtcccaattcaacatttgggatcgagttctgagagcacaagagattgtgaacattgcaaattgttccactaatatgcccggaaatattatcccatgggtggacaataacgtggacgtcttcggcggagcttctaaatggcccgttgagacttgcgaggagaggctcctcgatctgtag

SEQ ID NO: 232526 - DNA, 246 bp, synthetic construct
  misc_feature 1..246: note = Description of Artificial Sequence: Synthetic coding sequence
  source 1..246: mol_type = other DNA
atggcagccgtagcagctgcctccgccgagctgttaattattgggtggtacattttcagagtgctcttgcaggtcttcttggaatgttgtatttattgggtgggtttcgcatttcgaaatcctcctggtacccaacccattgcccgttccgaggtttttaggtatagcctgcagaagctggcctacacagtaagtcgcaccggacgccaagtgctgggcgagcggcgacagcgcgcacctaactag

SEQ ID NO: 232527 - DNA, 165 bp, synthetic construct
  misc_feature 1..165: note = Description of Artificial Sequence: Synthetic coding sequence
  source 1..165: mol_type = other DNA
atggccgctgtggctgctgcgtccgcggagttgctgattattggctggtatatctttcgcgtcttattgcaagtgtttcgctattccttacagaagctggcttacactgtttccaggacagggaggcaggtcctgggagagcgcagacagcgggcacctaattag

SEQ ID NO: 232528 - DNA, 270 bp, synthetic construct
  misc_feature 1..270: note = Description of Artificial Sequence: Synthetic coding sequence
  source 1..270: mol_type = other DNA
atgattagctcggtgaagctaaacctgatactggtgctcagtcttagcactatgcacgtgttttggtgctacccggtcccgagtagcaaggtcagtggtaaatccgactacttcttaattctcctcaatagttgtcccaccagactcgaccgatcaaaggaactcgcctttctcaagcccatattggagaagatgtttgttaagcgctcgttccgaaacggagtcggaacagggatgaagaaaacaagctttcaacgggctaaaagttag

SEQ ID NO: 232529 - DNA, 525 bp, synthetic construct
  misc_feature 1..525: note = Description of Artificial Sequence: Synthetic coding sequence
  source 1..525: mol_type = other DNA
gtggtcctcctctacgctagcacttatgtgctggtgtcactgtccattgatagataccacgccattgtctatcctatgaaagttctcattgtgatcgcatggtcgcttagttttcttttttctatacccactcttattatctttgggaagcggacattgtctaacggtgaggtgcagtgttgggccctctggcctgacgactcttactggacaccttatatgactattgtggcgttcctcggatctctaatcacttttatctgctgctggtccccatatttcctgttcgacatcctggataattttaaccttctccctgacacacaggagcgcttctacgctagcgtgattatccagaacctgcccgcattgaactcagcgattaatccactgatctactgcgtcttctcaagttcaatcagttttccatgtagagagcaaaggagtcaggactctcggatgacctttagagaacgaactgaacggcatgaaatgcagatcctaagtaagccagagttcatctag

SEQ ID NO: 232530 - DNA, 1134 bp, synthetic construct
  misc_feature 1..1134: note = Description of Artificial Sequence: Synthetic coding sequence
  source 1..1134: mol_type = other DNA
atgcccgctaattttactgagggcagtttcgattcctctgggaccggtcagacgcttgattccagtccggttgcctgcaccgagactgtcacatttaccgaggtggtggaaggaaaggaatgggggagcttctattactccttcaagacggaacagttgataacactgtgggtgctgttcgtgtttactatcgtgggcaactcagtggtcctgttctctacctggcgccgaaagaaaaagtcccggatgactttctttgttactcagctcgctattactgatagctttacggggcttgtgaacattcttactgacatcaactggcgattcacaggagattttactgctcctgacctagtctgccgggtggtgcgatatctccaggtggtgctcctgtacgccagcacttacgtattggtgtcactgtcaatagacagataccacgctatagtataccctatgaagttcctgcagggggagaagcaggccagggttctcatcgttattgcttggtccctttccttcctgttctctatcccgacactgatcatttttgggaagcgaaccctgagcaatggggaggtgcagtgctgggccctgtggccggatgactcttactggacaccttacatgacgatcgtcgcattcctcgtgtactttatcccattgacaatcatctctatcatgtacggcattgttatccgcaccatatggattaagtctaaaacctatgagaccgtcatttccaattgctccgatggcaaactatgctcttcgtacaataggggactgatttctaaggcgaagatcaaggccatcaaatactctattattattatcctggctttcatctgctgttggtccccttatttcctgttcgatatcctggacaactttaaccttctacctgacacccaggaacgcttttatgcgtctgtgattatccagaatttgccggctctcaatagcgctattaatccgttgatctattgtgtgttcagttccagcatcagctttccatgtcgggtgattagactgaggcagcttcaggaggccgcactgatgctatgtccacagcgggaaaactggaagggcacatggcccggtgtcccgagttgggcactgcctaggtag

SEQ ID NO: 232531 - DNA, 1116 bp, synthetic construct
  misc_feature 1..1116: note = Description of Artificial Sequence: Synthetic coding sequence
  source 1..1116: mol_type = other DNA
atgcccgctaatttcacagaaggttctttcgactctagcgggaccggccagacactcgactcctcgcctgtagcatgtacggagaccgtcacttttactgaggttgtagaaggcaaggagtggggatccttctattactcattcaaaacggaacaactcatcaccctgtgggtgctcttcgtgttcactatagtggggaatagcgtggtcttgttttccacctggaggagaaagaaaaagtctagaatgaccttcttcgtgacccagctggctattaccgattcgtttaccgggctcgttaacatcctgactgacatcaattggagattcaccggagactttaccgccccagacctcgtctgccgcgtcgtgcgctatctgcaggtcgtcctcctgtatgcttccacctatgtcctggtttccttgtctattgataggtaccacgccattgtataccccatgaaatttctgcaaggagaaaagcaggccagggttctgatcgttattgcctggtctctctctttccttttctctatacccacacttataatattcggaaaacgtactctttcaaacggtgaagttcagtgttgggccttatggcccgacgactcttactggacaccctacatgactattgtggcttttctggtgtacttcatccccctcaccattatttctatcatgtacgggattgtgatcagaacaatttggatcaaatcaaaaacatatgaaactgtaatctcgaactgcagcgacggaaaactgtgtagctcatacaataggggccttatttccaaggctaagatcaaggctattaaatactctatcatcataatcttggcattcatctgttgttggtctccttacttcttgttcgatatcctggacaactttaaccttttacctgacacccaagagcggttttatgctagcgtgattattcagaaccttccagccctcaattctgccatcaatcccctgatttactgtgtgttttcctcttccatctccttcccgtgtcgtgagcaacgaagccaggattctaggatgacttttcgagaaagaactgagcgccacgagatgcagattctgagcaagcccgagttcatttag

SEQ ID NO: 232532 - DNA, 1173 bp, synthetic construct
  misc_feature 1..1173: note = Description of Artificial Sequence: Synthetic coding sequence
  source 1..1173: mol_type = other DNA
atgcctgcaaacttcactgagggctctttcgatagtagtggaacaggccagacactcgactcctctccagtggcctgcacagagaccgttacgtttactgaggtcgtcgagggcaaggagtggggtagcttttattatagttttaaaactgagcagctcattacactctgggtcctgtttgtatttactatcgtgggaaacagtgtggtgctgttctccacttggagacgtaagaagaaatcccgaatgacattttttgttacccagttggccattactgatagttttactgggctcgtcaatattctcactgatatcaattggcggttcacaggagatttcacagctccagacctggtgtgtcgcgttgtcagataccttcaggtggtcctgctatacgcgtcaacctacgtgctcgtttccctaagcatagaccgataccacgcaatcgtctatcccatgaaatttctccagggcgaaaaacaagcaagggtactcattgtcattgcatggagtttatccttcctattttccattccaacgctgatcatattcgggaagcggactctgagtaatggtgaagtccagtgttgggctctgtggcccgatgactcttactggacgccatatatgacaatcgtagcctttctcgtgtacttcattccacttaccattatcagcatcatgtacggcatcgtgattcggacaatctggatcaaatccaagacttatgaaaccgtgatcagcaactgctctgacggaaagctctgcagcagctacaatcgcggactgattagtaaggcaaaaatcaaggccattaagtattccattatcatcatcctagcgttcatatgttgctggagcccttactttctcttcgacatattagataactttaatctcctgccagacacgcaggagaggttctatgcgagcgtgatcatccaaaacctgcccgcattgaatagcgctatcaatcctcttatatactgcgtgttcagcagttctatttcctttccctgcagggcgaattcctctgtatatcttctggcatgtgatgttagcgtgctgtgggctctcgtccttacctctgaaaaggaaagttgtgagagctggcgacgcaagggtgccaagatcaccggattccaaaatgacgttcctggtgaaaactag

SEQ ID NO: 232533 - DNA, 918 bp, synthetic construct
  misc_feature 1..918: note = Description of Artificial Sequence: Synthetic coding sequence
  source 1..918: mol_type = other DNA
atgcctgctaattttacagaaggctcttttgattccagtggaacggggcagactcttgacagcagtccagttgcttgtactgaaacggtgacttttaccgaggttgtggagggaaaagagtggggatccttctattactcttttaagactgaacagctgattacactctgggtacttttcgtatttacaatcgtgggtaacagtgtggttctgttctccacctggagacggaagaagaagtctcgcatgacgttttttgtgacacaactggctatcaccgagaaacaggctagggtcttaattgtgatcgcctggtctctctcttttctgttttcaattcccacgttaattatatttggcaagagaacactttctaacggcgaggtgcagtgttgggccctctggcccgacgacagctattggacaccctacatgacgattgtcgcttttctcgtctatttcatccctctcacaattattagcatcatgtacggaattgtaattcgaactatttggatcaagtctaaaacatacgaaactgtgattagtaattgcagcgacggaaaactttgctccagctataataggggattaatctctaaggctaaaattaaggctatcaagtactctatcatcatcatcctggcatttatctgctgttggagcccatacttcttgttcgatatcttggataatttcaacctcttgccagacacacaggaacgattttatgctagtgtcattattcaaaatctacccgcactgaactctgccatcaaccctctgatttattgcgttttcagtagcagtatcagctttccctgccgggagcagagaagtcaggactcgcggatgacattcagggagaggacggagagacatgaaatgcagatcctctcaaagcctgagttcatctag

SEQ ID NO: 232534 - DNA, 432 bp, synthetic construct
  misc_feature 1..432: note = Description of Artificial Sequence: Synthetic coding sequence
  source 1..432: mol_type = other DNA
atgcccgcaaattttaccgaaggaagctttgactcgtctggtacaggtcagacacttgactcttcgccagtcgcttgcactgagacagtaacgttcaccgaggtcgtggagggcaaagaatggggtagtttctattattcttttaaaactgagcagctgatcacgctgtgggtgctcttcgttttcactatcgtgggaaattccgtggtgctgttttctacttggcgcaggaaaaagaaaagtagaatgacatttttcgtgactcagctcgccatcacggacagctttactggcctggtgaacatccttacagatattaactggcgttttactggagactttaccgcccctgatctggtgtgtagagtagttcgttacctgcaggtgatggttatgaagctgttccacatccaaaagatgaacatggagtag

SEQ ID NO: 232535 - DNA, 285 bp, synthetic construct
  misc_feature 1..285: note = Description of Artificial Sequence: Synthetic coding sequence
  source 1..285: mol_type = other DNA
atgcctgcaaactttacagaaggctcatttgacagttcaggaactggccagacattagattcatcccccgtggcatgtacagagacagtcacatttacagaagtagtcgaagggaaggaatggggctccttttactattcattcaagaccgaacaattgatcaccctttgggtcttgtttgtttttactatagtgggaaactctgtcgtgctgttcagtacttggcgaaggaagaagaagtccagaatgaccttctttgtgacccaactcgccatcacagtctag

SEQ ID NO: 232536 - DNA, 294 bp, synthetic construct
  misc_feature 1..294: note = Description of Artificial Sequence: Synthetic coding sequence
  source 1..294: mol_type = other DNA
atgttggggaacaagcggttgggactgagtggacttactctggccttaagccttttagtgtgccttggcgctttggctgaggcatacccgtcaaagcccgataacccgggagaagatgccccagcagaggacatggccaggtattacagcgcacttcgacactacatcaatctgatcaccagacagcggtacggcaagcgatccagtccagagaccctgatctcagaccttttgatgagagaaagcaccgaaaacgttccccgtactcggctggaggaccccgcaatgtggtag

SEQ ID NO: 232537 - DNA, 294 bp, synthetic construct
  misc_feature 1..294: note = Description of Artificial Sequence: Synthetic coding sequence
  source 1..294: mol_type = other DNA
atgctcgggaataagcgcctagggctgagcggcctgactttggcccttagtctcctggtgtgcctgggcgcactcgcggaagcttacccctcaaaacctgataatcccggtgaggacgctcccgctgaagacatggcacggtactatagcgcactccgccactacatcaatctgattactaggcagagatatggaaagaggagcagcccagaaacgttgattagtgacctgctgatgagggagtcaacagagaatgtgcctaggacaagactagaggatcctgcaatgtggtag

SEQ ID NO: 232538 - DNA, 294 bp, synthetic construct
  misc_feature 1..294: note = Description of Artificial Sequence: Synthetic coding sequence
  source 1..294: mol_type = other DNA
atgctaggtaataagcgtctgggcctctcaggcctcactctcgccctgtctctgctcgtctgtctgggcgcactggccgaagcctaccccagtaagcccgataatccaggagaggacgccccagcggaggacatggctaggtattatagcgcgctgaggcattacatcaacctgataaccaggcagagatatggtaaacgaagctcccctgagacgcttattagcgaccttctcatgcgggagtccaccgaaaacgtcccgaggacacggctggaggatccagctatgtggtag

SEQ ID NO: 232539 - DNA, 1155 bp, synthetic construct
  misc_feature 1..1155: note = Description of Artificial Sequence: Synthetic coding sequence
  source 1..1155: mol_type = other DNA
atgaactccaccctcttctcacaagtggagaaccatagtgttcattctaattttagtgaaaaaaatgcccaactgcttgcgttcgagaacgacgactgtcatcttcctcttgccatgattttcacgctggctctggcttacggcgctgtgatcatccttggcgtttcaggaaatctggccctcattattattatacttaaacagaaagagatgcgaaatgtcacaaatattctcatagtcaacctgtcattctccgacctcctggtggccatcatgtgtttaccttttacgttcgtttacactctgatggaccattgggtgttcggggaggctatgtgcaagttgaatcctttcgtacagtgtgtgagcatcactgtgtctatctttagcctcgtcctcatagctgttgaacggcatcagctcataattaaccccaggggctggaggcccaacaaccggcacgcttatgtcggaatcgccgtgatatgggttctggcggtggcaagctccctcccttttctcatctaccaagtcatgaccgacgagccttttcagaatgttactctcgatgcttataaagataagtatgtttgtttcgaccaattcccaagtgattcacacagattgagctatactactcttttgttggtcctgcaatattttggccctctttgctttatcttcatctgttattttaagatctatattaggctaaagaggcgcaataacatgatggataaaatgcgagacaataagtaccgaagctcagagactaagaggatcaatataatgctgctgtcaatcgtcgtcgcatttgctgtgtgctggctgcctctgacaatattcaataccgtgtttgattggaatcatcagatcattgctacatgcaaccataacctgctgttcttactctgtcacctaactgcgatgattagtacctgtgtgaaccctatcttctacggatttctgaataagaatttccaacgggatttacagtttttctttaatttttgtgatttcagaagccgcgacgatgactatgagaccatagccatgagtacaatgcatactgacgtatccaaaacaagtctgaaacaagcatcacctgtagcttttaagaaaatcaataataacgacgacaatgaaaaaatctag

SEQ ID NO: 232540 - DNA, 186 bp, synthetic construct
  misc_feature 1..186: note = Description of Artificial Sequence: Synthetic coding sequence
  source 1..186: mol_type = other DNA
atgaactccacacttttctcccaggtggaaaaccatagcgtccacagcaatttctcagagaaaaacgcccagctcctggccttcgagaacgacgattgccatctgcccttggcaatgatctttacattagccctggcctacggggctgttatcatactaggcgttagtggcaacctggctctatag

SEQ ID NO: 232541 - DNA, 426 bp, synthetic construct
  misc_feature 1..426: note = Description of Artificial Sequence: Synthetic coding sequence
  source 1..426: mol_type = other DNA
atgatggacaaaatgcgagacaacaaataccggtccagcgaaaccaagcgcattaatatcatgctgctaagcattgtggtcgcctttgctgtctgctggttacccctgaccatcttcaacactgtgtttgattggaaccaccagattattgctacctgtaaccacaacttgctgttcctcctgtgccacctcaccgccatgatatctacttgtgtcaatcctatcttttatgggttcctaaacaaaaatttccagcgggatttgcaatttttcttcaacttttgcgactttcggtccagagacgatgactacgaaacaatagctatgtccacgatgcacacagacgtgagtaaaacatcattgaagcaggcctcccccgtcgcgttcaagaaaatcaacaacaacgacgataatgagaaaatctag

SEQ ID NO: 232542 - DNA, 78 bp, synthetic construct
  misc_feature 1..78: note = Description of Artificial Sequence: Synthetic coding sequence
  source 1..78: mol_type = other DNA
atgaattcgactctgttctcgcaggtggaaaatcacagcgtgcactccaacttttccgaaaagaacgctcagttgtag

SEQ ID NO: 232543 - DNA, 183 bp, synthetic construct
  misc_feature 1..183: note = Description of Artificial Sequence: Synthetic coding sequence
  source 1..183: mol_type = other DNA
atgaactcaaccttgttctctcaggtcgaaaaccatagtgtgcactcaaatttttccgaaaaaaatgcacagctgctggccttcgaaaacgacgattgccatctgcctttggctatgatctttacactcgctctggcctacggcgcagtgattatcctgggtgtgagcggcaacctggcctag

SEQ ID NO: 232544 - DNA, 1146 bp, synthetic construct
  misc_feature 1..1146: note = Description of Artificial Sequence: Synthetic coding sequence
  source 1..1146: mol_type = other DNA
atgggcccaattggcgctgaagccgacgaaaatcagactgtggaggaaatgaaagtggagcaatatggaccgcagacgacaccaagaggcgagcttgtaccagatcccgaaccagagctcatcgatagtacaaagctgatcgaggtgcaggtggtattaatcctggcatattgtagtatcatcctgctcggagtcattgggaacagtttagtaattcacgttgtcatcaagtttaaatccatgaggaccgtgactaatttcttcatcgcgaatctggctgtggctgatctgcttgtaaatacactctgcctgccctttacactgacatatacactgatgggagagtggaagatgggaccggttttgtgtcatttagtgccttacgcacagggattagccgttcaggtgagcacgatcactctgacagtgattgccctcgacagacacagatgcatcgtgtaccatttagagagcaagatttcaaagagaatatccttcctgatcatcggcttagcatggggaatatcagccctccttgcatcacctttggccatcttcagggaatattctttaattgagatcatccctgactttgaaatcgtggcctgcactgaaaaatggccaggcgaggaaaagagtatctacgggactgtctacagtcttagctcattgctcatcctatacgtcttgcccctcgggattatcagtttttcatatactcggatctggtccaagctgaaaaaccacgtgtcaccaggagccgctaacgaccactatcaccaaagaagacagaagaccaccaaaatgttggtgtgcgtggtagtggtcttcgcggtgagttggttaccattgcacgccttccagcttgcagtcgacattgatagccaggtccttgacttgaaggagtataagctgatttttactgtgttccatataattgcaatgtgcagcacgtttgccaatccactgttgtatggatggatgaactctaactaccgcaaggcattcctctcggccttccgctgtgagcaaaggctcgatgctattcactcagaggtgtccgtcactttcaaggcgaaaaaaaatctggaagtgcggaaaaatagcggaccaaacgacagtttcacagaagccaccaacgtgtag

SEQ ID NO: 232545 - DNA, 1146 bp, synthetic construct
  misc_feature 1..1146: note = Description of Artificial Sequence: Synthetic coding sequence
  source 1..1146: mol_type = other DNA
atgggtccaattggagccgaagctgacgaaaatcagacggttgaggaaatgaaagtagagcagtatgggccacagacaacgccccgaggggaactggtgccagaccctgagccagagttaatcgattccacaaagcttatcgaagtgcaagttgtcctgatcctggcgtattgcagcattatactcctgggggtaatcggtaatagccttgtgattcacgttgtcataaagttcaaatcaatgcgtacggtcaccaacttcttcatcgccaatctggcggtggcagaccttctggtaaacacactctgtctaccgtttaccctgacttacactctgatgggcgagtggaaaatgggtcctgtgctgtgccatctggtgccatatgctcagggcctcgcggtgcaggtatccaccattactttgactgtgattgcgctggaccgacaccgatgcattgtgtaccatctagagtctaaaatctcgaaacgtatttcatttctgattattggactggcgtgggggatttcggcattgctagccagtcctctggctatcttcagggaatactccttgatcgaaatcatacccgacttcgaaatagtggcctgtaccgaaaagtggccaggagaggagaagagtatctacggcaccgtatacagcctgtcatcactgctgattctctacgtactccccctgggcattatttcattctcatacacccgtatctggtctaagcttaagaaccacgtctcgcctggggctgccaacgatcattatcatcaacggagacagaagactaccaagatgctggtttgcgttgtcgtcgtattcgcggtgtcctggctccctctgcatgcctttcagctggctgttgatatcgattcgcaggttctggatcttaaagagtacaagctgattttcacagtttttcacattatcgctatgtgcagcacctttgcgaaccccctcttgtatggctggatgaattctaattaccggaaggcttttctgtctgcattcagatgtgagcagcgtctggacgcaattcacagcgaggtctcagtcacctttaaggctaaaaagaatctggaggtccgaaaaaactccggcccaaatgatagttttactgaagccaccaatgtttag

SEQ ID NO: 232546 - DNA, 1338 bp, synthetic construct
  misc_feature 1..1338: note = Description of Artificial Sequence: Synthetic coding sequence
  source 1..1338: mol_type = other DNA
atggacttggaactggatgaatattacaacaagacactggctacggaaaataacactgcagcgactagaaatagcgactttcctgtttgggatgactacaagagctctgtcgatgacctgcagtatttcctgatcggtctttatacattcgtgtccttacttgggtttatgggcaaccttttaatcttgatggccttgatgaagaagcgaaaccagaagactaccgtgaattttctgatagggaacctggccttctcagacatcctggttgtgttattctgcagtcccttcactctgacaagtgttttgctcgaccagtggatgttcggaaaggtaatgtgccacattatgccatttctgcagtgcgtttccgtcctggtttccaccctgattttgatcagcatagccattgtgaggtatcacatgatcaagcacccgattagcaataaccttacagcaaaccatgggtactttctcattgccacagtgtggaccctaggctttgccatctgctcccccttgcccgtgttccattcactcgtggaactgcaagaaactttcggctctgcactcttgtcttcgagatatttatgtgtcgagtcttggcccagtgattcataccgtattgcctttaccatttcactgcttttggtccagtacatcctgcccctggtgtgcctgacagtgtcgcacacctctgtgtgcagaagtatcagttgtggcttgagtaataaggaaaatagactggaggagaacgagatgattaacctgaccctccaccctagtaaaaaatctgggcctcaagtgaagctgtcgggaagtcacaaatggtcttattctttcatcaagaaacaccggcgtcgctactctaagaaaaccgcttgtgtgctaccagccccagaacggccatcccaggaaaaccactccagaatactccctgagaactttggatctgtccgcagccaactgagctcttcttccaagttcattcctggcgtgcccacctgcttcgaaattaaacccgaggaaaactccgatgtgcatgaactccgcgttaagagaagcgttacccgcattaagaagaggagtagatctgtgttctacagactgactatactgatcttggttttcgccgtgtcgtggatgcccctgcatctttttcatgtagttactgacttcaatgataacctaatcagtaacagacattttaagttggtctactgcatctgccacctcctggggatgatgtcctgctgcctaaaccccattctgtacggcttccttaacaatggcatcaaggccgaccttgtgtccctgatccattgtttgcatatgtag

SEQ ID NO: 232547 - DNA, 1338 bp, synthetic construct
  misc_feature 1..1338: note = Description of Artificial Sequence: Synthetic coding sequence
  source 1..1338: mol_type = other DNA
atggatctggagctggacgagtactacaacaagactttggccactgagaacaacacagctgctactaggaacagcgacttccctgtttgggacgattataagagttctgttgatgaccttcagtacttcctgattggactgtatacgttcgtctcactgttgggctttatggggaaccttctgatcctgatggctctgatgaagaagagaaatcaaaagacaaccgtgaacttcctcattggcaatcttgccttctccgacatcctggttgtccttttttgctcaccatttaccctgacttctgtactcctggatcaatggatgtttgggaaagtgatgtgtcatatcatgccctttttgcaatgcgtatcggtgctagttagcactctcatactcatttctatagccatcgtgcggtaccatatgatcaaacaccctatctcaaacaaccttacagccaaccacggctacttccttatcgctactgtgtggacacttggctttgcgatctgctctccattgccggtgtttcacagtctggttgaactccaggaaacttttggctcagccctgctctctagccgatatctgtgtgtggaatcatggccttctgatagctatcgcatcgcctttaccatctcattactccttgtgcagtacatccttcctcttgtatgtctgaccgtctctcatactagcgtgtgcagaagtatttcttgtggactgtccaacaaagaaaacaggttagaggagaacgaaatgattaatcttacactgcacccgtcaaaaaagtccgggcctcaggttaagttgtcgggctcccacaagtggagttactcattcatcaagaagcaccgacgaaggtactctaaaaagaccgcatgtgtgttacctgcccctgagaggcccagtcaggaaaatcactctaggattttacctgaaaactttggcagtgtgcggtcccagctcagctccagctccaaattcatccccggtgtgccaacgtgtttcgaaattaagcccgaggaaaactctgacgttcatgagttgcgcgtcaaacgatcagtgacaaggatcaagaagcggagcaggagcgttttttaccgcttaaccatcctgatcctcgtgttcgccgtgtcgtggatgccactgcacctcttccatgtcgtgactgactttaatgacaacctgatctctaacaggcactttaagcttgtctattgcatttgtcacctcctcgggatgatgtcgtgttgtctgaacccaatcctgtacggcttccttaacaatggtatcaaggcagatttggtgtccttgatacattgtctacacatgtag

SEQ ID NO: 232548 - DNA, 1338 bp, synthetic construct
  misc_feature 1..1338: note = Description of Artificial Sequence: Synthetic coding sequence
  source 1..1338: mol_type = other DNA
atggacctagaattggacgaatattataacaaaactctcgccacagagaacaataccgccgcaacacgcaattccgattttccggtctgggatgattataagagctcagtcgacgaccttcagtactttctgattggcctctatacatttgtgtcactgttgggtttcatggggaatctcttaatcctaatggccttaatgaagaaacgcaatcagaaaacgaccgtgaacttcctcatcggtaacctcgcattctccgatattctcgttgtgttattctgctcaccctttacacttactagcgtcctactggaccagtggatgtttggcaaggtgatgtgccatatcatgccatttctgcagtgcgtcagcgtgctggtgtcgacactgatactcattagtatcgccattgtgaggtaccatatgatcaagcatcccatctcgaacaacctcaccgccaatcacgggtacttcctgatagcgaccgtgtggacactgggattcgcaatctgcagccctctgcccgtgttccattcgcttgtggagcttcaggagaccttcggttcggccctgcttagctctagatatctctgtgttgaatcttggccctctgacagttataggatcgcatttaccattagtctgcttctggtccagtatattctcccactggtttgtctgacagtgagtcacaccagcgtttgccgctcaatttcttgtggactttctaataaggagaacaggttggaggagaacgagatgatcaatctgaccctgcatccatccaaaaagtccggcccacaggtgaaactgtccggctcccataagtggtcgtattccttcatcaaaaagcacaggcggaggtattccaaaaaaacagcgtgcgttctgcccgcacccgagcgaccttcgcaggagaatcactcaagaatcctgccggagaactttggatcggtgcgttctcagctgtcttcaagcagtaagtttattcctggcgtcccgacttgtttcgagattaagcctgaagaaaactccgatgtgcacgagctgcgcgtgaagcgcagcgtgaccagaattaagaagagaagccgatctgtgttttataggcttacaatactgatcttagtattcgctgtgtcctggatgccactgcatttattccacgttgtgacagactttaatgataatctgatctccaatcggcattttaaactggtgtattgcatttgtcacctactcggcatgatgagttgctgccttaatcccatcctctacggatttctaaataacggcatcaaggcagatctcgtgtccctcattcactgcctccatatgtag

SEQ ID NO: 232549 - DNA, 987 bp, synthetic construct
  misc_feature 1..987: note = Description of Artificial Sequence: Synthetic coding sequence
  source 1..987: mol_type = other DNA
atggataatgccagtttttcagagccctggcccgctaacgcatctggccctgacccagccctcagttgttccaatgccagcaccctggcccctttgccagcaccactggccgtagccgtgccagtggtgtatgccgtgatctgcgccgtcggcctcgccggaaattcagcagttctctacgtcctgctgagagccccaaggatgaagacagtcactaacctgtttattttgaatctcgcgatagcggatgagctcttcacactggtactccccattaacatcgcggattttctgctgcggcagtggcccttcggggagcttatgtgcaagctcattgtcgctattgatcagtacaatacattcagtagcctgtattttttgactgtcatgtcagccgaccgatacctggtcgtactggctactgcggagtcaaggagagtggcaggaagaacgtactccgcagctcgcgctgtctccttagcagtgtgggggatagtcaccttggtggttttgccttttgccgtgtttgctaggctcgatgacgaacagggaaggaggcagtgcgtactggtgttcccccaaccagaagcattttggtggagagcaagcagactgtatactctggttctcggatttgccatccctgtatctaccatatgcgtgctgtataccactctactctgccgactgcatgccatgcggttagattctcatgctaaggccctggagagagccaagaaaagggtcacctttctggtggtcgcgattctggctgtgtgcctgctgtgttggactccgtaccaccttagcactgttgtcgcactaacgaccgacttgcctcagaccccgttagtgatcgcgatcagctatttcatcacttccctgtcttacgccaacagttgccttaacccattcctttatgcattcctggacgccagctttcggaggaatctgcggcagctgatcacctgccgggcagcagcatag

SEQ ID NO: 232550 - DNA, 1599 bp, synthetic construct
  misc_feature 1..1599: note = Description of Artificial Sequence: Synthetic coding sequence
  source 1..1599: mol_type = other DNA
atgttagcggagcctttccctaaggttgtggcgtcattaatcatcttgcacctgtcaggcgcaaccaaaaagggaacagaaaaacagacgacatccgaaacacagaaatccgtccagtgcgggacatggaccaaacatgccgagggtggtatattcacgtctcccaattatccatccaagtacccccctgatagagagtgtatctatatcatcgaagctgcccctcgacagtgcatagagctgtattttgacgagaaatacagtatcgagcccagttgggagtgtaaatttgatcacatcgaggttagagacgggccattcggattctcaccgattattggcaggttttgtggtcagcagaatccacctgttatcaagtcgtctggtagattcttatggatcaaattctttgccgatggagaattggagagcatgggcttctccgccaggtacaactttactccagaccccgattttaaggacttgggcgctctgaagcccctcccagcatgcgagtttgaaatgggcggtagcgagggcatcgtagaaagcatacagataatgaaggaggggaaggccacggccagcgaggctgtcgactgcaagtggtatattagggcgccaccacggtcaaaaatttatctgcgcttcctggactacgagatgcagaactctaatgagtgcaaacggaactttgttgccgtttacgatgggagtagctcagtcgaggacttaaaggccaagttttgcagcaccgtggccaacgacgtgatgttacgcaccgggctgggcgttattcgaatgtgggccgatgaaggatccaggaacagcagatttcagatgttatttacatctttccaggaaccgccatgtgagggaaatactttcttctgccattcaaacatgtgcatcaacaacactctcgtttgcaacggtctgcagaactgcgtatacccttgggacgagaaccactgcaaggagaaaagaaagactagcttgttggatcagctcaccaatacatcaggcaccgtgatcggagtcaccagctgcatcgtgattatactcattattatctccgtgattgtgcaaatcaagcaacctcggaaaaaatatgtgcagcggaagagcgattttgatcagaccgtgttccaggaagtgtttgagccccctcactatgagctgtgcacgttgagaggcacaggcgctaccgcagattttgccgatgtggctgatgactttgagaactaccacaaattgcggagaagttccagtaagtgcattcacgaccaccactgcgggagtcaattgagctcaacaaagggaagccgatctaatctttctacgagggacgccagcatactgacagaaatgcctactcagcccggaaagcccctgataccccctatgaacagacgaaatatcctggtcatgaagcattcctacagccaggacgcagcagatgcctgcgacatcgacgagatcgaagaagtccccactacttcccataggctgagccggcatgacaaagcggttcagcggttttgtctcataggatcgcttagcaagcacgaaagcgaatataacacaaccagggtgtag

SEQ ID NO: 232551 - DNA, 1602 bp, synthetic construct
  misc_feature 1..1602: note = Description of Artificial Sequence: Synthetic coding sequence
  source 1..1602: mol_type = other DNA
atgatacatggtcgttcagtcttacacatcgtggcgtctctgatcatcttgcacctcagcggcgctaccaaaaaggggacggagaaacagacaactagcgaaactcagaagtcagtccaatgcgggacctggaccaaacacgcggagggaggtatttttactagccctaattacccatctaagtacccccctgatcgtgaatgtatctatataattgaagccgcacctagacagtgtattgaactgtattttgacgaaaagtatagcatcgagccttcgtgggaatgcaagttcgatcacattgaagttcgcgacggaccgtttgggttcagcccaattattggaagattctgcggacagcagaatccacctgtgatcaaaagctccgggcgtttcctttggatcaaattctttgctgacggcgagctcgaatccatgggcttttccgctagatataatttcacgcccgatcctgacttcaaggaccttggagctttaaagccacttcctgcttgtgagtttgagatgggtgggagtgagggcatcgtggagagcatccagattatgaaggagggaaaagcaaccgccagtgaggcagtcgattgcaagtggtacatacgcgctcctccgagatcaaagatttacttgcgatttctggactacgagatgcagaattccaacgagtgcaaacggaattttgtggccgtgtatgatggttcctctagtgtggaagacctcaaggcgaaattctgctcaacagtagcgaacgacgtgatgctccgcacgggattgggggttatccgcatgtgggctgacgagggaagccggaacagccggtttcagatgctctttacttccttccaggagcccccatgtgaggggaacacattcttttgtcactccaatatgtgtattaataacacattagtgtgtaatggcctgcagaactgtgtgtatccttgggacgagaaccattgtaaagaaaagcgcaagacttcattactggaccagctcactaatacttcgggaacagtgatcggcgtgacctcatgcattgtgatcatcctaataataattagcgttattgtgcagatcaagcagccccgaaaaaagtatgtccagaggaaatctgattttgatcagacggtatttcaagaggtctttgaacctccccattacgagctctgtacgctgcgcggaacgggcgcaactgccgatttcgcggatgtggctgatgacttcgagaactaccataagctgagaaggtcctcaagcaagtgcattcatgaccaccattgtggcagccaactctcttccactaagggctcaaggtccaacctgagtacccgagacgcatcaatcctcacagagatgcccacccaaccaggcaagccccttatcccacccatgaatcgaagaaacatattggtgatgaagcatagttatagccaggacgccgctgatgcctgtgatattgacgagatcgaagaggtgccaaccacttctcacagactgagtcgccacgacaaggcagtgcagaggttctgtctcatcggctccttgagtaagcatgaaagcgagtacaacacaactcgtgtgtag

SEQ ID NO: 232552 - DNA, 471 bp, synthetic construct
  misc_feature 1..471: note = Description of Artificial Sequence: Synthetic coding sequence
  source 1..471: mol_type = other DNA
atgctggccgagccctttcccaaggtggtggcttccctgatcatcttgcacctgagcggggcaacaaagaagggaactgaaaaacagaccacgagcgagacgcagaaatcagttcagtgtggtacctggaccaaacacgccgaaggaggcattttcaccagccccaactatccctcaaaatatcccccagatcgggagtgtatatacataatcgaagccgctccaagacagtgtattgaactatacttcgatgaaaagtattccatcgaaccgagctgggaatgtaaatttgaccacatagaggtgcgggacggccctttcgggtttagtcccatcatcggcaggttctgtggccaacaaaatccacccgtcatcaaaagctccggtagattcctgtggatcaaatttttcgcggacggggagctggagagtatgggcttcagtgcaagatataactttacacccgagtag

SEQ ID NO: 232553 - DNA, 1602 bp, synthetic construct
  misc_feature 1..1602: note = Description of Artificial Sequence: Synthetic coding sequence
  source 1..1602: mol_type = other DNA
atgattcacggaagaagcgtactccacattgtcgcgtctttgataatcctgcacctgtcgggggctactaaaaaaggcacggagaaacagaccacaagtgagacccaaaaaagtgtacagtgtggcacttggacaaagcatgccgaagggggtatttttacctcaccgaactaccctagcaaatacccccctgatagggagtgcatctacattattgaagctgccccacggcagtgcattgagctgtatttcgacgaaaaatatagcattgagcccagctgggaatgtaagtttgaccatatagaggtcagggatggcccttttggatttagccctatcattggtaggttctgcggccaacagaatcctccagtgatcaagtcctccggccgatttttgtggatcaaatttttcgctgacggggagctagagagtatggggttttcagcccgatacaatttcactccggatcctgacttcaaagatctcggagcacttaagcctcttccagcatgcgaattcgaaatgggcggatccgaggggattgttgaatcgatccagattatgaaggagggcaaagccaccgcttctgaggctgttgattgtaaatggtacattagggctccacccagatcaaagatttaccttcgcttcctagactacgaaatgcagaatagcaatgagtgtaaacggaattttgtggccgtatacgacggatcatcctctgtggaggacctgaaagccaaattctgctctacggtggccaacgacgtcatgcttcggacggggctgggcgtcataaggatgtgggcagatgagggaagtcgcaattcacggtttcagatgctgttcacatcgtttcaagagcccccatgcgagggcaacacgtttttttgtcacagcaacatgtgcatcaacaatacactagtttgtaacggcctgcaaaactgcgtatatccttgggacgaaaaccattgtaaggagaagagaaagacatccctgctcgaccagctaacaaatactagcggtaccgttatcggggtaacctcatgtattgtcatcattcttatcattatttccgtaatcgtacaaatcaagcagccccgaaaaaagtacgtgcagagaaaatccgatttcgatcagacagtgttccaagaagtgtttgaaccaccgcactatgaactgtgtaccctaagaggaaccggagcgaccgcggacttcgcagacgtggctgatgacttcgaaaattaccataaattgaggcggagtagcagcaaatgcattcatgatcaccattgcggcagccagctgtcctccacgaaggggagccgatccaacctgagtacccgagatgcgtccatcctaacggagatgcccacccagccaggcaagccactaatcccgccaatgaataggcggaatattcttgtgatgaagcattcatatagccaagacgccgcagacgcttgtgatatcgatgaaatcgaggaggtgcctactacctcccaccgattgtcccggcacgataaagccgtgcaaaggttctgtctcattgggagcctgtctaagcacgagtcagagtacaacaccacgcgtgtgtag

SEQ ID NO: 232554 - DNA, 1017 bp, synthetic construct
  misc_feature 1..1017: note = Description of Artificial Sequence: Synthetic coding sequence
  source 1..1017: mol_type = other DNA
atgtcgggtagcagtctcccaagtgcccttgctttaagcctgctcctcgtaagcggatccttgttgcccggtccaggggcagcacaaaatgccggatttgtgaaatccccaatgtctgagacaaagctgactggagacgcattcgagctttattgtgatgtggtgggctccccgactcccgaaatccaatggtggtatgctgaggtgaaccgggcagagtctttccgacagctttgggacggcgcacgaaagaggagggtgacggtgaatactgcatatggctcaaacggagtctctgtgctgcgcatcacccgcctcactcttgaggactctggcacatatgaatgcagagcgtcaaatgaccctaagcggaacgatctgcggcagaaccccagtatcacttggatccgagcgcaggctacaatcagcgttctgcagaaacctagaatcgtgacctccgaggaagtcatcatccgggactcgccagtcctacccgtgaccttgcaatgcaacctaacctcatcttctcacacactaacctatagttattggaccaaaaacggagtggagttgtctgccaccaggaagaatgctagcaacatggagtacagaatcaacaagcccagagcagaggattccggagagtatcactgcgtctatcactttgtctctgcccctaaggctaacgctacaattgaggtgaaggctgcacctgatataactggacataaaagaagcgagaacaagaacgaggggcaggatgccacaatgtactgcaagagtgtggggtaccctcatccagactggatctggcggaagaaagaaaatggcatgccaatggacatagtaaatacttcaggcagattctttattattaataaggaaaactacacggaattaaacatcgttaacctgcagatcaccgaagaccctggtgaatatgagtggtgcggggctacctggccacattctggattatcttgggagttttggcttaagctctccagcctgtggtag

SEQ ID NO: 232555 - DNA, 1197 bp, synthetic construct
  misc_feature 1..1197: note = Description of Artificial Sequence: Synthetic coding sequence
  source 1..1197: mol_type = other DNA
atgtcaggttcttccctacctagtgcactggctctcagcttgctccttgtctctggaagcctgctcccaggccctggggctgcccagaacgcaggctttgtaaagtctcctatgtctgaaactaagttgaccggggatgccttcgagttatactgcgacgtcgtgggcagtcccacccctgagatccagtggtggtatgccgaggtcaacagggcagagagctttcgccaactctgggatggtgccagaaagcgtcgggtgaccgtgaacacggcttatggttctaatggtgtttctgtgctgagaattacccggctgacccttgaggacagcggaacgtatgagtgtcgggctagcaatgaccccaaaagaaacgacttacggcagaatccctcaattacatggatcagagctcaggcgacaatctcagtgctgcagaaaccacgaatcgtgaccagcgaggaggttattattagggattcgcccgttcttccggtaactctccagtgtaacctgacgagtagctctcacacactgacgtatagttattggacaaagaatggcgtggaactgagcgcaactcggaagaacgcttccaacatggaatacaggatcaacaaaccacgggcagaagatagcggggagtatcactgcgtgtaccattttgtgtctgctcccaaagctaacgctacaattgaagtgaaagctgcccctgacatcactgggcacaagcgctccgagaataagaacgagggacaggacgctactatgtactgtaaatcagttgggtatccccatccggactggatttggagaaagaaggagaatggtatgccaatggatatagtgaacacctcaggacgtttcttcattatcaacaaggagaattacacagagctgaatatagtgaatttgcagattacggaagacccgggagaatatgagtgtaatgccacaaacgccattggatcagccagtgtggtaacagtcttaagagtaaggagccacctcgcccctctgtggcccttccttgggatactcgcagaaattatcatcctggtggtaataatcgtcgtgtatgaaaagcgtaaaagacccgacgaggtgcctgatgacgacgagcccgctgggccaatgaaaaccaactcaaccaacaatcacaaagacaagaatttacgccagagaaacacaaattag

SEQ ID NO: 232556 - DNA, 849 bp, synthetic construct
  misc_feature 1..849: note = Description of Artificial Sequence: Synthetic coding sequence
  source 1..849: mol_type = other DNA
atgagcggctcctctctcccaagcgctctagcactgtcattgctccttgtctcaggctcactgctccctggccctggcgcagcgcagaacgagccacgcattgtgacctctgaggaggtcataattagggatagccccgtactgccagtcacactccagtgtaacctcacttcttcaagtcatacacttacttacagctactggacgaaaaacggcgtggagctctctgccaccagaaaaaacgcctcaaacatggaataccgtatcaataagcctcgggctgaggactcaggcgaatatcactgtgtgtatcactttgtcagcgcacccaaggctaacgccactattgaggtgaaagcagcgccagacatcactggtcacaaacggagcgaaaataagaatgagggccaggatgctaccatgtactgtaaaagcgttggttacccccatcctgactggatctggcgcaaaaaggagaacgggatgcctatggatatcgtgaacacctctggtaggttttttattattaacaaggaaaactataccgagttaaacatcgtgaacctacagataactgaggacccaggtgagtatgagtgtaatgctactaatgccattggaagcgctagcgtagtaactgtgcttagggtaagaagtcaccttgctccattatggccatttttgggcattctggccgagataatcatcctggtggtgatcatagtagtgtatgagaaacgcaagaggccggatgaggtgcccgatgacgacgagcccgctggaccgatgaagactaactccactaacaaccacaaggacaagaacctgcggcaaagaaatacaaactag

SEQ ID NO: 232557 - DNA, 582 bp, synthetic construct
  misc_feature 1..582: note = Description of Artificial Sequence: Synthetic coding sequence
  source 1..582: mol_type = other DNA
atgtccgggtcctctctgccctcggccctggccctcagtctgctgcttgtgagcggatctctgcttcctgggccaggggcagcccagaatgccgctccggacattacaggccacaagcggagcgagaacaagaacgagggtcaggatgctacgatgtactgtaagtctgtgggataccctcatccagactggatctggagaaagaaagagaatgggatgccaatggacattgtgaacacgagtggaagattttttatcatcaataaagaaaattatactgagctgaatatagtgaatctccagatcacagaagatccgggagaatacgaatgtaacgctacaaatgcaattggcagtgcatccgtagtaactgtgctgagagtgcgatcacatttagcccctttgtggcctttcttgggcatactggccgagatcattattctggtggtgatcatcgttgtctacgagaagagaaaaagacctgatgaagtgccagatgacgatgagcccgcaggaccgatgaagaccaattctactaataatcacaaagataaaaatctgagacagcgaaataccaattag

SEQ ID NO: 232558 - DNA, 1185 bp, synthetic construct
  misc_feature 1..1185: note = Description of Artificial Sequence: Synthetic coding sequence
  source 1..1185: mol_type = other DNA
atgagtggtagtagcttaccttctgctctcgcactgtcactgcttctcgtgagtggaagtctgctgcctggcccaggagctgcacaaaacgctggcttcgtgaaaagtccgatgtcagagacaaaacttacaggtgatgcttttgagttatattgcgacgtggtgggatcacccaccccggaaatacagtggtggtacgccgaggtgaacagagccgagagcttcaggcaactgtgggatggtgcaagaaaacgccgagtgaccgtaaacacggcctacggctcaaacggggtgtctgtgcttagaataactcggttaacactggaggattctgggacatatgagtgtcgagccagtaacgatcctaagcgaaacgacctacgccaaaatcctagcataacatggatccgtgcccaggcaaccatttctgtgctgcagaagccacgcatcgttacctcagaggaggtgataatacgggactccccagtcctgccggtgacactacagtgcaatctaactagcagcagccatacgttaacctacagctactggaccaagaatggcgtggagctgagtgccacaagaaagaatgcgtccaatatggaataccggataaacaaaccacgcgctgaggacagcggcgagtatcactgtgtgtaccattttgtcagtgcacccaaggcgaacgcaacaatcgaggtgaaagcggcacccgacattactgggcataagcggagtgagaataagaacgaaggacaggatgccaccatgtattgcaaaagtgtgggctatccgcatccagactggatttggagaaaaaaggagaatgggatgccaatggatatagtgaatacaagcggtcggtttttcattataaacaaggagaactacacagaattgaatatcgtgaatctgcagataactgaggacccaggcgaatatgaatgtaatgccacaaacgctattggctctgcctcagtcgtgacagtgctaagggtgaggagccatctcgcgccactgtggccctttctgggcatattggccgagatcattatactggtggtaatcatcgtggtgtacgaaaaacgcaagcgaccggatgaggtccctgatgtgccgcctagaaaaacaaactccacaaataaccacaaggacaaaaacttgagacagcggaatactaattag

SEQ ID NO: 232559 - DNA, 513 bp, synthetic construct
  misc_feature 1..513: note = Description of Artificial Sequence: Synthetic coding sequence
  source 1..513: mol_type = other DNA
atgatggcaggtatgaagatccagttggtgtgcatgctgctcttagccttcagcagctggtccttatgctcagattcggaggaagaaatgaaggctctcgaagcggacttcctgacaaatatgcacacatcaaaaatctcaaaggctcatgttcccagctggaagatgaccctcttaaatgtgtgctccttggtaaacaatttgaactcaccggcagaagagactggagaggttcacgaggaggaactcgtggcaaggcgtaagctgcctaccgcgttagacggcttctccctggaggccatgctgacgatttaccaactgcataagatttgccacagtcgagccttccagcattgggagctgatccaggaggatattcttgacacgggaaacgacaagaatggaaaagaggaggtaataaagcgcaaaatcccttacatcctaaagcggcaactctacgagaacaagcctaggcggccatatatcctgaagcgagacagctattattattag

SEQ ID NO: 232560 - DNA, 348 bp, synthetic construct
  misc_feature 1..348: note = Description of Artificial Sequence: Synthetic coding sequence
  source 1..348: mol_type = other DNA
atgactctgcttaacgtgtgcagccttgtaaacaacctgaattcccccgcagaggaaacaggcgaggtgcacgaggaagagttggtagcaagacggaaactgcccaccgctctcgacggcttctctctcgaggccatgctaaccatttaccagttacataagatttgccattcacgtgctttccagcattgggaattgatccaggaagatatcctcgacaccggaaacgacaaaaacggaaaagaggaagtgattaagagaaagataccctacatcctgaagagacagctatacgaaaataagccacgacgcccttatattctgaaacgcgatagctactactactag

SEQ ID NO: 232561 - DNA, 288 bp, synthetic construct
  misc_feature 1..288: note = Description of Artificial Sequence: Synthetic coding sequence
  source 1..288: mol_type = other DNA
atgatggcaggaatgaagattcagcttgtctgtatgctgttattagcgttctcttcctggagcctctgcagtgacagtgaagaagagatgaaagcccttgaggccgatttcctgaccaacatgcacacgagtaagcttattcaagaagatatcctcgatacaggtaatgacaaaaacggcaaggaggaggtgataaaaaggaagattccctacatcctgaaaagacagctctacgaaaacaaaccaagacggccttatatcctgaaaagagacagctattattactag

SEQ ID NO: 232562 - DNA, 1257 bp, synthetic construct
  misc_feature 1..1257: note = Description of Artificial Sequence: Synthetic coding sequence
  source 1..1257: mol_type = other DNA
atgcggctgaattcgagcgctccaggtaccccagggactccagctgcagacccattccagcgcgctcaagccggactggaggaggcactcctggcaccaggcttcggaaacgcatccggcaatgcctccgagagggttctggccgcaccaagtagtgagctagatgtaaacaccgatatttactcaaaggtcttggtcaccgcagtctacctggctttattcgtggtgggtaccgtgggcaatactgttacggcattcaccctagctcgcaagaagtcactacagagccttcaatctaccgtgcactatcatctaggctccctcgccctgagcgatttgctgactctacttctagccatgccagtcgagttatataattttatctgggtgcaccatccctgggcattcggtgatgcgggatgcagaggatactactttctgagagacgcctgtacctatgccacagccctgaatgtcgcatcgctgtccgtggagcggtatctcgccatctgccacccttttaaagctaagactctgatgagccgttctagaactaagaaatttatttcagccatctggctggcctcggcactgctcgctgtaccgatgctctttaccatgggcgaacagaaccggagcgctgatggacagcacgctggcggtctggtgtgcacccccacgattcacactgccactgtcaaggtggtgatacaggtcaatacatttatgtccttcatcttccctatggtggttatatccgttcttaataccatcatcgctaataagcttactgtgatggttaggcaggctgcagagcagggccaggtgtgcactgtgggaggcgagcattccacgttttcaatggccatagaacctgggagggttcaagctcttagacatggcgtgagagtcctgagggctgtggtgatcgctttcgtggtatgttggctcccataccatgtgcgccgactgatgttttgctacatatcagacgagcaatggacaccctttctgtatgatttttaccattatttctacatggttacaaacgcccttttctacgtgtcttcgactattaatcctatattatataatctggtctcggcaaattttaggcacattttccttgccacccttgcctgtctttgcccagtgtggcgaaggcggcgaaagcgtcccgcttttagtcgtaaggcggatagcgtcagcagcaatcacaccttatccagtaatgcaactagggagactctgtattag

SEQ ID NO: 232563 - DNA, 951 bp, synthetic construct
  misc_feature 1..951: note = Description of Artificial Sequence: Synthetic coding sequence
  source 1..951: mol_type = other DNA
atgggggtttgtgggtatttgttcctgccgtggaagtgccttgtcgtcgtgagcctgagactgcttttcctggttcccacaggggtcccagtgaggagcggagacgctacattcccaaaggccatggataacgtgacagttcgccaaggagagtccgccaccctgcgctgcaccatcgataatagggtgactagggtcgcatggctgaacagatcaacgatactgtacgctggcaatgataagtggtgtctggaccctcgtgtggttcttctttcaaatacacaaacacagtactcgatcgaaattcagaacgtggacgtctacgacgaaggcccttacacctgctctgtgcagactgataatcaccccaaaacatcacgcgtccacctgatcgtgcaagtcagccccaagatcgtagagatcagtagcgatatttccatcaatgaggggaataatatttctttgacttgcatagctaccggcaggcccgagccgaccgtgacttggagacacatcagccctaaggctgtgggatttgtgtctgaagacgagtatttagagatccaaggcatcactcgcgaacagtcaggagattatgaatgctcagctagcaatgacgtggctgctcctgtggtcaggcgagtcaaggtaactgttaactacccgccttacatcagcgaggcgaaaggcacgggagtgcctgttggacaaaaaggcaccctccagtgcgaggccagcgcggtcccctctgcagaatttcaatggtacaaagatgacaagcgtctcatcgagggtaagaagggcgtcaaagtggagaatcggcctttcctgtcaaaactaatctttttcaatgtcagcgagcatgattacggtaattacacatgtgtcgcatcgaataagctgggccacactaacgcatcgatcatgctgtttggtgagactgtcctttag

SEQ ID NO: 232564 - DNA, 1035 bp, synthetic construct
  misc_feature 1..1035: note = Description of Artificial Sequence: Synthetic coding sequence
  source 1..1035: mol_type = other DNA
atgggagtgtgtggatatctgttcctgccatggaaatgcctggtggtcgtgtccctgaggctgctgttcctggtgccgactggagtgcccgtccgaagcggtgacgccacattcccaaaggcaatggataacgtaactgtgagacagggcgaaagcgctaccctgcggtgtaccatagacaatcgggttacacgcgtggcctggttgaatagatccaccattctctacgccggtaatgacaaatggtgtctcgatccccgtgtagtcctgttaagcaacacgcagacgcagtacagcatcgaaatacagaacgtggacgtctacgacgagggaccgtatacctgttccgttcaaacagacaatcaccctaagactagccgtgttcacctgatagtgcaagtgtcgccaaagatcgttgaaatttcgtctgacatctctattaacgagggaaacaacatatctctaacctgtattgcaactggcagacctgagccaacggtaacttggcgccacatctccccaaaagcagtcggattcgtgagtgaagacgagtacctagagattcaaggcattacccgggagcaaagcggcgattacgaatgctccgcctcaaacgacgtagccgctcctgtcgtgaggcgtgtcaaggttaccgtgaactaccctccctacatatccgaagccaagggtaccggggtgcccgtgggccagaaagggaccttacagtgcgaggctagcgcagtaccatcagcagagtttcaatggtacaaggatgacaagagattgatcgagggaaaaaagggcgtgaaagtcgagaataggccttttctgagtaaactgattttcttcaatgtctctgaacacgattatggaaattacacctgcgtcgcttctaataagctggggcataccaatgcttcgatcatgctctttggacctggcgcagtgagtgaagtgagtaacggaacgagtagacgagctggatgtgtgtggctgttaccgctcctcgtgctccacctgttgctcaagttctag

SEQ ID NO: 232565 - DNA, 1035 bp, synthetic construct
  misc_feature 1..1035: note = Description of Artificial Sequence: Synthetic coding sequence
  source 1..1035: mol_type = other DNA
atgaaaaccatccaacctaagatgcataactccatcagttgggccatctttaccggcctagcagcactctgcctgttccaaggagtacccgtccgatcaggggacgctacgtttcctaaggccatggataacgtaacagtccgacagggggagtctgctacattgcggtgcaccattgacaaccgcgtgacacgggttgcgtggttaaacaggtcaaccatcctgtacgcaggtaacgataagtggtgcctcgacccgagagtggtattactaagtaatacgcagacacagtattcaattgagattcagaatgtcgacgtctacgacgaaggaccctatacatgttctgttcagacagataatcaccctaagaccagccgcgtgcaccttatcgtccaggtctcaccgaagattgttgagatcagcagcgacatctcaatcaatgaggggaacaacatctcgctgacatgtattgccaccggacgccctgaaccgacagtgacttggcggcatatctcgcccaaggcggtcggctttgtctctgaggatgaatacctagaaatacaagggataacacgggagcagagcggcgactacgagtgttccgcgtccaatgatgtggctgcccctgtcgtcagacgagtgaaagtcacggtaaactacccgccttacatttctgaagctaaaggtaccggggtacctgtcggtcagaaagggaccctccagtgcgaagcctcggcagtccctagcgcggaattccagtggtataaagacgacaaacggctgatcgagggaaagaagggggttaaagtggagaacaggccttttttatccaagctgatctttttcaacgtatcggagcacgactacgggaattacacttgcgttgcctccaataagctgggccacaccaacgcctctatcatgttatttgggccaggcgcagtctcagaagtgagtaatggtacttcccgacgagccggttgtgtttggctgctgcctctgcttgtcctacacctgctgttgaaattttag

SEQ ID NO: 232566 - DNA, 1041 bp, synthetic construct
  misc_feature 1..1041: note = Description of Artificial Sequence: Synthetic coding sequence
  source 1..1041: mol_type = other DNA
atgaacggaaaacggaacggtgaaggcggaaagcgatggaagtggaaaggcaccggagtgcccgtgcgctccggggacgccacatttccaaaagctatggacaacgtcactgtgcggcaaggggagtctgccaccctgagatgtacaatcgataatagagtgacacgggttgcctggctcaacagaagtaccattttgtacgcaggaaacgataagtggtgtctggatcccagagtagtgctgttgtcaaacacccagacccagtatagcatagaaattcagaacgtggacgtttatgatgagggaccttacacctgtagtgtgcaaaccgacaaccacccaaaaacttcaagagtgcacctgatcgtgcaggtctcacccaagatcgtagagatctcaagtgacatcagcataaacgaggggaacaatatcagcttgacatgtatcgccactggaagacctgaacctaccgtaacctggcggcacatatctcccaaagcagttggattcgtatctgaagatgagtacctggagatccagggcatcacaagggagcaatctggggattatgaatgttccgctagtaacgacgtcgctgcccctgtggtcagaagggtcaaggtgactgtgaactaccccccttatatctctgaggcaaagggtacaggcgtgcctgttgggcagaagggaaccctgcagtgtgaagcctccgcggtgcctagtgccgagttccagtggtataaggacgacaagagactaattgaaggaaagaaaggagtgaaggtggaaaatcgaccctttctttccaaactcatatttttcaacgtcagcgaacacgattacgggaactatacctgtgtcgcctcaaacaagttaggacacacaaatgcctccataatgctttttgaggtgaagaccacagcactgacaccttggaaaggaccaggagccgtctcagaagtgtctaacggcacaagcagaagagcaggatgtgtgtggcttctgccgcttctggtcctacatctcctgctgaaattttag

SEQ ID NO: 232567 - DNA, 1068 bp, synthetic construct
  misc_feature 1..1068: note = Description of Artificial Sequence: Synthetic coding sequence
  source 1..1068: mol_type = other DNA
atgaaaacaattcaacctaaaatgcataacagtatcagctgggcaatctttacagggctggccgcactctgtttgttccagggcgtacctgtgagatcgggtgacgccaccttcccaaaggctatggacaacgtgaccgtgcggcagggcgagtcagccactcttaggtgtacgatcgataaccgtgtcactcgggttgcctggctgaacaggagcacaattctttacgccggtaacgataagtggtgcctggacccacgtgtggtgctcttatcaaatacccagacacagtactccatcgagatacagaatgtagatgtctacgacgagggcccatatacctgttctgtgcagactgacaaccatcctaagactagtcgcgttcacctcatagtgcaggtgtcccctaaaatcgtggaaatttcatcagacatatcaatcaatgagggcaataatattagtctgacttgtatcgccactgggagaccagaacctaccgtgacctggcgccacattagcccaaaagccgtgggctttgtatctgaggacgaatatctggagatacaaggcatcacccgagaacagtcgggtgattatgagtgctcagcttccaacgacgtagcagcacccgtggtacgtcgggtgaaggttactgtcaactatcccccttatatttcagaggccaaaggaaccggcgttcccgtcggccagaaaggcaccctgcaatgtgaggccagcgccgtcccatccgctgagtttcaatggtataaagacgacaagaggttaattgagggaaagaagggggtgaaagtagaaaaccggccattcctgtctaagctgatcttctttaatgtctctgagcatgactacgggaactacacctgtgtggcttcaaataagctgggacacacaaatgcttcaattatgctgtttgaagtgaagaccacggccctgacaccttggaaaggtcctggggcagtgagcgaagtaagcaatgggactagtaggcgcgctggttgtgtatggctgctgccgctgctggtgctacatctgctcttgaaattctag

SEQ ID NO: 232568 - DNA, 1068 bp, synthetic construct
  misc_feature 1..1068: note = Description of Artificial Sequence: Synthetic coding sequence
  source 1..1068: mol_type = other DNA
atgggagtgtgcgggtacctgttcctcccctggaaatgcctagtggtagtctcactgcggctcctgtttctggtgcctactggagtccctgttagatctggcgatgcgactttcccaaaagcaatggataacgtgacagtgcgtcagggagagagtgctacccttcgctgcacaatcgataaccgcgtaactagggtcgcttggttaaacaggagtacaatactgtacgcaggtaacgataagtggtgtctagacccacgtgttgttctcctttccaacacccagacgcaatatagcatagagatacagaatgtggacgtctacgacgaagggccttacacgtgttcagtccagactgataaccaccccaaaacttcacgcgtacatctcatcgtgcaggtgtcgcctaagatcgtggaaatttcctcagatatatccattaatgagggcaacaacataagcctgacttgcatagccaccggcagacccgaacctaccgtgacatggagacacatctctcccaaagcagtggggtttgtctccgaagatgaatacctggaaatacaagggattactcgcgaacagagtggagactatgaatgctcagcctctaatgacgtggccgcaccagttgtaagaagagtcaaggtgacagtgaactatccgccttatatcagtgaagctaaaggaacgggtgtgcctgtcggccagaaaggtaccctgcaatgtgaagcatccgctgtgccatctgcggaatttcagtggtataaggatgataagcgcctgattgagggcaaaaaaggggttaaggtcgagaatcggcctttcctctcaaagcttatattctttaatgtgtcggagcacgattacggaaactacacctgcgtggcctctaataagttaggccacaccaatgcctcaatcatgttgttcgaggtgaaaaccacagccttgactccctggaaagggcctggcgcagtgagtgaagtttctaacggtacctcccgccgagcaggatgcgtgtggctgctccctctgctggtgctacacctgttgctcaagttctag

SEQ ID NO: 232569 - DNA, 2373 bp, synthetic construct
  misc_feature 1..2373: note = Description of Artificial Sequence: Synthetic coding sequence
  source 1..2373: mol_type = other DNA
atgctaagaggtggacggagaggccaattggggtggcactcttgggccgcaggccctggatctcttttggcatggcttatcctggcatcagccggagccgcaccatgtccagatgcctgctgtcctcacggctccagtggattgcggtgtaccagggacggggctctagacagtctgcatcacttgcctggagccgagaacctcacagaactctacattgagaaccagcagcatttacagcatttagaactcagggatctgcgcggtctcggtgagctccgtaacctcactattgtcaaaagtggcctcaggtttgtggcccctgacgccttccacttcacgccacggttgtcaagactaaacctgtccttcaatgccctggagtcacttagctggaaaaccgtccaggggctctcactgcaggaattagtgctgtctggcaatccattgcattgcagctgtgctcttcgatggcttcagcggtgggaagaggaggggctagggggtgttcccgagcagaaacttcagtgccacggccagggacctctcgctcacatgcctaacgcttcgtgcggcgtgcccactctgaaagtgcaggtcccgaacgctagtgtcgatgtcggagacgacgtgctgctgaggtgtcaggtagaaggcagaggactggagcaggctggatggatcctgaccgaattggaacagagcgccactgtgatgaagagcggcggactgcccagcctcggactgacgttagcaaacgtgacctcagacctcaatcgcaagaacgtgacctgctgggctgaaaacgatgtggggagggcagaagtgagtgttcaggtgaatgtctccttccccgcaagtgtgcagctccacacagcagtcgagatgcatcattggtgcattcccttctccgtcgacggccaacctgcccctagcctcagatggctgtttaatggttctgtactgaatgagacttctttcattttcactgagttcctggaaccggctgcgaacgaaactgttaggcatggctgtttaaggcttaaccagccaactcacgtgaataatggaaactacaccttgttagccgctaacccttttggacaggccagtgcatccattatggccgctttcatggataacccctttgagttcaatcccgaggatcccattccagacactaattcgactagcggagacccagtagagaaaaaggatgagacacccttcggggtgtctgtcgcagttggactagctgtgtttgcatgcctcttcctcagtaccctcttgctggtgcttaacaaatgcggaagacgcaataagttcggcatcaaccggccagccgtcttggctccagaggatggacttgccatgagtctgcattttatgacactaggcggttcatccctgtcccctaccgagggcaagggctccgggctccaaggccacattatagagaatccgcagtatttttcagatgcttgcgtccaccacatcaaacgtcgggacattgtcctcaagtgggagctcggtgagggggctttcggcaaggtattcctggccgagtgccataacctgttacccgagcaggacaaaatgctggtggcagtaaaggccctgaaagaggctagtgaaagtgcgcgtcaggacttccaacgcgaagccgagctcctgactatgctccagcaccagcatatcgtcagatttttcggtgtatgcaccgagggacgcccacttctgatggtgttcgaatacatgagacatggagatcttaaccggttcctgagatcacacggccctgacgctaagttgctagccggaggggaagatgtagctcctggtccccttggactgggtcaactgctggcagtagcgagccaagtggctgcgggaatggtctacctggcgggactgcatttcgtccatcgcgatctcgcaacaagaaattgtctggtggggcaggggctggtggtgaaaataggcgactttggaatgagccgcgatatctattccacagactactaccgcgttggtggcaggacgatgctgcctatcagatggatgcctccggagtctatcttgtataggaaattcacaaccgaaagcgacgtctggtcattcggggtggttctctgggaaatctttacttatggcaagcagccatggtaccagctcagtaacaccgaagctatagactgtatcactcaaggccgtgagctagagcgacctagagcttgtcctcccgaggtctacgccataatgaggggatgctggcagagggagcctcaacagcgtcacagcatcaaagatgtacatgcccgtttgcaagcactggcgcaggcccctcctgtgtatttggacgtcctagggtag

SEQ ID NO: 232570 - DNA, 2283 bp, synthetic construct
  misc_feature 1..2283: note = Description of Artificial Sequence: Synthetic coding sequence
  source 1..2283: mol_type = other DNA
atgaaggaggctgctctcatatgccttgccccaagcgtgcctcctatcttgactgttaagtcgtgggacaccatgcagctacgtgcagcacgcagtagatgcacaaacttactggcggcttcatatatcgaaaaccaacagcatctgcaacacttggagctaagggacttgagggggctgggtgagctccgcaatcttactattgtcaaatcgggtctgcgcttcgtggccccagatgctttccatttcacccccaggctgagtaggttgaacctttcattcaatgctctcgagagcctgagttggaagaccgttcagggcctctccctgcaagaacttgttttgtcaggtaacccccttcactgctcttgcgctctccggtggctgcagcggtgggaagaagaaggtctaggaggagtgcccgaacagaagttgcagtgccatgggcaaggaccccttgcccacatgcccaatgcttcttgcggcgtgccgactctaaaagtgcaggtaccgaacgcctccgtagacgtgggcgacgacgttctgcttaggtgccaggtagaggggcgtgggcttgaacaagccggatggattctgactgagctggagcaatcagcgactgttatgaaaagcggcggtctcccaagcttaggcctcacactggccaatgtaactagcgatctgaaccgtaaaaacgtgacttgctgggccgaaaatgatgtgggaagagccgaagtgtctgttcaggtgaatgtgtctttccctgcgagcgttcagctgcatactgcagtagaaatgcatcattggtgcatccccttctctgttgacggacaaccagccccatcccttcgctggttgtttaatggatccgtgttaaatgagacaagttttatattcacagaattcctggagcctgctgcgaacgagacagttcggcacggctgcctccggctgaatcagcccacccacgtgaacaacggcaattacacattgctggcagcgaatcctttcggtcaggcatcggcttccattatggcagcgtttatggacaatccctttgaatttaatccagaggacccaatacctgatactaactctacgtcaggcgatcctgtcgagaagaaggatgaaacgcctttcggcgttagcgtggcggtgggtctggcggtgtttgcctgtctgtttctttccaccctcctgctggtgttgaacaagtgtggtagacggaataagtttggtattaacagaccggcagtccttgcgccagaggacggacttgctatgtcattgcactttatgactttgggtgggtcttcgctctccccaacggagggaaagggcagcgggctgcaaggtcatattatcgaaaaccctcagtacttctccgacgcctgtgtgcatcacattaagcggagggacattgtgctgaaatgggagctcggagaaggggctttcggaaaggtgttcctggccgaatgccacaatctactgccggaacaggataaaatgttggttgcggtcaaggccctaaaagaagcctcggagtctgcacgccaggattttcaacgggaggcagagctgcttacaatgttgcaacatcagcatatcgtgaggttctttggcgtatgcacagagggtcggccattactgatggtgtttgagtatatgagacacggagacctgaaccgcttcctacgttcccatggacctgacgccaagctcctggctgggggtgaagacgtggcccctggcccattggggttggggcagctgcttgcagtagcttctcaggttgccgctggtatggtgtatcttgcgggactgcatttcgtgcaccgcgatctggcaacaagaaattgtcttgtcggtcaaggtctcgtcgtgaagataggcgacttcggaatgtcacgcgatatctattctaccgattactacagggtagggggtagaaccatgctaccgatccgatggatgccaccagagtcaattctctatcggaaattcactactgagtccgacgtttggagctttggtgtggtgctatgggagatattcacatatggtaaacagccctggtatcagctttcaaacacggaggcaattgattgtattacccagggcagggagttggaacgccctcgcgcatgcccacctgaggtgtacgcaattatgaggggatgctggcaaagagagccccagcagaggcacagtattaaggacgttcatgccaggctgcaagctttggctcaggcaccaccagtgtaccttgatgtcctcggttag

SEQ ID NO: 232571 - DNA, 2391 bp, synthetic construct
  misc_feature 1..2391: note = Description of Artificial Sequence: Synthetic coding sequence
  source 1..2391: mol_type = other DNA
atgctgcgaggaggacggaggggacagttggggtggcatagctgggcggcaggccctgggtcactgctagcatggctcatcctagcttctgctggcgctgctccgtgccctgatgcttgctgcccccacgggtcctccggactccgctgtacacgtgacggtgccttggacagcctgcaccacctcccaggggcagagaatctcacggagctgtacatagagaatcagcagcaccttcagcaccttgaactgcgcgacctccgaggcttgggcgaattaaggaacctgactatagtgaagtccggactgcgctttgtggccccagatgcatttcatttcacaccaagactttctagattgaatctgtctttcaatgctctcgagtcactgagctggaagacggtgcaaggactttcgttgcaggaactggtgctgtctggcaacccactccattgcagctgcgcccttcgctggctgcagcggtgggaggaagaaggccttggaggggtcccagaacagaagctgcagtgccatgggcagggacccctcgcgcatatgcccaacgctagctgcggcgttcccacattgaaagtgcaagttcccaatgccagtgtggatgttggcgatgacgtgctgttgcgatgtcaggtagagggccgtggcctggaacaggctggttggatcttgactgagctcgaacagagtgcaacagtgatgaaatccgggggattgccctctcttggtcttacgttagccaatgtgacatccgatctcaacaggaagaacgtcacgtgttgggccgaaaacgacgtggggagggcagaagtgtccgtacaggtcaatgtgtcattccccgcatcagtgcagctgcataccgctgtagagatgcaccactggtgtatccctttctctgtggatggacagcctgccccttccctgcggtggctatttaatggatctgtactaaacgagacgtccttcatttttacggagttcctggagccggctgccaacgaaaccgtaaggcacgggtgtctgcgacttaatcagcctacacacgtaaacaatggcaattatacactgctggcagctaacccattcggtcaggcatcggccagcattatggctgcctttatggataacccattcgagttcaatcccgaggatcctatcccagtgtcgttctctcccgtcgataccaactcaacttccggggaccccgttgagaagaaagatgaaacccccttcggagtaagcgttgcagtcggacttgctgtgttcgcctgtctattcctttctactctactactcgttttgaataaatgcggcaggaggaataagttcggcattaatcggccagccgtgctggccccagaggatgggctcgcaatgtcccttcactttatgactctgggtgggtcaagcttatcccccacagaagggaagggcagtgggctgcagggccatatcatcgaaaatcctcagtacttcagcgacgcgtgcgtccaccacatcaagcgccgtgacatcgtgctcaaatgggaactcggtgagggggctttcgggaaggtatttctggctgagtgtcataatctgctgcccgagcaagataaaatgctggtggcagtgaaagctctaaaggaggcttctgaatctgctaggcaagattttcaaagggaagcagagctgttgacaatgctgcagcatcagcacatagtgcgatttttcggggtttgcaccgaggggcgacctctccttatggtatttgagtacatgcgtcacggagacctgaatcgctttctgaggtcgcacggaccagatgccaaactgcttgccggaggggaagatgtggctcctggcccactagggttgggccagctccttgcagtcgcaagccaggtcgctgctggaatggtgtacctggcgggtttacactttgtacatcgcgacctcgcaactaggaattgtctggtggggcagggtttagtggtgaagatcggagactttggcatgtcccgagatatttacagtaccgactactaccgggtcggaggacggaccatgctgccaatccggtggatgcctcccgagtctatcctgtacaggaaattcactaccgagtcagacgtgtggagctttggcgtggtgctgtgggaaatctttacatatggcaagcagccttggtatcagctctcaaatactgaagcaattgattgtattacccaggggagggaactggagcggccacgggcttgtcctccagaggtttatgctatcatgcggggatgctggcagagagaacctcagcaacgccactccattaaggatgttcatgccagacttcaggccttggcccaggcccctccagtgtacctggacgtgctggggtag

SEQ ID NO: 232572 - DNA, 2517 bp, synthetic construct
  misc_feature 1..2517: note = Description of Artificial Sequence: Synthetic coding sequence
  source 1..2517: mol_type = other DNA
atgtcaagttggatccgttggcacgggcctgccatggcacgactttggggcttctgctggctcgttgtgggattctggcgcgcagcattcgcgtgccctactagctgcaagtgctccgcgagtcgtatttggtgtagtgatccttcacccggaattgtggcattcccaagactcgagcctaactccgtggaccccgaaaatatcacagagatattcatcgccaaccagaaacgtctagaaatcattaatgaggatgatgtggaagcttacgtcgggctccgtaacctgacaatcgtggatagtggactgaaattcgtggcccataaggcttttctaaaaaactcaaatctccagcacattaattttacacggaataaactcacaagcctttcacgcaagcactttcgccacctggacttgtccgagctgatcctggtggggaacccgttcacttgctcctgcgatattatgtggatcaaaaccctacaagaggcgaaatctagtcccgacacccaggatttatattgcttgaatgagtcaagcaaaaacataccactcgcgaatttgcagatcccgaactgtggcctcccaagcgccaatctcgcagctcccaacctcacagttgaagagggtaagagcatcaccctctcctgttccgtggccggagatccagtccctaacatgtattgggacgtgggcaacctggtaagtaaacacatgaacgaaacctcacatactcaggggtctttgagaattaccaacatctcatctgacgattcaggcaaacaaatctcttgtgtagcagaaaatcttgtcggagaagaccaagattccgtaaatctcacggtacattttgcccctacaattactttcctggagagcccaacctcagatcaccattggtgtatcccattcacagttaaaggaaaccctaagccagcactgcagtggttttataacggcgcaatactgaacgagagcaagtacatttgtacgaaaatccacgtaacgaatcacacagaatatcacggatgcctccaactggataatcctacccacatgaataacggagattatacgctgatagctaaaaacgaatacggcaaagacgaaaagcaaatttctgcccactttatgggatggcccggaatcgacgacggggctaatcccaattatcctgacgtcatatatgaggactatggcacggcggcaaatgatatcggcgacaccaccaatcgcagtaacgaaatcccatctacggacgtgacagataagacaggcagagaacacctgagcgtgtacgctgtggtcgtcattgcctcagttgtaggattctgtttgctagtcatgttgttccttctcaagcttgctagacactccaagttcggtatgaaggacttttcctggttcggattcgggaaagtgaaatcaagacagggagtgggacccgcttccgtgattagcaacgacgatgattctgcatctccactgcatcacataagcaacggatctaacactccttctagctccgaaggcggacccgacgcggtcataatcgggatgactaagattcctgtcatcgagaacccccagtactttggaattacaaattcacagctcaagcctgataccttcgtccagcacattaagcgccacaacatcgtgctcaagcgcgagctgggcgagggtgcctttgggaaggtctttctggccgaatgttacaacttgtgcccagagcaggacaagattctggtggccgtcaagacgctcaaggacgcttctgataatgcccgaaaagacttccaccgcgaggccgaactgctgactaatctccagcatgaacatatagtgaagttctatggcgtttgtgttgagggcgatcccctgataatggtatttgagtatatgaaacatggggatctcaataaattcctccgcgctcacgggcctgatgcggttctgatggccgaggggaacccccctacagagctcacccaatctcagatgctccacattgcccagcaaattgcagcaggtatggtgtacctggcctctcagcatttcgtgcatcgagatttggccactcgaaactgcctggtgggagagaatctcctggtgaaaatcggggacttcggcatgtctagggacgtttattctactgactattatcgggtgggcggacacaccatgctgccgattcgttggatgcccccagagtcaattatgtatcgcaaatttaccaccgaatcagacgtgtggtcgttaggcgtggtcctatgggagatcttcacgtacggaaaacagccttggtatcagttatcaaataatgaggttattgaatgcatcacccaaggcagggtgcttcagcgcccaagaacctgtccccaggaggtgtatgaacttatgctaggttgttggcaaagggagccacatatgaggaagaacattaaaggaattcacacacttctgcagaatctggcgaaggcctcaccagtctacttggatatcctgggatag

SEQ ID NO: 232573 - DNA, 1662 bp, synthetic construct
  misc_feature 1..1662: note = Description of Artificial Sequence: Synthetic coding sequence
  source 1..1662: mol_type = other DNA
atgtcctcatggattcgctggcacgggccagccatggctagactgtggggcttttgttggctggtcgtgggattttggcgcgcagccttcgcctgccccacttcttgtaagtgctctgctagcagaatatggtgcagcgacccatccccgggtatagttgcatttcctcggcttgaacccaacagcgtcgacccagaaaacatcacagagatattcatcgctaatcagaagcgccttgagatcattaacgaagacgacgtggaagcttacgtgggactgagaaacctgactatcgtcgatagcggactgaaatttgtggcccacaaagctttcctcaagaattccaatttacagcacatcaatttcacaaggaacaagctcacatctctgagcaggaaacatttccggcatctcgatctcagcgaactgatactggttggtaatccatttacctgctcgtgtgacatcatgtggatcaagactttacaggaggcaaagtcctcccccgatacgcaggacctgtactgtttgaatgagagtagcaaaaatatccctctagctaacctgcagatccccaattgcggactcccatcagccaacctggcagctccgaatttaacagtagaggaaggtaagagtattactctgtcctgttcagtggccggagatcccgtgcccaatatgtactgggacgttggcaacctagtgagcaaacacatgaacgagaccagccacacccagggcagtttaaggattacgaacatcagctctgacgatagcgggaaacagatcagctgcgtcgccgaaaacctggtgggcgaggaccaggatagtgttaatctgaccgttcattttgccccaaccattacttttctggaaagcccaacaagcgaccatcactggtgtatacccttcaccgtgaaagggaatccaaagcctgcactgcagtggttctataacggagctatactgaatgagtccaaatacatttgtacgaagatccacgtgaccaatcacactgagtatcatggatgcctacagctggataatccaacccatatgaataatggagattatacgctgatcgctaaaaatgaatacggaaaggatgagaaacaaattagcgcccattttatgggttggcccggaattgatgacggcgcaaatccaaattaccctgacgttatctacgaggattatgggacggccgcaaatgatattggggacactaccaatcgaagcaatgaaatcccctcaactgatgtgaccgataagaccgggagggagcatttgagtgtgtacgccgtcgtggtgatcgcatcagtagtgggattctgcctgctggtcatgctattcttgctaaaactggccagacacagtaagttcggcatgaaggacttctcctggttcggatttgggaaagtcaaatcccgccagggggttggcccagccagcgtgatcagcaacgatgacgatagcgcttcccctctgcaccatatctctaacggaagtaacaccccatcgtcctcagagggaggccctgatgcggtgatcataggtatgaccaaaattcccgtcatcgagaacccgcaatacttcggtataaccaatagtcagttaaagccagatacttggccgagaggttctcccaaaacggcatag

SEQ ID NO: 232574 - DNA, 2469 bp, synthetic construct
  misc_feature 1..2469: note = Description of Artificial Sequence: Synthetic coding sequence
  source 1..2469: mol_type = other DNA
atgagctcatggatccgatggcatggaccagccatggctcgattgtggggcttttgctggctggtcgtcggcttctggcgcgctgcttttgcttgtcccacctcgtgtaagtgctccgccagccgcatctggtgctccgatccgtcacccggaattgtagcgttcccaagacttgaaccaaactcagtcgatcctgagaacatcactgagattttcattgccaaccagaagcgcctggaaatcatcaacgaagatgatgtcgaggcatatgtgggcctgcgcaatctgactattgttgacagtggactgaaattcgtcgctcacaaggcctttctgaaaaactctaacctgcagcatatcaatttcactcggaacaagctgacaagtctaagccggaaacacttccgacatctcgatctgagtgagctgattctggtgggaaacccgttcacctgcagctgtgatattatgtggattaaaacactccaggaggcgaagagctcccctgatacacaggatctgtactgtctgaatgaatctagcaaaaatatcccgttagccaatctgcagattcccaactgtggcctgccatctgccaatctcgcggctcctaacttgaccgtcgaggagggaaaatcaattaccctctcatgtagcgtggcaggagaccccgtgccgaacatgtactgggacgttggcaatctggtcagtaagcacatgaacgaaaccagtcatactcagggatctcttcgcatcactaacatctcttcagacgattccggtaaacagatatcctgcgtggccgaaaaccttgtgggcgaagatcaggactcagtcaacctgacagttcactttgctcctacgatcacttttctggaaagccctacctctgatcaccattggtgcattcccttcacagtcaagggcaatccaaagcctgctcttcagtggttctataatggcgctatcctcaatgaaagcaaatatatatgtaccaagattcacgttacaaaccatacggagtaccacggctgcctgcagttggataaccccacacacatgaataacggggactacaccttaatcgcgaagaatgagtatggtaaggatgagaaacaaattagcgcccatttcatggggtggccgggaattgatgacggtgcaaatccaaactacccagacgttatttacgaggactacgggacagccgctaatgacatcggtgataccaccaaccggtccaatgagatacctagtactgacgtcaccgataaaactggccgagagcatctgtctgtgtatgccgtcgtagtaattgccagcgtcgtgggattctgccttctcgtaatgctgtttttgctgaaactggccagacactcaaagttcggcatgaagggaccagcctccgtgatatcaaatgatgacgacagtgcatcccctttgcatcatatatctaacggctctaacacccctagttcatccgaaggcggtcctgatgcagtgatcattggcatgacgaaaattcccgtgatagagaacccacaatactttggcattactaacagtcagcttaagccagatacatttgtgcagcacataaagcggcacaatattgtgctgaagagagaactcggcgagggcgctttcggaaaagttttcctggcggagtgttacaacttatgccctgagcaagataaaatactcgtggctgtcaagactctgaaggatgccagcgacaacgctaggaaggacttccaccgagaggctgaattgcttactaacctgcagcacgagcacattgtgaagttctacggtgtctgtgtagagggagaccctctgattatggtattcgaatacatgaagcatggagatctcaataaatttttgagggcacatggccctgatgcagtcttaatggccgaaggtaatcctcccacagagcttacccaatcccagatgctacatatagcccaacagatagccgcaggcatggtgtatctcgcatctcagcacttcgtgcacagggaccttgccaccaggaactgtcttgtaggagaaaatctgttggttaaaatcggagactttggaatgtccagagacgtctatagtacggattattatcgtgttggtggccacaccatgcttccaattcgctggatgccgccagagtcaataatgtatagaaaatttaccaccgagagtgatgtgtggagcctgggggttgtgctgtgggagatatttacttatggtaaacagccttggtaccaactgtcaaacaacgaggtcatagagtgcattacccagggccgagtgctgcagagacctcgcacgtgccctcaggaagtctacgagttaatgctgggctgttggcaacgtgagccccacatgcgaaagaatattaaaggcatccacaccctcttacagaatctcgctaaggcctcacccgtgtatcttgacatcttgggctag

SEQ ID NO: 232575 - DNA, 1434 bp, synthetic construct
  misc_feature 1..1434: note = Description of Artificial Sequence: Synthetic coding sequence
  source 1..1434: mol_type = other DNA
atgagctcatggattcgatggcatggccctgctatggctagactatggggtttctgctggcttgttgtcggattctggagagccgcttttgcgtgtccaacatcgtgcaagtgttcagcatctcgtatttggtgtagtgatccttcccccggtatcgtggccttccctcgccttgagcccaatagcgtcgaccccgagaacatcacggagatctttatagccaatcagaagagactcgaaatcattaatgaagatgacgtcgaggcctacgtgggtcttagaaatctgacaatcgttgattcaggcctcaaattcgttgcccacaaggcgttcctaaaaaattccaacctacagcacatcaactttactagaaataaattaacttctctttcaagaaagcattttcgccatctggatctttctgagctcattctggtgggaaacccgttcacatgctcatgtgatatcatgtggatcaaaacactgcaggaggccaagagctccccagacactcaagacctatactgtctgaacgagagttcaaagaacattcctttagccaacctacagattcctaactgcggtctgccatcagcaaacctcgcggcacctaatcttacggtagaggagggcaagtccatcacactgagttgcagcgtcgcaggagatcccgtgccaaatatgtattgggacgtcggcaatctggtgtcaaaacacatgaatgaaacatcccatacgcagggatctctccgcattaccaatatctctagtgacgactctggcaagcaaatttcatgcgtggcagaaaatctggttggcgaggaccaggatagcgtcaacctgactgttcattttgctcccacaattacgtttctggagtctcctaccagtgatcaccactggtgtatacccttcacagtgaagggtaatcccaagccggcactacagtggttttacaatggcgcaattctgaatgaatccaaatacatctgcacaaagatccacgtcacaaaccacaccgaataccacggctgtttacagctagacaaccccacacacatgaataacggagattatactcttattgctaaaaatgaatatggtaaggacgagaagcaaatttccgcacacttcatggggtggcctgggatcgatgacggcgctaacccaaactaccccgacgtcatatacgaggactatgggacagccgcaaatgatataggtgataccacaaacaggtcaaacgaaattccctccaccgacgtgaccgacaagacaggccgtgagcacttgtctgtttatgcagtggttgtcattgcctcagtggtcggcttttgtctgctggtaatgctgtttttgcttaaactggcacgtcattccaagttcggtatgaaagggtttgttcttttccataaaatacctctagatggatag

SEQ ID NO: 232576 - DNA, 1614 bp, synthetic construct
  misc_feature 1..1614: note = Description of Artificial Sequence: Synthetic coding sequence
  source 1..1614: mol_type = other DNA
atgtcatcctggatcaggtggcacggccctgcaatggccagactctggggcttctgctggctggtcgtggggttctggcgagctgcgttcgcgtgccctacatcgtgtaagtgctccgcttcccggatctggtgttccgaccccagccccggaatcgttgccttccctcgactggaacccaatagcgtcgatcccgaaaatattacagagatcttcattgcaaatcagaagcggctggagatcataaacgaggacgatgtggaggcctatgtgggcctccggaacctgaccattgtggactccggactgaagttcgtcgctcacaaagcctttttgaagaacagcaacctccagcatataaatttcacgcgcaacaagctgaccagtttaagcagaaagcatttcaggcatttggatctgtccgaattgatacttgttggtaatccatttacatgcagctgcgatatcatgtggataaagactctgcaggaggcaaagagctcacccgatacacaagacctgtattgccttaacgagagctctaagaatatcccactcgccaacctgcagatccctaattgcggattgccttccgcaaacctggctgcccctaatctaaccgttgaagaaggtaagagtattacgctgagttgtagcgtagccggagaccctgtgcctaacatgtattgggatgtaggcaacctcgtgtcaaagcatatgaatgagacgagccatacgcagggctctctccgaatcacaaacatcagctccgacgatagtgggaaacagataagttgcgtcgctgagaatctcgtgggcgaagatcaggactctgttaacctaaccgtgcatttcgcccctacaattacctttttggaatcccctactagcgaccatcactggtgcatccccttcacagtgaaaggaaatcctaaacccgctctccaatggttctacaatggtgcaatcctgaacgagagtaagtatatttgtacaaagatccatgtgactaatcataccgagtaccacgggtgtctacagcttgataaccccacccacatgaacaacggtgactacactcttatagcgaagaacgagtacggaaaggatgagaaacaaatttccgcccacttcatgggatggcctggcatcgatgacggtgctaacccgaattatccagatgtgatttatgaggactatggaaccgcagcaaacgacataggtgataccacaaacagatcaaacgagatcccatctacagacgtcacagataagacagggcgagaacaccttagcgtgtacgcagtcgtcgtgatcgcatccgtcgtgggcttttgtttacttgtaatgctctttcttctgaaactcgccagacattccaaatttggcatgaagggaccagcaagcgtcatctccaacgacgacgacagcgccagtccactgcatcacatatcaaatggatctaacactccatcgagtagcgaagggggtccagacgcagtgatcattggtatgacaaagatcccagtcatcgagaatccccagtatttcgggatcaccaacagtcagctcaaacctgacacttggcccaggggcagtccaaagaccgcttag

SEQ ID NO: 232577 - DNA, 2469 bp, synthetic construct
  misc_feature 1..2469: note = Description of Artificial Sequence: Synthetic coding sequence
  source 1..2469: mol_type = other DNA
atgagcagttggatacggtggcatggtcccgctatggccagactatggggcttctgctggctggtggtcggtttttggagagcagccttcgcgtgcccaacttcgtgcaagtgttccgcaagccgtatttggtgttcagacccatcccccggaattgtagctttccccaggctggagccaaatagtgtcgatcctgaaaacatcactgagatctttattgctaatcagaagaggctggagatcattaacgaggacgatgtggaagcctacgtgggactgaggaatctcacgatcgtcgacagtggattgaaattcgtagcacataaggcgttcctcaagaattccaatttacaacatatcaattttacaagaaataagctcacatctctctcccggaagcatttccgtcatttagatctctcagagctcattctagtgggcaacccattcacatgcagctgcgacattatgtggatcaaaaccctacaagaggccaagtcatcccctgacacccaggacctctattgtttgaacgagagctcaaagaacattccgctggcaaatttgcagattcccaattgtgggctgccttccgccaacctggccgctcccaacttgaccgttgaggaaggcaaatcgatcacgctgtcatgttcagtggccggtgatccagtcccgaatatgtactgggatgttgggaacctagttagtaagcatatgaacgagacctctcacacccaggggagcctacggataacaaacatctcctcagatgactccgggaaacagatctcatgtgtggccgagaatctggtgggggaggaccaagattccgtgaatctaacagtgcactttgctcccacgataacctttctggaaagtcctaccagtgaccatcactggtgtatccctttcactgttaaaggtaaccctaagcccgctctacagtggttttacaatggggctattctgaatgagtccaagtatatatgtaccaagattcatgttactaatcacactgagtatcacggatgtctgcaattagataatccaacacatatgaataacggtgattacactcttatagctaaaaacgaatacggcaaggacgagaagcagatcagcgctcacttcatgggctggcctggtatcgacgacggggcaaacccaaattaccccgacgtgatctatgaggactatggcacagcagctaacgatattggtgatactacaaaccggagcaacgagataccctctacagatgtcacagacaagaccgggagggagcacctgtccgtgtatgcagtcgtcgtgatagcctcagttgttggtttctgtctgctcgtgatgttgtttctcctgaagctcgctaggcactcgaaattcggcatgaagggcccagcatcagttatttccaatgatgatgattcagcatcacccttgcaccacatatccaatggaagcaacaccccttcatcaagcgagggaggtccagatgccgtaatcataggtatgacaaagatcccagtgatcgaaaacccccagtacttcgggattactaacagccaattgaagcccgacacattcgtgcagcatatcaaacggcacaacatcgtgctgaagagggaactcggggagggagcgtttggtaaggtcttcctcgccgagtgttataacttgtgtcctgagcaagacaagatcctagtcgctgtgaagacgctaaaagatgccagcgataatgctagaaaagacttccaccgagaggctgagctgttgaccaacctgcagcatgaacatatcgtgaaattctacggcgtgtgtgtcgaaggggatcccctaattatggtcttcgagtatatgaaacatggcgatctgaataaattccttcgggctcacggacctgatgccgtgcttatggcagaaggaaacccacccacagagttgacccaaagtcagatgctgcacatcgcacaacaaattgctgcaggcatggtctacctggcgtcccaacacttcgtgcacagggatctcgccacccggaactgcttggtaggcgagaacctgctggtgaaaatcggtgactttggtatgagtcgagacgtatacagtacagactactacagagtgggaggccacactatgcttcccattagatggatgcctccagaatccatcatgtaccgcaaatttaccacagaatcagatgtatggagtctgggcgtggtcctgtgggagatttttacctacggaaagcagccctggtatcagctcagcaacaatgaggtgattgagtgcatcactcaggggcgagtcttgcaacggccacgtacatgtccccaggaagtgtatgaactgatgcttggctgctggcagcgtgagccacacatgaggaaaaacatcaaagggatacacacgctgcttcagaatttagccaaggccagcccagtctacctagacatactggggtag

SEQ ID NO: 232578 - DNA, 2517 bp, synthetic construct
  misc_feature 1..2517: note = Description of Artificial Sequence: Synthetic coding sequence
  source 1..2517: mol_type = other DNA
atgtcgtcgtggattcgctggcatggtcccgctatggctcgcctctggggcttctgctggcttgtggtgggattttggcgagccgcatttgcatgtccaacatcctgtaaatgcagcgcttcgcgtatatggtgttccgacccgtcgcctggaatcgtggcattcccaagactggagccgaactcagtagaccctgagaacataacagagattttcatcgcaaatcagaaaaggctcgaaattatcaatgaagatgacgtcgaagcttatgttgggctcaggaacctgacgatagtggattcaggtctcaagttcgtggcccacaaggcattcctcaagaactcaaacctgcagcatatcaatttcactagaaataaactgacctcattgagtagaaaacacttcagacatctggatctcagtgaattgatcctcgtggggaaccccttcacttgctcctgcgatatcatgtggataaaaacactccaagaggctaagagttcaccagatacccaggatctgtattgtcttaatgagagtagcaaaaacatccccttggctaatctccaaatccctaactgcggattaccttccgccaacctagctgcccctaatctgactgtggaagaggggaagtcaattactttaagttgttctgtggcaggtgaccctgtgccaaacatgtattgggatgttggcaacctggtcagtaaacacatgaacgagacctctcacactcaaggttctctccgaatcactaacatctccagcgatgactcgggtaagcaaatttcctgtgttgctgaaaaccttgtcggcgaagaccaggacagcgtcaatctcacggtacactttgctccaacaatcacattcctggaatcccctacttcagaccatcactggtgtattccatttactgtgaagggaaaccccaaaccagcacttcagtggttctataacggcgcaattctgaacgaatccaagtatatctgcaccaagattcacgtgaccaaccatacggagtaccacggctgtctgcagttggacaatccaacgcatatgaataacggcgattacacactgatcgcaaaaaatgagtatgggaaggatgagaaacagatcagtgcccacttcatgggatggcccggaatcgacgacggcgctaatccaaattacccagacgttatctacgaggactatggaaccgcggctaacgatatcggtgataccaccaatcggagtaacgagatcccgtctactgacgtgaccgataaaaccgggcgtgagcacttgagtgtgtacgctgtggtcgtgatcgcatcggtggttggcttttgtttgctggttatgttattcctgctgaaactagcaagacattcaaaatttggcatgaaagatttttcctggtttgggttcggcaaggttaaatcacggcagggggtggggcctgcaagcgtgatctccaacgatgacgatagtgcttctccactgcaccacatttcaaacggatccaacaccccctcgtctagtgaaggcggacccgatgcggttatcatcggaatgaccaagatccccgtgatcgaaaatccacagtactttggaatcaccaattctcaattaaaacctgacacatttgtgcagcatattaagcggcacaatatcgtacttaaaagagaactgggcgagggcgctttcggcaaagtgttcctggcggagtgttacaacctgtgccctgagcaagacaagatactcgtagctgtgaaaaccctgaaagatgcatcagacaacgcccgaaaagattttcaccgcgaggctgagcttttgactaatctacagcacgagcacatcgtcaagttctatggagtgtgtgtcgagggggatcctctaattatggtgtttgaatatatgaagcatggggacttgaataaattcttacgggcacacggaccagacgccgttctgatggcagagggtaatccacctactgaactgactcagagtcagatgctgcatatcgcccaacagattgcggctggcatggtgtacctggcaagccaacactttgtgcaccgagatctcgcaaccaggaattgtcttgtgggagagaatctgctggtcaagatcggcgacttcggtatgagccgcgacgtttattccacagactactatcgagttgggggacacacgatgctgcccatcaggtggatgcctccagagtccatcatgtatcggaagtttacgacagaaagtgacgtgtggtcactgggcgtggtgctatgggaaattttcacatatggaaaacagccctggtaccagctcagtaataatgaggtgattgagtgtatcactcaggggagagtcttgcagagaccacgcacctgcccacaggaagtgtacgagttaatgttaggttgctggcagagggagccacatatgcgaaaaaatatcaaaggaatccacacattattgcagaacctcgccaaggcttctccagtttatctggacatcctgggctag

SEQ ID NO: 232579 - DNA, 966 bp, synthetic construct
  misc_feature 1..966: note = Description of Artificial Sequence: Synthetic coding sequence
  source 1..966: mol_type = other DNA
atgtggataaaaactctccaagaggctaaatcctccccagatacccaggacctgtactgtctgaatgagtctagtaagaacatccccttggccaatttgcaaattcccaattgtggtctgccatcagccaatctggctgccccaaatttgaccgtcgaagagggcaagtcgataaccttatcgtgctcagtggccggtgatcctgtcccaaatatgtattgggatgtgggcaacctggtgtctaagcacatgaatgagacgagccacactcagggatccctgagaatcactaacatcagctcagatgattcaggaaaacaaattagctgcgtggctgagaacctggtgggcgaggaccaagatagcgttaacctgactgtccacttcgctccaacaatcacatttttggaatcccctacttctgatcatcactggtgcatccccttcaccgtgaaaggcaaccctaagcctgctctgcaatggttctataatggggctattctgaacgaatcaaaatatatttgcactaagattcacgtgacaaaccacaccgagtaccacggatgtctgcagctagataatccaacccatatgaacaatggtgattataccctcatcgcaaagaatgaatatggaaaggacgagaagcagatcagtgcccacttcatgggctggcccggtatcgatgacggtgctaacccgaactatccagatgtcatttatgaagattatggtacagccgctaacgacattggggatactactaatcgctccaacgagatcccatctacagacgtaacagacaagaccgggagagaacaccttagtgtgtacgctgtagtggtgatcgccagcgtcgttggcttttgcctgctagtgatgttattcctcctgaagctagctaggcattccaaattcggcatgaaaggtttcgtcctgtttcacaaaattcctctagacggctag

SEQ ID NO: 232580 - DNA, 1434 bp, synthetic construct
  misc_feature 1..1434: note = Description of Artificial Sequence: Synthetic coding sequence
  source 1..1434: mol_type = other DNA
atgagttcatggatcaggtggcatggtccagcaatggccagactgtggggtttttgctggctcgtggtagggttctggagagcagccttcgcgtgccccacatcttgcaaatgcagtgctagtcgcatctggtgtagcgacccatcacccggaatcgtagcattcccacgcttagagcccaattcggttgatccggaaaacatcaccgaaatttttattgctaatcagaaaagactggagattatcaacgaggatgatgtggaggcctacgttggtttgcggaacctgactatcgtagattcaggcctgaagtttgttgcacataaggcctttctcaagaattcaaacctgcagcatatcaacttcacaaggaataagcttacatcactctctaggaaacactttcgccatcttgatctgtctgaactcatcctggtgggcaaccctttcacttgtagctgcgacatcatgtggattaagactttgcaagaggcaaagagcagtcctgatacccaagacctgtactgtctgaacgagtcaagcaagaatatccctctagctaatcttcagattccaaactgtggcttgccttcagcaaacctggctgctcctaatcttacagtggaggaagggaagtctatcactctgagctgctctgtggctggggaccctgtgccaaacatgtactgggacgttggcaacctggtgagcaaacacatgaacgaaactagccacacgcaagggtctttgagaatcaccaacatttctagcgatgactctggcaaacagatctcatgcgtagcagaaaatcttgtgggcgaggaccaagactctgttaatctgaccgtgcatttcgcacccacgattacatttctggagagtcctacttcagatcaccattggtgtattccgttcaccgttaagggcaatccaaagccagcactccagtggttttacaatggagccatcctgaacgagtccaagtacatatgtacgaagattcacgtcacaaatcacaccgaataccatgggtgtcttcaactcgataatcctactcatatgaacaacggcgactatacactgattgctaaaaacgaatacggtaaggacgagaagcagatatccgctcatttcatgggatggcctggaatagacgatggcgctaatcctaattatccagacgttatctatgaagactacggaacagccgctaacgacatcggggacaccactaaccgttctaacgaaatcccctcaactgatgttactgacaagaccggtagagagcacctgagcgtgtacgcagttgtcgtgattgcgagcgttgtgggcttttgccttctggtgatgctgttcttgttgaaacttgccaggcacagcaaatttgggatgaagggatttgttctgtttcataaaatcccactagatgggtag

SEQ ID NO: 232581 - DNA, 1839 bp, synthetic construct
  misc_feature 1..1839: note = Description of Artificial Sequence: Synthetic coding sequence
  source 1..1839: mol_type = other DNA
atggatgtatcactttgcccggctaagtgtagcttctggcgcatcttcctcctcggtagcgtgtggctcgattacgtggggagcgtcctagcctgcccagctaattgcgtctgctctaagactgagatcaactgtagaagaccggatgacggtaatctgttccccctcctggaggggcaggacagtggtaactctaatggaaacgcatctattaacattacagatataagcagaaacataactagtatccacatcgaaaattggagaagcctgcatactcttaacgccgtcgatatggagctctacaccggcctccaaaagctcaccataaagaattccgggttgagaagcatccagcctcgggcattcgctaagaatcctcaccttcgctacatcaatttgtcgagcaatcgcctgacaaccctgagctggcagctgttccagacccttagcttgagagaattgcagcttgaacaaaattttttcaactgctcatgcgatatccgctggatgcagttatggcaggaacaaggagaagccaaactgaactcacagaacttgtactgtatcaacgcagacggctcccagctaccattgtttcggatgaacatcagtcagtgtgatctccccgaaatctccgtctcccacgtgaatctgacagtcagggagggcgacaacgctgtgatcacatgcaatggctctggatccccactgcccgatgtggattggatcgttaccggtctgcagtccattaacacgcaccagacaaacctcaactggaccaacgtgcatgcaataaacctcacactggtgaatgttacctctgaggacaatggctttaccctgacttgcatcgcagaaaacgttgtagggatgtctaacgcttcagtggctcttaccgtctactacccgccacgcgtggtttccctggaggaacctgagctaagactggaacactgtatagaatttgtagtgcgagggaatcccccacccactttgcattggttgcacaatggccagcctctcagagagtcgaaaataatccatgtcgaatactaccaggaaggagaaatttccgaaggatgtctgctgttcaataaacccacccactataacaacggtaattacacactgatcgccaaaaatccgctgggcactgccaaccaaacaatcaatggccacttcttaaaggagccgttccctgaaagcactgacaattttattctgttcgacgaggtgagtcccacccccccaataaccgtcacacataagcccgaagaggatacgttcggagtaagtatcgcagtgggcctcgccgcttttgcctgcgtactgttagtggtgctgtttgtgatgattaacaagtacgggagaagatccaaattcggcatgaaaggtccagtagccgtgattagcggggaagaggactcggcctctccactgcaccacattaaccatgggataaccacccctagctcactcgatgcaggacctgatacagttgtgatcggcatgacaagaataccggtcatcgagaatcctcagtactttcgacaagggcataactgtcataaacccgacacctgggtcttcagtaacatcgacaaccacggcattctgaatcttaaagacaacagagaccaccttgttccatccacacattacatatacgaagagcctgaagttcagtcaggtgaagtctcctaccctcgctcccacggatttagagagataatgttgaatcccataagcctgcccggacattccaagcccttgaaccatggcatctatgttgaagacgttaacgtgtattttagcaagggcagacacggattttag

SEQ ID NO: 232582 - DNA, 414 bp, synthetic construct
  misc_feature 1..414: note = Description of Artificial Sequence: Synthetic coding sequence
  source 1..414: mol_type = other DNA
atgacaaggattccggtgattgagaatccgcagtactttcggcaagggcacaactgtcataagccagatacttacgtgcagcatataaaacgaagagatatcgtgcttaaaagggagcttggcgagggggcattcgggaaggtgttcttggcagagtgctacaacttgagtcccacaaaggacaagatgctggtggccgtaaaggccctgaaagatccgaccttggctgccaggaaggatttccagagggaagccgaactcctcaccaacttgcaacacgaacacatcgtcaaattctatggggtctgcggcgatggtgacccccttatcatggtttttgagtacatgaaacatggtgacctcaacaagttccttagctcgattagttctcctaaatcccatcagcaggggtag

SEQ ID NO: 232583 - DNA, 2478 bp, synthetic construct
  misc_feature 1..2478: note = Description of Artificial Sequence: Synthetic coding sequence
  source 1..2478: mol_type = other DNA
atggatgtatcgctctgtcctgcaaagtgcagcttttggaggattttcctgttgggctcggtgtggctggattatgtaggctccgttctggcttgccccgcaaattgcgtatgctccaagaccgaaattaattgtcggaggccagacgacggcaacttgttccccctcctggaaggccaggacagcgggaatagtaatgggaatgcttccatcaacattacagatatctctagaaacataacctcaatccacattgaaaactggagaagcttgcacacactgaatgcggtcgatatggaactgtatactggtcttcagaagttaacaataaagaattccggtctccgctccatccagcccagggcatttgcaaaaaaccctcaccttcgctatataaatctgtcatccaacaggctgactaccctaagctggcagctgtttcagacactgtccctacgagagctgcagctggagcagaattttttcaactgttcttgtgatatccggtggatgcaactctggcaagagcaaggagaagccaagttgaacagtcagaacctgtactgtataaatgccgacggctcccaattacccctttttcgtatgaacatttcccagtgtgatcttcccgagatttcggtgtctcatgttaacctgaccgttcgggaaggcgataacgcagtcattacctgcaatggcagcggctccccactgcccgatgttgactggatcgtgacaggtctgcaatcaatcaatacgcaccaaacaaatttgaattggactaacgtgcacgctatcaatctgaccttggtcaatgtgacatctgaggacaacggttttacccttacctgcatagccgagaatgttgtggggatgagcaacgcaagcgtggcattgaccgtgtactacccccctcgcgtcgtcagcctcgaggaacccgagctgcggttggagcactgcattgaattcgtggtcaggggtaatccccctccaacattgcactggctgcacaacggccagcccctgcgggagagcaaaataattcatgtcgaatactaccaagaaggagagatctcagaaggatgtctgctgttcaataagcctacccactacaataacggaaactacaccctcatcgcaaagaatccattgggcacagccaaccagactatcaatggccatttcctaaaagagccgtttcccgagagtactgataatttcattctctttgacgaggtgtcccctactcctccaattaccgtgacacataagcccgaggaagataccttcggcgtttccatcgccgtaggtctggctgcctttgcctgtgtgcttctggttgttctctttgtgatgatcaacaagtacggcagaaggtctaagttcggaatgaaaggtccagtggcagtaattagtggagaggaggacagcgctagccctttgcatcacatcaatcatggcatcaccaccccgagctcacttgacgccggacctgatacagttgtgattggaatgacccgcattcctgtgattgagaacccccagtattttagacagggacacaattgtcacaaaccagacacctacgtgcagcacataaagcggcgtgacattgtgctgaagagagaactgggtgaaggcgcattcggcaaggtgttcttggcagagtgctacaatctgagccctacaaaggataaaatgttggtagcagttaaagcgttgaaggatcccacgttagctgctagaaaggactttcagcgggaagcagagcttctcactaatctgcagcacgagcacatagtcaaattttatggggtttgtggagatggggacccattaattatggtgttcgagtatatgaaacatggcgacctgaataaattcttgcgggcacatggacccgatgccatgatactggtggatgggcagcctaggcaggccaagggcgagctggggctgagccagatgctgcacatcgcatcccagatcgctagtgggatggtttaccttgcgagccagcatttcgtgcatagagacctggctacaagaaattgtctcgtaggagcaaatctgctggtgaagatcggggatttcggaatgagcagggacgtgtatagcacagactattaccgggttggcggacacaccatgcttcctatccgatggatgcctccggaatctatcatgtacaggaagtttactacggaatccgatgtatggtcttttggggtgatcttatgggaaatcttcacctatggcaagcagccctggttccagctttcaaacactgaagtcatcgagtgtatcacacagggacgggtcctcgaaagacccagggtctgccccaaggaagtttatgacgttatgctcgggtgctggcagcgcgaaccgcagcagcgcctcaatattaaggagatatacaaaattcttcacgccctgggaaaggctaccccaatctacctggatatcctgggctag

SEQ ID NO: 232584 - DNA, 2496 bp, synthetic construct
  misc_feature 1..2496: note = Description of Artificial Sequence: Synthetic coding sequence
  source 1..2496: mol_type = other DNA
atggatgtgtctctatgccccgctaagtgctctttttggaggatttttctcctgggaagcgtctggctcgactatgtggggagcgtcctggcatgtcctgccaattgtgtgtgttccaagaccgagatcaactgtcgacgacccgacgacggaaatctcttccccttgctggaggggcaggacagcggtaactcaaacggtaacgctagcatcaacataactgacatttcgaggaatatcactagtatccatatcgaaaactggcgatccctgcacacgctgaatgctgtggatatggaactatatactggcctccagaagctcacaatcaagaattcaggcctgagatccatccagcctcgggcattcgctaagaatccacacctgcgttacatcaatcttagtagtaaccggttaactacactttcttggcagctgttccagaccctgtccctccgagaactgcaactggaacagaactttttcaactgttcttgtgatattagatggatgcagctgtggcaggaacaaggggaagccaaattgaacagccagaacctatattgtataaacgccgacggctcgcagctgcccttatttcgaatgaatatcagccaatgcgacttgcctgagataagtgtgagtcacgtaaatctgaccgtccgcgagggcgataacgcagtcataacctgcaacggctccggttcccctctgccagatgtcgattggatcgtgaccggcctgcaatctatcaatacacaccagactaatctcaactggacaaatgttcacgcaatcaatctgacgctcgtgaatgtgacaagcgaggataatgggtttacgctgacctgcattgccgaaaacgtcgttggcatgtccaatgcgtccgtcgccctgacggtgtactacccaccaagggtggtgagtctggaggaacccgagctcagattagaacattgcatcgagttcgtggtccgaggcaaccccccaccaactctgcactggttgcacaatggccagcccctgcgggagtctaagattatacatgtggagtattaccaggagggcgagatttctgaaggatgcttactctttaacaagcccacccattacaataatgggaactacaccttgatcgcaaaaaatcccctgggtaccgcgaatcagaccattaacggccattttctaaaggagccatttccagtcgacgaagttagccccactcccccaattaccgtcacccataagcctgaagaggatactttcggggtgtcaatagcggtgggactcgctgccttcgcttgcgttctgctcgtggtgctgttcgtgatgatcaataagtacgggagacggtccaagtttggcatgaaaggaccagtcgcggtcatctccggcgaggaagacagcgcctcaccgctgcaccacattaaccacgggattactactccaagttccttagatgcaggccctgatacagtcgtgattggaatgacccggatacctgttatcgaaaatcctcagtattttcgacagggccacaattgccacaaacctgacacatacgtgcagcacatcaagcggagggacatagtgctgaagagagaactgggggagggcgcattcggaaaggtgttccttgctgagtgttataacctgagcccaacgaaagataaaatgctcgtagcggtaaaggcacttaaggaccccactctggcagctcgcaaggatttccagcgagaggccgagcttctaacgaatctgcagcacgaacacatcgtgaagttttacggtgtgtgcggcgatggcgacccacttatcatggtgttcgagtatatgaaacatggtgatctaaacaaatttctgcgagcccacgggccagacgccatgatcctggtggacggccagccacgacaggctaaaggagagctgggattgagccagatgctacacatagctagtcaaatcgcaagtggcatggtctacttggcttcacagcactttgttcatagggatttggccactaggaactgcctggtcggtgcgaacctgctggtcaaaattggcgattttggcatgtcaagagacgtctatagtactgactactacaggctgtttaacccttctgggaacgatttctgtatctggtgtgaagtgggcggacatactatgctaccaatcagatggatgcccccagagagtatcatgtaccgcaagttcactactgagagtgacgtctggagtttcggggtgatcctctgggagatttttacttatgggaagcagccctggtttcagctttccaatacggaggtgattgagtgcattacacaaggccgtgtcctggagaggcccagggtgtgccctaaagaggtgtacgacgtgatgctgggttgctggcaaagggagccacagcagcgactgaatatcaaggagatatataagatcctccacgctctgggcaaagccacccctatctacctcgacatcctggggtag

SEQ ID NO: 232585 - DNA, 2520 bp, synthetic construct
  misc_feature 1..2520: note = Description of Artificial Sequence: Synthetic coding sequence
  source 1..2520: mol_type = other DNA
atggacgtgagcttgtgtcccgctaaatgttctttttggcggatctttttgctggggtccgtgtggctcgattatgtcggatccgtgctggcttgccccgcaaattgtgtgtgcagcaaaaccgaaatcaattgtaggcgccctgatgacggcaacctgttcccccttctagaggggcaagacagtggtaattctaacggtaacgcatcgataaatatcactgacatatccaggaatattacgtcaattcatatcgagaactggaggagcctgcatacacttaacgccgttgatatggagctgtacactggcctacagaaattgacaattaagaacagcggactgcggtccattcaacccagagcctttgccaagaatccccatctccggtatatcaatctctctagcaaccggctgactactctatcgtggcagctcttccaaactctgagcctaagggagctgcagctcgaacagaatttctttaactgttcgtgtgatattcggtggatgcaactttggcaagaacagggagaggctaagcttaattctcaaaatctctattgtatcaatgccgatggcagtcaactgcccctctttcggatgaatatctctcagtgcgacctgcctgagattagcgtgagccacgtgaatctgactgtacgagaaggagacaacgctgtcatcacttgtaacggatccgggagccctctacccgatgtggactggatcgttaccggactgcagagtatcaatacccaccagaccaacctcaattggaccaatgttcacgccatcaatcttaccttagtgaatgtgacaagtgaggataacgggtttaccttaacctgcatcgccgaaaatgtcgtcggaatgtccaatgcatctgtggcactgacggtctactaccccccaagagtggtgtcccttgaggagcctgagttgcggctggagcactgtattgaattcgtggtgagggggaaccctccacctacactgcattggctgcacaatggacagcccctgagggagagtaaaattatccacgtggaatactaccaggaaggggaaattagcgaaggatgcctacttttcaataagccgactcattacaataacgggaactacacactcattgcgaagaatccattagggactgctaatcaaaccatcaatggccacttcttgaaggagcctttccctgagtccaccgacaattttattctgttcgacgaggtgtctccaacaccccctattacagtgacacataagcccgaagaagacaccttcggagtgtccatcgctgtcggcctggcagcgttcgcttgtgttctgttagttgtgctgttcgtgatgatcaataaatatggacggcgatccaaatttgggatgaagggccctgtggccgtgataagcggcgaagaagactcagcctctccgctgcaccatatcaaccacgggattactacgccgagcagcttggatgccggtcccgacacggtcgtgatcggtatgacccggatacctgtgattgagaacccccagtatttccgccagggtcacaactgtcacaagcccgatacatacgtgcagcacattaaacgacgggacattgtgctaaagcgcgagcttggggagggcgcatttggcaaggtcttcttggccgaatgttacaacttgagcccgactaaagataaaatgctggttgctgttaaggctctgaaggatcccacacttgccgctaggaaagactttcagcgcgaggcagagctgctcacaaatctgcagcacgagcacatcgtgaagttttatggtgtctgcggggacggagatcctctgataatggtgtttgaatacatgaagcacggcgatttaaataagtttttgcgagctcacggccctgatgccatgatcctggtggacggccagcccagacaggcaaagggcgagttgggcctctcgcaaatgttgcatatcgcttcacagatcgcctctgggatggtttatctggcttctcaacacttcgtccatcgagacctcgcaacccggaattgcctcgtaggcgctaacctgttggtaaaaattggtgattttgggatgagtcgtgatgtgtactctaccgattactaccggctgtttaacccttccggcaacgacttctgtatctggtgtgaggtggggggtcacacaatgttaccaataaggtggatgcctcctgagtctatcatgtacagaaagttcacgaccgagtctgatgtatggagtttcggagttatcttgtgggagatattcacttatggcaaacagccttggttccaactgtccaacactgaggtcatagaatgcatcacacagggcagagttctagagagacctcgggtgtgcccaaaagaggtgtacgatgttatgctaggctgctggcagagagagccacaacagcggttgaatattaaagaaatctacaaaatcctgcacgctttgggaaaagctacccctatctatctggatatactgggctag

SEQ ID NO: 232586 - DNA, 2477 bp, synthetic construct
  misc_feature 1..2477: note = Description of Artificial Sequence: Synthetic coding sequence
  source 1..2477: mol_type = other DNA
atggatgtttccctctgcccagccaagtgcagtttctggaggatcttcctgctgggatcagtatggttggattacgtggggagcgtcctggcatgtcctgcaaactgtgtttgctccaagacggaaatcaactgcaggcgacctgatgacggtaatctctttcctcttcttgaggggcaagacagcggcaatagtaatggaaacgcctccataaatattaccgacatttccaggaatatcacttccatccatattgagaattggagatccttgcatacactgaatgcagtggatatggaactgtatactggcctacagaaattgacgattaaaaattccgggcttcggtccatccagccgagagcttttgccaagaatccacacctgcgatatatcaacctttctagcaaccgtctaaccacactgtcttggcagctgttccagaccctctccctgcgcgaattgcagctggagcagaatttctttaactgcagctgtgatatccgctggatgcagctgtggcaggagcaaggcgaggcaaagctgaatagtcaaaacctgtactgcataaacgcggatggtagtcagctgcccttgtttcgaatgaatattagtcagtgtgaccttccggaaatcagcgtgagccatgtcaacctaaccgtgcgtgagggcgacaacgctgtaattacgtgcaatggcagtggaagcccgctccccgatgttgactggatcgtaactggcctccagtctattaacacgcatcagactaacctcaactggaccaatgtgcatgcgatcaatttaactctggtgaacgtcacgtctgaagacaacgggtttacattaacgtgcatagcagagaacgttgtcgggatgtctaacgcgtccgtcgcgctgacagtgtattatcctccccgtgtggtgtctctggaggaaccagagctacggttggagcactgtattgagttcgtggtgcggggaaacccccctccaacactccattggctgcataatggtcaaccccttagagaaagcaaaataatccacgttgaatactaccaggagggcgaaatctctgaggggtgcttgttgttcaacaaacccacacactacaataatggcaactacacgctgatcgctaagaacccactcgggaccgctaatcagactataaatggacatttccttaaggaacccttcccggagtctactgataacttcatcctattcgacgaggtgagtcccacccccccaatcaccgtgactcacaagccagaggaggatacctttggggtttcaatcgcagtgggcctggcggctttcgcatgtgttctgctggttgttctgttcgtcatgatcaacaagtatggaagacgcagcaagttcgggatgaagggtcccgtcgcggtgatcagcggtgaagaggactccgcttcccctttgcatcatatcaatcacggaattacgacaccaagcagtctcgacgctggtcccgacaccgtcgtgataggcatgacccgaattcctgtgatagaaaacccacagtatttccgccagggtcacaattgtcacaagcccgacacttacgtgcagcatataaaacgcagagacatcgtgttgaaaagagagttaggtgagggcgcattcggaaaagtcttcctggccgagtgctataatctctctccaacaaaagacaagatgcttgtcgctgtgaaagcccttaaggaccctactctggccgcacgcaaggattttcaacgtgaggccgaactcctgactaacctgcagcacgaacacatagtcaaattctatggggtttgcggagatggggatcctcttataatggtgttcgagtatatgaaacatggtgatttaaataagttcctgcgggcacatggacccgatgccatgattctcgttgacgggcagccccgacaggctaagggcgagttgggtcttagccagatgttgcacattgcctcccagatcgcctcgggaatggtttatcttgcctcacagcacttcgtgcatagggatctggcaactcgtaactgcttggtcggtgcaaatctccttgtaaagataggcgactttgggatgagtcgggatgtctattccactgactattaccgggtggggggacacactatgctccccatcagatggatgcctccagaatccatcatgtaccgaaagtttacaaccgagagcgacgtgtggtcctttggcgtcatcctttgggaaatattcacttacgggaagcagccctggttccagctgtcgaataccgaggtgatcgagtgtatcacgcagggacgcgtactggaacggccaagagtgtgtcccaaagaggtttacgacgtgatgctcggatgctggcagcgcgaacctcagcaacgcctgaacatcaaagaaatttataagatcctccatgccctggggaaagctacgccaatttatctcgacattttaggata

SEQ ID NO: 232587 - DNA, 1839 bp, synthetic construct
  misc_feature 1..1839: note = Description of Artificial Sequence: Synthetic coding sequence
  source 1..1839: mol_type = other DNA
atggacgtctccttgtgtcctgcaaagtgctcgttctggcgaatctttctactcgggtcagtgtggctggactacgtaggctctgtgctggcgtgccctgctaactgcgtgtgcagcaagacagagatcaattgccgccgacccgacgacgggaatctgttccccctgctcgagggtcaggattctggtaatagcaatggtaacgcatctatcaacattacagacattagtcggaatattacgagcattcatatcgagaattggagatccttacatactctcaacgcggtggacatggagctgtacaccgggctgcagaaattgacaatcaaaaatagcggcctgagaagtattcagcctagagcctttgctaagaaccctcacctcagatacataaacctttcctccaaccgtctgaccacattgagctggcagctgtttcagactctcagccttagagaattacaactggaacagaatttcttcaactgctcctgcgatattcggtggatgcagctctggcaggagcaaggcgaagctaaactgaacagccaaaacctatattgtatcaatgctgacgggagccagttgcctctttttcgcatgaatatttctcagtgtgaccttcccgaaatcagcgtctctcatgttaacctgaccgtcagggagggagataacgctgtaattacatgtaatgggtctgggagcccactgcctgacgtagactggatcgttaccgggctccagtccatcaatactcatcaaactaacctgaattggaccaacgttcatgcgatcaatttaacattggtcaacgtcacttcggaggataatggttttaccctcacatgcatcgccgagaatgtggtcggtatgagcaacgccagcgtagctctgactgtctactacccacctagagttgtttctctcgaggagcctgagctaagattggaacattgcatcgagttcgtcgtgcggggtaacccacctcccactttgcattggctgcacaatgggcagcccttgcgggaatcaaagattattcacgtggaatattaccaggagggagagattagcgaggggtgtctgctttttaataagccaacacattataataacggcaactacacactgatagctaaaaacccattggggactgccaatcagactatcaacggacattttttaaaggagccgttccccgagtcaactgacaactttatcctctttgatgaagtaagccccacaccccctatcacagtgacacataaacctgaggaagatacgttcggggtcagcattgccgttggactcgcggctttcgcctgcgtgctgttagtggtgttgtttgttatgatcaataagtacggtcgaagaagtaagtttggcatgaaggggcctgtagcagtcatttctggcgaggaagacagtgcctctcctttgcatcacatcaaccacggaataacaacgccaagctccctggatgcaggtcctgacacagtggttatcgggatgacccgcattcctgtaatagaaaacccacagtactttcgtcaaggtcacaattgtcacaagccagatacatgggtgttttccaacattgataaccatggcatccttaatcttaaagacaatcgggatcaccttgttccttcaacccattacatttatgaggagccagaagtgcagtccggagaggtcagctaccccagatctcatggctttagggagataatgcttaaccccatttcacttccagggcacagtaagcccctgaaccacggaatctacgtcgaagatgttaatgtgtacttcagcaaaggccgtcacggcttttag

SEQ ID NO: 232588 - DNA, 1854 bp, synthetic construct
  misc_feature 1..1854: note = Description of Artificial Sequence: Synthetic coding sequence
  source 1..1854: mol_type = other DNA
atggaactgtacacaggtctgcagaaactcacgataaagaactccgggctgcgatcgatccagccgagagctttcgcaaagaacccacatctgaggtatatcaacctatcctccaatcgccttaccacactttcatggcagctcttccagacactgagtctgagagagctacaattagagcagaattttttcaattgttcatgtgacatccgctggatgcaactctggcaagagcagggggaagccaagctcaactcgcaaaatctttactgtatcaatgctgacggcagccagctgcctctcttcagaatgaacatcagccagtgtgaccttcccgagatttcggtctcacacgttaacttaacagttcgggaaggcgataatgcagtcataacctgtaacgggtctggctctcccctgcccgatgtggactggatcgtcacgggcctccagagtatcaatacacaccagaccaacctcaattggacaaatgtgcacgccattaatcttacgttagtcaacgttacaagtgaagacaatggttttaccctgacctgtatcgctgaaaacgtggtgggaatgtccaatgcctcggtggctctgaccgtttattaccctcctagggtggttagtctggaagagccagagctgcgcctcgagcactgtattgagtttgtcgttcgaggcaaccctcctccaacactgcactggttgcacaacggccaacctctgcgagaaagcaagatcatccacgttgaatattatcaagagggggagatctccgaaggatgtctgctttttaacaagcccactcactataataatggcaactataccctcatcgccaaaaaccctctgggaaccgccaaccagacaatcaatggccactttctaaaggaaccttttccagagtctactgacaacttcattttattcgatgaggtttctccgactccaccgattaccgtgacccacaaaccggaggaagatacttttggagtcagcatcgcagtgggcctagcggctttcgcttgtgtcctgctggttgtgctgttcgtcatgattaacaaatatgggagaaggagtaagtttggaatgaaggggcctgtggccgtgatctctggggaagaagattccgctagcccgcttcatcatattaatcacggcataactacacctagctccctggatgctggccctgacactgtcgtaattggaatgactagaatccccgttattgaaaacccacagtatttccgccaggggcataactgtcataagcccgatacctatgtgcagcatatcaagagaagggacatcgtccttaaacgggagctgggagagggggcttttggcaaagtgtttcttgctgagtgctataatctgagcccaaccaaagataagatgctggttgcagtgaaagcgttgaaggaccctacgctggcagctcggaaagacttccagcgcgaggctgagcttcttactaatctgcagcatgaacacattgtgaagttttatggcgtgtgcggcgacggagaccctcttattatggttttcgagtacatgaagcatggcgaccttaacaagttcctgcgggcacacggaccagacgccatgattctggtagatgggcagccgcgtcaggctaagggagagcttggcttgagccaaatgcttcacatcgcctctcagattgctagcggaatggtataccttgcttcacaacactttgtacacagggatctcgccactcgtaactgcctggtaggggctaatttgttagttaagatcggcgattttggcatgtcccgagacgtgtattccactgactattacagagtcgttcaagcctag

SEQ ID NO: 232589 - DNA, 774 bp, synthetic construct
  misc_feature 1..774: note = Description of Artificial Sequence: Synthetic coding sequence
  source 1..774: mol_type = other DNA
atgagcattctcttctacgtgattttcctggcctacttgcggggaatacaaggcaataacatggaccagcggagtctcccggaggattccctgaatagccttattatcaagcttatccaggctgatattctaaagaataaactttcaaagcagatggtggacgtcaaagaaaactaccaatccactctgcccaaagctgaagcaccacgcgaacccgaaagggggggaccggcaaagagtgcattccagccggtgattgcaatggataccgagctgcttcgccagcaacgcaggtacaactcacccagggtgctcctgagcgattcaactcctctggagccaccaccgctctatctgatggaagactacgttggatctccagtagtggccaacaggacttcaaggcggaagaggtacgccgaacataaatcacataggggggagtacagcgtgtgtgactccgagtcattgtgggttaccgacaaaagcagcgccatcgacataagaggacatcaggtgactgtgttaggggaaattaagactggcaattccccagtaaagcaatacttctatgagaccaggtgcaaagaggccaggccggtgaagaatggttgtagaggtatcgatgacaaacactggaattcccaatgcaagacatcccagacatacgttagggccctgacctcggagaacaataagctggtaggctggcgctggatacgtatcgatacgtcctgcgtgtgtgctctgagccgtaaaattgggagaacttag

SEQ ID NO: 232590 - DNA, 813 bp, synthetic construct
  misc_feature 1..813: note = Description of Artificial Sequence: Synthetic coding sequence
  source 1..813: mol_type = other DNA
atggttacatttgcgaccatcctacaggtcaacaaggtgatgtctatcctgttttatgtcatctttctggcctacttgcgcggaatacaggggaacaatatggaccagaggagtctgccagaagactccttaaattctctcataatcaaactgatacaggccgatattcttaaaaacaagctgagtaagcagatggtcgacgtcaaagagaactatcagtccaccttgccaaaggcggaggcacccagagaaccagagagaggagggcctgcaaaatctgccttccagcctgtgatcgcaatggacacagaattgttgaggcaacagagaagatataatagtcccagggtgctcctgtccgatagcaccccactcgagccccctccactctatttaatggaggactacgtgggctcgcctgtggtagctaatcgaacttcaaggaggaagcggtatgccgaacacaagtctcatcggggagagtattccgtctgtgacagtgagtccctgtgggtgaccgataagagtagtgctattgacattcggggtcaccaggtgaccgtactgggagaaattaagaccggcaactcccccgtcaagcaatacttttatgaaacccggtgtaaagaggcgcgtccagtgaaaaacggatgccggggtatcgacgataagcattggaatagccagtgcaaaacatcacaaacatacgttcgcgcactcacctccgagaacaacaagctagtcgggtggaggtggatcagaatagacaccagttgtgtctgcgctctgtcccgaaaaattggcagaacttag

SEQ ID NO: 232591 - DNA, 633 bp, synthetic construct
  misc_feature 1..633: note = Description of Artificial Sequence: Synthetic coding sequence
  source 1..633: mol_type = other DNA
atgttaccattgcccagttgttcacttcccattctcctgctctttctgctgccatcggtaccgatcgaaagccagcctcccccttcaactctccccccatttctcgccccagagtgggatctcctgagcccacgggtggtcctttcgaggggggcaccagccggtccaccattgctcttcctactagaagctggagcctttcgggagagcgccggagcccctgctaacagatccaggaggggtgtctcagaaacagcacctgcgagcaggcgcggtgaattggccgtgtgcgacgccgtgtctgggtgggtgactgataggcgaaccgctgtggacctgagaggcagagaggtagaggtgctgggagaggtgcccgctgctggaggcagtcctctgaggcagtacttctttgagacaagatgcaaagccgacaatgcagaggaaggaggtcctggcgctggaggcggaggctgtcgaggggtagatagacggcactgggtctcagagtgcaaggccaaacaatcttacgtgagagccttaacagccgacgcacagggtagggtggggtggcgttggatccgcattgacactgcgtgcgtgtgcacgctgctctcacgtactggtcgtgcctag

SEQ ID NO: 232592 - DNA, 594 bp, synthetic construct
  misc_feature 1..594: note = Description of Artificial Sequence: Synthetic coding sequence
  source 1..594: mol_type = other DNA
atgcaacgttggaaggccgcagccctggcatccgtgttatgctcttctgtgttaagtatatggatgtgtagagaggggctcttgctctctcaccgcctcggccctgccttggttccactacaccgacttccacggactcttgatgctaggattgcccgactggcacagtacagggcacttctccagggcgcacccgatgccatggagctacgtgaacttaccccctgggccggaagacctcccggacctcggaggcgggctgggccacggcgtaggagagcaagggcccgtctgggggctcgaccctgtgggctgcgcgagctggaagtgagagtgagcgagttgggcctgggttatgccagcgacgagaccgtgctctttagatattgtgccggagcttgcgaggccgcagctcgggtgtacgatctggggctgaggcgcctacggcagcgaagacggttacgccgagagcgggttagagcccagccatgctgtaggcccaccgcatatgaggacgaagtgagtttcctggatgcccattccagataccacacggtgcacgaactcagcgctcgagagtgcgcctgtgtctag

SEQ ID NO: 232593 - DNA, 1323 bp, synthetic construct
  misc_feature 1..1323: note = Description of Artificial Sequence: Synthetic coding sequence
  source 1..1323: mol_type = other DNA
atgtcctcttgccggggacagaaggtggcgggtggactgcgcgtcgtgagccctttccccctctgtcagcctgccggtgaaccctctcagggcaagatgcggtctagctgcgtgctgctgaccgcactagtcgcgctggccgcttactatgtgtacatccctttgccagggagtgtgtcagacccctggaagctgatgctcctggatgccacctttcgcggagcccagcaggtgtccaacctcatccattacctggggctcagtcatcacctcctggccctgaattttattatcgtatccttcggcaagaaaagcgcatggtcttcagcccaggtgaaggttaccgatacggatttcgacggcgttgaagtcagggtgtttgaaggacctccaaagcctgaagaacctcttaaacggtcggtcgtttacatacacggcggtggttgggcactcgcctccgctaagatccgctactatgacgagctgtgtactgccatggctgaagagctgaacgctgtcatcgtaagcattgaataccggctcgtgccaaaagtatactttccagaacagattcacgatgtggtacgtgccactaaatactttctgaagcccgaggtcctgcagaagtacatggtggacccgggaaggatttgtatcagtggcgactccgcaggagggaacttagcagccgctcttggacaacagtttacgcaggatgcgagtctcaagaacaagctgaagttgcaggccctcatctaccccgtcctgcaggctctggatttcaacaccccatcctatcagcagaacgtgaacacacctatcctccccagatacgtgatggtgaaatattgggtggactacttcaagggcaattacgactttgttcaggccatgatcgttaataaccataccagcctggacgtggaggaagctgctgccgtgcgtgcccgactgaattggacatccctgttgccagcaagtttcactaaaaactacaaacctgtggtacagaccacggggaatgccagaatagtgcaggagcttccacagttattggacgcaagatctgctccactgattgctgaccaagcggttttacaattattgcccaagacatatatcttaacatgcgagcatgacgtacttcgagacgatggcataatgtacgccaagcggctggaatctgcaggcgtggaagttacgctggaccattttgaggacggcttccatggttgtatgattttcacttcctggcccacaaacttttcagtgggcataagaactcggaattcctatattaagtggctcgatcagaatctctag

SEQ ID NO: 232594 - DNA, 1227 bp, synthetic construct
  misc_feature 1..1227: note = Description of Artificial Sequence: Synthetic coding sequence
  source 1..1227: mol_type = other DNA
atgcggagcagctgcgtgctactcaccgccctcgttgcgctcgccgcatactacgtgtacattccattacccggttccgtgtctgacccctggaaactgatgcttttagacgcaacctttcgtggggctcagcaggtgtccaacttgatccactatctgggcctatcgcatcacttgctcgctttgaattttattattgtcagctttggcaaaaagtccgcctggagctcagcccaagtcaaggttactgacacagactttgacggtgtcgaagtgcgcgttttcgagggtccgccaaagcctgaagagccactgaaacgctccgttgtgtatattcatggtggcggatgggcgttagcaagcgccaaaatcaggtattatgatgagctgtgcaccgccatggcggaggagctcaacgcagtgatcgtcagtatcgagtatagactggtcccaaaggtgtactttcccgagcagatacatgacgttgtacgtgcaaccaagtatttcctgaagccagaagtcctccagaaatacatggtggatcctggcaggatttgcatctcaggggatagcgcgggagggaacctggccgcagccctcgggcaacagttcacacaggacgcttccctcaagaacaagctcaaactgcaggcacttatctacccagtgctgcaagctcttgactttaatacccctagctaccaacagaatgtgaacactcctatcttgcccagatatgtgatggtgaaatattgggtagattactttaagggcaactatgacttcgtccaagccatgatagtaaacaaccacacatccctggatgtagaggaggcagccgcagtccgcgcacggctgaattggacctctctgctgccagcatcattcaccaagaactataagcccgtggtgcagacaacagggaatgccaggattgtgcaggagttgccgcaactgttggacgccaggtccgcgccattaatcgcagaccaagccgtcctccagttattgccgaaaacgtacattcttacttgtgagcacgacgtgttgagggacgacggtatcatgtacgccaaacgactggaatcggccggtgtcgaggtgacactcgatcatttcgaggatggctttcacggttgcatgattttcacatcttggcccactaattttagtgtgggcattagaactagaaatagttatattaagtggcttgaccagaacctgtag

SEQ ID NO: 232595 - DNA, 1347 bp, synthetic construct
  misc_feature 1..1347: note = Description of Artificial Sequence: Synthetic coding sequence
  source 1..1347: mol_type = other DNA
atgtcctcgtgtagagggcaaaaggtggcgggtggtctgcgggtggtgagtccttttccgttgtgccagcctgccggagagccttcacagggtaaaatgagatcttcttgcgtcctcctaacggcgcttgtcgctttggcagcatactatgtatacattcctctccctggctcagtctccgatccctggaagttgatgctcctggacgcaacctttcgcggtgcacagcaggtgtctaacctcatacattacctcggcttatctcaccacctcctggcgttgaacttcattatcgtgtctttcggcaagaagtctgcatggtctagcgcccaggttaaagtcaccgacacagacttcgatggcgttgaggttagggtctttgaaggcccaccaaagcctgaggaaccactaaaacgttccgtggtctacattcatggcggaggatgggccctcgcttccgcctccgcaagttggtcacctagcgatgaaattcgctattacgacgaactgtgcaccgctatggccgaagagctgaatgcagtcatagtgtctattgagtaccgactggtgccaaaagtctattttcccgagcagatacatgacgtagttagagcaacaaagtatttcctaaagccagaggtgctccagaagtacatggtcgatcccggaagaatttgcatctctggtgatagtgctggaggcaatctcgccgcagccttaggacaacagttcacgcaggatgccagtctgaaaaacaaactcaagctgcaagcactcatctatccggttcttcaagcccttgactttaacacaccaagttaccaacaaaacgtcaacactccaatcctgccaaggtacgtgatggtgaagtactgggttgattacttcaagggaaactacgatttcgtgcaagcaatgatcgtcaataatcacacaagtttggacgtggaagaagcagcagccgtgcgggctcgcctgaattggacttcgctgctcccagcgagttttacgaaaaactacaagccagtagtgcaaaccaccggtaacgccaggatcgtccaggagcttccacagttgctggacgccagaagtgcaccacttatcgccgaccaggctgttttgcagttactgccaaagacctatatcctcacatgtgaacacgacgtgttgcgagacgacggcatcatgtatgcgaagaggcttgagagtgcgggtgtagaggtgaccctcgatcacttcgaagatggatttcatggctgtatgatctttacatcatggccaacgaatttcagcgtcggcatcagaaccagaaactcttacatcaaatggctggaccagaacctgtag

SEQ ID NO: 232596 - DNA, 828 bp, synthetic construct
  misc_feature 1..828: note = Description of Artificial Sequence: Synthetic coding sequence
  source 1..828: mol_type = other DNA
atggccgaagaactgaacgcggtgatcgtcagcatcgagtaccgcctggtccctaaggtctacttccctgaacagatacatgatgttgttagggccaccaagtatttcctgaagcccgaggtgttacagaaatatatggtggatccgggaaggatttgcataagcggcgatagcgccggaggaaatcttgccgcagcactgggccagcagtttacgcaagatgcatctctaaaaaataagctcaaactgcaagcgctgatttaccccgtgctacaggcactggacttcaataccccatcgtaccagcaaaacgtgaacactcccatcctgcctcgctatgtgatggtgaaatactgggtggattatttcaaaggcaattatgattttgtccaggccatgatcgtcaacaaccatacctcactcgatgtcgaggaagcagctgcagtgcgcgcacggctcaattggacaagtctgttgccagcatcttttaccaagaattataaacctgtagtgcagacaactggaaatgcccgaatagtgcaggaactgcctcaactgctggatgctagatccgccccactaattgctgaccaggcagtgcttcagctactaccaaagacctatatacttacctgcgaacacgatgtgctgcgggatgatgggattatgtacgcaaaaaggctggaatctgctggtgtggaggtaaccctggatcattttgaggacggcttccacggctgcatgatcttcacctcatggccaacaaacttttctgtaggcataagaacacggaactcctacataaaatggctagatcagaacctgtag

SEQ ID NO: 232597 - DNA, 2754 bp, synthetic construct
  misc_feature 1..2754: note = Description of Artificial Sequence: Synthetic coding sequence
  source 1..2754: mol_type = other DNA
atggcttttatcaggaaaaagcagcaggaacagcaattgcaactgtattcgaaggagcggttttcccttctactattgaacttggaggaatattatttcgagcagcaccgggctaatcatatcctgcacaaggggtcccaccacgaacggaaaatccgaggttccctcaaaatttgtagcaaatccgtgattttcgagcccgacagcatctcccagcctatcattaagatcccacttagagattgtatcaagattgggaaacacggcgagaatggggcaaatcgccactttaccaaggctaaatctggcggtatctcactgatctttagccaggtctactttattaaagagcacaacgtggtagctccttacaaaattgagagaggcaagatggaatacgtgttcgagttggacgtgcctggaaaggtagaagacgtggtcgagactcttctacagttgcaccgtgccagttgtctcgataagctgggggatcagacagctatgattacagccatactccagtccaggctagccagaacttcattcgacaaaaatcgattccagaatatatcggaaaaattgcatatggagtgtaaagcggagatggtcacacctctagtgaccaatcccggtcacgtatgcattaccgacactaatctgtacttccagccccttaatggctaccccaagcctgtggtccaaatcaccttacaagatgttcgcaggatttacaaaaggcggcacggcctcatgccgttagggctcgaagtcttctgcactgaagacgatctgtgctcggacatctatcttaaattctacgaacctcaggaccgcgatgatttgtacttttacatcgcgacctaccttgagcaccacgtcgcagagcacactgctgagtcctatatgttgcaatggcaacggggacacctgtcaaactatcagtacctgctgcaccttaataacctggctgaccgctcctgtaacgatctgtcccagtaccctgtgtttccctggatcatccatgactactcatcttctgaactcgacctttccaacccaggtacgtttcgtgacctgtccaaacccgttggcgcactcaacaaagaaaggttagagcgcctactgacccgttaccaggagatgcctgaaccaaagttcatgtacgggtcacactacagctctccaggatacgttcttttctacctggttcgaatcgcaccagagtacatgctttgtctgcagaacggacgattcgacaatgccgatcggatgttcaactccatagccgaaacgtggaagaactgcctggatggcgcaacggacttcaaggagctgattcccgagttctacggcgacgacgtcagctttctcgtgaactctctaaagttggatttgggaaaacgtcaagggggacagatggtggatgatgtggagttgcccccatgggcaagcagcccagaggattttctgcagaagtccaaggacgcactggaaagtaattacgtctctgagcacttgcacgagtggatcgacctcatctttggatacaaacagaaaggctcagatgccgtgggtgctcacaatgtgttccatcctttgacatatgagggcggtgtggatctcaactccattcaggatcctgacgaaaaggtggccatgttgactcagatactcgagttcggtcagactccgaagcagttgttcgtgactcctcaccccagacgaatcactcccaagttcaagtctctatctcagaccagcagttataacgcctcaatggcagactcccccggtgaagagagttttgaggacttgaccgaggagtctaagaccctagcttggaacaacatcacaaagttgcagttacacgagcactacaagatccacaaagaagcagtgacagggatcaccgtgtccaggaatggctccagcgttttcactactagccaggactccacccttaagatgttcagcaaagagtctaaaatgctgcaacgctctatttccttttctaacatggccttgagttcctgtctcttgttgcccggagacgcaaccgtaattacaagcagctgggacaataatgtgtatttttacagcatcgccttcggtcggaggcaagatacgctcatgggccacgatgatgctgtctctaagatatgttggcacgataataggctctacagtgcaagttgggactccaccgttaaggtatggagcggagtccccgctgagatgcccggaaccaagaggcatcactttgaccttttagccgagctggagcacgatgtaagcgtcgatactatctccctcaacgccgcatccaccctactggtgagcggaaccaaggaggggactgtaaacatctgggacctgaccacggcaactctgatgcaccagatcccatgccacagcggtattgtttgtgacactgcattctccccagattccaggcacgttctttctaccggtacggacggctgcctgaacgtcattgatgtacagactggcatgctgatttcctctatgactagtgatgaaccacagcgctgtttcgtatgggacgggaactccgtcttatctggaagtcagtcaggcgagttactggtgtgggatctgctcggcgctaagatttctgaacggattcagggtcacacgggcgcagtaacttgtatttggatgaacgaacagtgctcctccattatcacaggaggtgaagatcgccagattatcttttggaaactgcagtactag

SEQ ID NO: 232598 - DNA, 2847 bp, synthetic construct
  misc_feature 1..2847: note = Description of Artificial Sequence: Synthetic coding sequence
  source 1..2847: mol_type = other DNA
atgacaggccaagcacgcttccatcgaggagccgaagcttgccgtgccatccgccagtgtaggtcccgacgccctcgggctgcacaccctgaagggcgagcgggaagcgggagagggagccggcacgcatcgcccggagtgcgacggggaggattttctctcctccttctcaacctcgaagagtattatttcgaacagcaccgcgctaaccacatcctccataaagggagccatcacgaaaggaaaatcaggggctccttaaagatatgttcaaagtcggtgatcttcgagccagacagcatcagccagcctatcatcaagataccgctccgggattgcatcaagatcgggaaacatggcgaaaatggtgcgaatagacactttacaaaggccaaatccggcggaatctcacttattttctcacaggtttattttatcaaagagcataacgtagtggcgccatacaagatcgagagaggcaagatggagtatgtgttcgagctggacgttccagggaaggttgaggacgtggtggagaccctgttacaattacaccgggcttcctgcctggacaagttgggagatcagacagcgatgatcacagctattctgcagagcaggctggccagaacaagcttcgacaagaatcgctttcagaacatcagtgagaaactgcacatggagtgcaaggcagagatggtgaccccactggtaaccaaccctggccatgtttgtatcaccgacactaatttgtattttcagcctctaaatggctacccaaaacctgtcgtgcaaattacgttacaggatgtgcggaggatctataaacgaaggcatggactgatgcctcttggtctggaggtgttttgcaccgaagacgacctctgttcggacatctacctgaaattctacgaaccacaggaccgggatgacctttatttttatatagctacttatcttgaacaccatgtagccgagcatacagccgagtcctatatgctgcagtggcagcggggtcacctgtccaattaccagtacctcctccacctgaacaaccttgccgatcgttcttgcaatgatttgtcccagtaccccgtatttccatggatcattcatgactacagctcttctgaattagatctgtctaatccgggaacgtttcgtgatctgtctaaaccagtcggagcattgaataaagagcgcctggagaggttgctgacacgctaccaggaaatgcccgaacccaagtttatgtacgggtctcactacagttcaccaggttacgtcctgttctatctggttagaatagctccagaatatatgctgtgtcttcagaacggtaggtttgataatgccgatagaatgttcaacagcatcgctgagacatggaagaattgtctggatggagctactgatttcaaggagctgatcccagagttctacggcgacgacgtgagcttcctcgtgaactcgcttaaactggacttggggaaacgccaaggaggtcagatggtcgatgatgtggagttgccaccatgggcgtctagccccgaggacttcttgcagaaatcaaaagatgcccttgaatccaactacgtgtctgagcacctgcacgaatggatcgatcttatcttcgggtacaaacaaaaggggagtgacgccgtgggagcccacaatgtctttcatccactgacctacgaaggaggcgtagacctgaattctattcaggatcccgatgagaaagtggcgatgctaactcagatcctggaattcgggcaaacccccaagcagctatttgtgaccccccatccacggaggataacccctaaatttaaaagtctttcccagacgagcagttacaatgcaagcatggccgattccccaggcgaggagtctttcgaagacctgactgaagaatctaagacactcgcttggaacaatattacgaagctccagctccacgagcactacaagattcataaggaagctgtaactgggattactgtgtcacggaatggctcctctgttttcacgacatcccaggattcaaccctgaaaatgtttagtaaggaaagtaagatgcttcagaggtcaatcagtttcagtaatatggccttgagtagctgcttgttgctacctggagatgccaccgtcatcacctcgtcctgggataacaatgtatatttttacagtattgccttcgggcgacggcaggacaccctgatggggcacgacgacgcggtctcaaaaatatgttggcatgataatcgcctgtactccgcctcttgggactctacggtcaaagtgtggtctggcgtgcccgcagagatgccgggaacaaagcgtcaccacttcgatctcctggctgagttagagcacgatgtttccgtggacaccatatccttaaacgccgcttcaacactgcttgtatccgggacaaaggaggggactgtgaatatctgggatctgacaacggccacactcatgcatcaaatcccttgccacagtggtattgtctgtgacactgcattctcccctgattctcgccatgtcctttccaccggaacagatggatgcctcaatgtaatcgacgtgcagaccggtatgcttatctctagtatgacatcagacgaaccgcagcggtgctttgtttgggacggaaactcagtgctctccgggagccagtccggcgagcttctagtgtgggatctactaggagcaaaaatttcagagaggattcaaggccatactggcgctgtcacgtgtatttggatgaatgaacagtgctccagcatcattacaggcggagaagataggcagatcatcttctggaagctgcagtactag

SEQ ID NO: 232599 - DNA, 1173 bp, synthetic construct
  misc_feature 1..1173: note = Description of Artificial Sequence: Synthetic coding sequence
  source 1..1173: mol_type = other DNA
atgggagatacctttatacgacacatcgcactattaggcttcgagaagcggtttgttccatcgcaacattacgtctatatgtttctggtgaagtggcaggacctcagcgagaaagtagtgtaccggcgatttactgagatttacgagtttcacaaaacgctgaaagagatgttccccattgaagctggtgcgattaacccagagaacagaatcatcccgcacctcccagcccctaagtggtttgatggccagcgcgctgctgaaaacaggcaggggacactgaccgaatattgcggaacattaatgtccctgcctactaagatctcccgctgtcctcacttgttagatttctttaaggtaagaccagacgacttaaagcttccaaccgacaatcagactaagaaacccgagacatatctcatgccaaaagatggcaaatccacggccactgatatcaccgggcctattattttacagacatatcgagccattgctaattacgagaagacttccgggtcagagatggcgctctctaccggagatgtggtggaggtggtggagaagagtgaaagcggctggtggttttgtcagatgaaggccaagcgtggctggatacccgcatccttcctggagcccctggacagtccagacgagaccgaggaccccgaacccaactacgccggagaaccctatgttgctattaaggcatacaccgctgtggagggcgacgaagtgagtttgctggagggcgaagccgttgaagtgatacacaaactacttgatggatggtgggtgatcaggaaagatgatgtgaccggatacttcccctccatgtacctccaaaagtcaggccaggatgtgagtcaagctcaaaggcagattaagcgtggcgcaccccctcgacggtctagcattcgaaacgctcattcgattcatcagagaagtaggaagcgccttagccaggacgcttatagaaggaactcagtccggttcctgcaacaacgacgcagacaagctcgccctgggccacagtctcccggatcccctctggaagaggaacgccagacccagcgctccaaaccccaaccagcagtgcccccacggccatccgctgatctgattcttaaccggtgcagcgagagcacaaaacgaaaacttgcctcagccgtgtag

SEQ ID NO: 232600 - DNA, 444 bp, synthetic construct
  misc_feature 1..444: note = Description of Artificial Sequence: Synthetic coding sequence
  source 1..444: mol_type = other DNA
atgaccaagaaacccgaaacctacttgatgccaaaagatggcaaaagtaccgccactgatatcaccggaccgatcattctgcagacgtatcgagcgatagcaaattatgagaaaacttccggcagcgagatggcactgtctaccggtgatgtggtagaggtggtggagaaatctgaaagcggacagacgtcacatttaacagggcttttgccccttgttcttcggaatccccagccccaagcgccatgtcaaggttctggctccttggcacctggccgaacccccgcactgcttggcgctctaaatgtcttgccaaccctttgggtggcattctgcctcagcgtgcaccctgtggtcgccgtgggtatatgcgcttggcaggctggcgctggtcatgtctgtgtgttttgtctcgacggctacggcactgtctgttctctctag

SEQ ID NO: 232601 - DNA, 759 bp, synthetic construct
  misc_feature 1..759: note = Description of Artificial Sequence: Synthetic coding sequence
  source 1..759: mol_type = other DNA
atgggggatacttttataagacacattgcgcttctaggctttgagaagcggttcgtgcccagccagcactacgttcatgtccccggagaaatggccggtcctgtgggcgaaggcggactgccggcactccaccgggatcttagagtcccgtcaccaaagtggttcgacgggcagcgcgctgccgagaatcgccaggggacgctgaccgaatactgtggcaccctgatgtccctccccactaagattagcaggtgccctcacctgctcgactttttcaaagtgaggccagacgacctgaaactgcctactgataaccagacaaagaagcctgaaacctacctgatgccaaaggatggtaaaagcacagccacagatattacagggcctattatcctgcagacctatcgcgctatcgcaaattacgagaagacttccggttcagagatggccttgtccaccggcgacgtggttgaagtggttgagaaaagcgagagcggacagacctcccatttgaccggactgttgcctcttgtgctccgtaatccccagccccaggcaccctgccaggggtctgggtctctcgccccaggacggactcccgctcttctgggcgctctgaatgtgttgcccaccctgtgggtcgccttttgcctgtctgttcatccggtcgtcgcggtcgggatatgcgcatggcaggctggagccggtcacgtatgtgtgttctgcctagatgggtacggtaccgtgtgtagcctgtag

SEQ ID NO: 232602 - DNA, 1581 bp, synthetic construct
  misc_feature 1..1581: note = Description of Artificial Sequence: Synthetic coding sequence
  source 1..1581: mol_type = other DNA
atgagccttgttgaagccatctctttatggaatgagggagtgctcgctgcagataaaaaggattggaaaggcgctctcgacgccttcagtgcagtgcaggatccccactctcggatttgcttcaatatcgggtgtatgtacacaatcctaaagaacatgactgaggcagaaaaagcattcacacggtccatcaaccgggataagcacctagctgtagcctactttcagaggggcatgctttattaccagaccgaaaaatatgacctcgcgattaaggatctgaaggaggcattgatacagctgaggggtaatcagctaattgactacaaaatcctgggccttcagttcaaactgttcgcctgcgaagtgctgtacaatatcgcctttatgtatgctaagaaggaggaatggaagaaagctgaggaacagttggcactggcgacgagcatgaaaagcgagcctcgacattccaaaatcgataaggcaatggaatgtgtctggaaacagaaactctacgagccagtggtaatacctgtgggtaaactcttccgcccaaacgagcgtcaggtggcgcaactcgctaagaaggactacctgggaaaggccacggtcgtcgcaagtgtggtcgatcaggactccttcagcggctttgccccattacagccccaggcagccgaacccccacctaggcctaaaaccccagagatatttcgagcgctcgagggcgaggcacaccgcgtcttgtttgggttcgtgccggagacaaaggaggaactgcaagtcatgcccggtaatatagtgttcgtgctgaaaaaggggaacgataattgggcaacagtcatgtttaacggccagaaagggctagtcccctgtaattacctggagcctgtggaacttaggattcacccacaacaacagccccaagaggagtcgtctccacagtccgatattccagcccctcccagtagcaaagccccaggacggcctcagctatcaccgggacagaagcagaaggaggagcctaaggaggttaagttatcggtgccaatgccatacacgctgaaggtgcactataagtacaccgtggtaatgaaaacacagccgggactgccttattcacaagtgcgggacatggtgagcaagaagcttgagttgcgccttgaacacacaaaactgtcttacagacctcgtgattcaaacgagttagttccactgagcgaggactctatgaaagatgcctggggacaggtgaagaactattgtcttacactttggtgcgagaatactgtgggggatcagggattccccgatgagcctaaggagtctgaaaaggctgacgcgaataatcagacaacagagccgcagttgaaaaagggaagtcaggttgaagcgctgttctcatacgaagccacccagcctgaagacctggagtttcaggagggggatatcattctggtcttatccaaggtgaacgaggaatggctggaaggcgagtgtaaagggaaggtcggcatcttcccgaaagtatttgtagaggactgcgcaaccaccgacctagagagcacccgccgtgaagtgtag

SEQ ID NO: 232603 - DNA, 1581 bp, synthetic construct
  misc_feature 1..1581: note = Description of Artificial Sequence: Synthetic coding sequence
  source 1..1581: mol_type = other DNA
atgagcctggtggaggccatcagcttgtggaacgagggagttcttgcggctgataagaaagattggaagggagccctggacgccttcagcgcagtgcaggacccacattcaaggatttgtttcaacattggctgtatgtacacgatcctaaagaacatgaccgaggctgagaaggcttttacacgttcaattaatcgtgataagcacctggctgtggcatatttccagcgcggtatgctttattaccagacagaaaaatacgatcttgctattaaggacctgaaagaagcgctgatccaattgcggggtaatcagctcatcgattataagattctcgggctacagtttaaactgtttgcttgcgaggtcctttataatatcgccttcatgtatgcaaagaaggaagagtggaagaaggcggaagagcaactggcactcgctacgtccatgaagtccgagccgaggcactcaaagattgataaagccatggaatgtgtgtggaaacaaaaactctatgaaccagtcgtgatccctgttggaaaattatttagacccaatgagcgtcaggtcgcgcagctggcaaagaaggactacctcggcaaagcaacagtcgtggcgagcgtcgtggatcaggattctttctcagggtttgcccctctacagccgcaagctgctgagccacctccaagacctaaaacccccgaaatatttagggccttggagggggaggctcatcgggtgctctttggatttgttccagagacgaaggaggaactccaagtaatgccaggaaatattgtgtttgtgctcaaaaagggtaatgacaattgggccaccgtgatgtttaatggccagaaaggtctcgtgccatgcaactatctcgaacctgttgaactccggatccacccccagcagcagcctcaggaggagagtagtccgcagagcgacattcccgctcctccgtcgtccaaagcccctggcaggccccagcttagtcccggacaaaagcagaaggaagaaccaaaggaggtaaagctgtcagtgcccatgccctataccctcaaagtgcattacaagtacaccgtggtgatgaagactcaacccggactgccttacagtcaagtgagggatatggtctctaagaagctcgagttacggctggaacacacgaaattgtcgtaccgcccaagggattcaaacgagcttgtccctctctctgaggactcaatgaaggatgcgtggggacaggtgaaaaactactgccttaccttatggtgtgaaaatacggtgggcgatcagggttttccagacgagcctaaggaaagcgaaaaagctgatgcaaataatcagacaacggagccacagcttaagaagggatcccaggttgaggccctgtttagttatgaggctactcagcctgaggatctggagtttcaggaaggcgacattatattagttttatctaaggtgaatgaggaatggctggaaggcgagtgtaaaggcaaagtaggcatattcccaaaggtttttgtcgaggattgtgccaccaccgatctggagtctacaaggagggaggtctag

SEQ ID NO: 232604 - DNA, 1797 bp, synthetic construct
  misc_feature 1..1797: note = Description of Artificial Sequence: Synthetic coding sequence
  source 1..1797: mol_type = other DNA
ggatcccctgctcgaggggatgcccctacgtgcctcctgagtgtatcctggcagttgagctggccaccatcattttaccttatcatgtctttggtggaggcgatcagcctatggaatgagggagtcctggcagctgataagaaggattggaagggggcactggatgctttctcagccgtgcaggacccccactcccggatctgtttcaatattggttgcatgtacactattttgaagaatatgacggaggctgagaaggcctttacaagatcaatcaacagagacaaacatctcgcagtggcctatttccagaggggcatgctgtattaccagaccgaaaaatatgacttagcaattaaggacctcaaggaggccttgatacagctgcgaggaaaccagctcattgactacaagattctgggactgcagtttaagctgttcgcctgcgaggtgctgtacaacatcgcttttatgtatgctaaaaaggaagaatggaaaaaagccgaggagcaacttgctctcgctacaagcatgaagagtgagcctcggcattctaagatcgacaaggctatggaatgtgtttggaaacagaagctctatgagccagtggtgatcccagtcggcaagctgttcagacctaacgaaagacaggtcgcacagttagctaaaaaagactatctggggaaggccaccgttgtcgcttctgtggtcgaccaggacagttttagcggattcgccccactacaaccccaggtaagacagtccgatctcctgggggcacaggccggtagcgtgagttccagacaattgcagttggacgtcgagttagagcctggctggtctcaagtaccagggagtaagttttcagtattcgcaccctggcatcacgtcagaggctggggcttggacctggtctcaatcctgtgtcgggctctggagggggaagcccacagggtcctcttcggttttgtgccagagaccaaggaggagctgcaggtgatgcccggaaacatagtgttcgtgttgaaaaaaggcaacgataactgggccactgtgatgtttaatggccagaaagggttggtgccatgtaactaccttgaacccgtggagctcagaattcaccctcagcagcagcctcaggaagagtcctccccccagtcagatatcccggcaccgccatcttctaaagctcctggccgaccacagctgtcacccggtcagaaacagaaagaggaacccaaagaggtgaagttgtcagtgccaatgccttacacgctcaaggtgcattataaatataccgtggtcatgaaaacacagcccggtctgccatattcacaggtgagagacatggtgagtaaaaaactagaactcaggctggagcacactaagctaagctaccgcccacgcgatagtaatgagcttgtgcccctgtctgaggactccatgaaagacgcgtggggccaagtgaaaaattattgtcttactctctggtgtgaaaacaccgtgggggatcagggattccctgacgaacctaaagagtctgaaaaggccgatgcgaataaccaaactaccgagcctcagctgaagaagggcagccaggtggaggctctcttcagttacgaggccacccagcccgaggatttggagtttcaagagggcgacatcatcctcgtgctgagcaaagtgaacgaagaatggctggaaggcgagtgcaaaggaaaggtcgggattttccctaaggtcttcgtggaagactgtgctacgacggatttggaaagtacaagaagggaggtttag

SEQ ID NO: 232605 - DNA, 1446 bp, synthetic construct
  misc_feature 1..1446: note = Description of Artificial Sequence: Synthetic coding sequence
  source 1..1446: mol_type = other DNA
atgtcactagtggaagccatctctctctggaacgaaggtgtattggcggctgataaaaaagactggaagggagccttggatgcctttagcgccgtgcaggacccacattccagaatctgcttcaacatcggctgcatgtataccatcctgaagaatatgaccgaggccgagaaagcctttacccgcagcattaatagggacaagcacctggccgtagcttacttccagcgtggtatgctgtactaccagacggaaaaatacgatctcgcgattaaggacctgaaggaggcactgatccagttaaggggcaaccagctgatagattataaaatacttggcttgcaattcaagttatttgcctgtgaaaagcagaaactgtacgagcccgttgtcatccccgtcggcaaactctttagaccaaacgagcggcaggtagcgcagcttgcaaagaaggactacttgggaaaggcgaccgtggttgcctccgtggtggatcaggacagcttttccggattcgccccactccaaccacaggctgcagagcccccaccaagacccaagacaccagagattttccgggcactggaaggagaggcccacagggtgctcttcggatttgtccctgaaaccaaagaagagctccaggtgatgcccggaaacattgtatttgttctcaaaaaaggaaatgacaactgggccacggtgatgttcaatgggcaaaaaggactggtgccctgcaactatctggagcccgtggaacttcgcattcatccccagcaacagccacaggaagagtcttcaccccaatctgacatccccgctccaccttcctctaaagcccctggaagaccgcagctgtcccctggtcagaagcagaaggaagaacctaaggaggtgaagctgtcggtccctatgccttacacactcaaggtgcactataaatatactgtggttatgaagactcaacctggcttgccttatagccaagtgcgggatatggtatccaaaaagctagagttacggttagagcatacaaaactatcttaccgcccaagagattcaaatgagctcgtccccttgtccgaagactccatgaaggatgcctggggacaggttaaaaattattgtctgactctgtggtgcgagaatactgtgggggaccagggctttcctgacgaacccaaggagtctgaaaaagcagatgcaaacaatcagacaaccgagccacagctcaagaagggatcacaggtggaggcgctattttcttatgaggccactcagccagaggacctggaattccaggagggcgacatcatactcgtattgagtaaagtaaacgaagagtggctggaaggggaatgcaaaggaaaagtcgggatatttccaaaggttttcgttgaggattgtgctactacggacctggaatccacgcgcagggaagtgtag

SEQ ID NO: 232606 - DNA, 1338 bp, synthetic construct
  misc_feature 1..1338: note = Description of Artificial Sequence: Synthetic coding sequence
  source 1..1338: mol_type = other DNA
atgtctcttgtcgaagcaatctcactttggaatgaaggagttctggctgcagataagaaagattggaaaggcgcactcgacgctttctcagcggtgcaggacccccactcccgaatatgctttaatatcggatgtatgtacaccatactcaagaatatgacagaagctgagaaagcctttacaaggtccatcaatagagataaacatcttgctgtggcctactttcagcggggtatgctttattatcaaacggaaaaatacgaccttgctatcaaggacctcaaagaagcactcatacaactgcggggaaatcaacttattgattataagattctggggctgcagttcaagctattcgcatgtgaggtagtggccagtgtggttgatcaggactcattctcgggttttgctcctctccaacctcaagctgcagaaccacccccacggcctaaaacccccgaaatctttagagcattagaaggggaggcccaccgggtgctttttggattcgtgcctgaaaccaaggaggaactgcaggtgatgccagggaatattgtattcgttctgaagaaggggaacgataattgggctactgtgatgtttaatgggcagaaggggctagtgccctgtaattacctggagccagtggaactgaggattcaccctcaacaacagccccaggaagagtcatcaccgcaatctgatattccggcaccgccaagctctaaggccccagggcgtcctcagctatcaccaggccagaagcagaaggaggagccgaaggaggtgaaattgagcgtcccaatgccctacactctgaaggtgcactataagtatacagttgtgatgaagacccaaccaggcttgccgtattcccaagtcagggatatggtgtcgaagaaactcgagctacgcctcgaacatactaaactgtcatatcgacccagggattcaaacgagctcgtaccactgagcgaggactcaatgaaagacgcatggggccaggtaaagaattactgcctgacactgtggtgtgagaataccgtgggcgatcaagggttccctgatgaacccaaagagtctgagaaagcagacgcaaacaaccagactaccgagccacagttgaagaaaggttcccaagtggaggcactgttctcatacgaagcgacccagcctgaggatttggaatttcaagaaggcgatattatcctggtgctcagcaaggtcaacgaagaatggttggaaggcgagtgtaaaggcaaggtcggtatctttccgaaggtgtttgttgaggactgtgctaccaccgatctggagtcgacaaggagagaggtgtag

SEQ ID NO: 232607 - DNA, 432 bp, synthetic construct
  misc_feature 1..432: note = Description of Artificial Sequence: Synthetic coding sequence
  source 1..432: mol_type = other DNA
atgcccggaaatattgttttcgtgcttaaaaaagggaatgataattgggcaacagttatgtttaatggtcagaagggcctagtgccatgtaactacctcgagcccgtagagcttcgcatacacccacagcaacagccacaggaggaaagtagtccccagtccgacattccagctcctcctagcagcaaagcccctgggcgaccacaactaagccccggacagaagcaaaaagaagaaccgaaagaagtgaaactctccgtcccaatgccttatacattgaaggtccactacaaatacacagttgttatgaagacacagcctggcttaccttactcacaggtgcgcgacatggtcagcaaaaaattggaactccgccttgagcacacgaaattatcataccgtccgcgagactcaaacgagttagtgccctag

SEQ ID NO: 232608 - DNA, 171 bp, synthetic construct
  misc_feature 1..171: note = Description of Artificial Sequence: Synthetic coding sequence
  source 1..171: mol_type = other DNA
atgccatatacattgaaggtgcactataagtataccgtagtcatgaagacccaacccggacttccatattcgcaggtgcgcgacatggtgtcaaaaaagttggagctgcggcttgagcatacaaaactgtcatatcgccctcgagacagcaatgagctggtgcccctgtag

SEQ ID NO: 232609 - DNA, 1020 bp, synthetic construct
  misc_feature 1..1020: note = Description of Artificial Sequence: Synthetic coding sequence
  source 1..1020: mol_type = other DNA
atggccgtggctcaacagctgagggccgagagcgactttgaacagctgcctgatgatgtagccatctccgccaatattgctgacattgaggaaaaaagaggcttcacatcccacttcgttttcgtgattgaggtcaagaccaaaggcggatctaagtatcttatctaccgtaggtacagacaattccacgccctgcagtctaagttggaggagcgcttcggccctgattctaagtcaagcgccctcgcttgtactctgccaactcttccagccaaggtttacgtgggcgtgaaacaggagatcgccgagatgaggataccagccctgaatgcatacatgaaaagcctgcttagcctccctgtctgggtgcttatggacgaggacgtgcggatcttcttttaccagtcgccttacgactcggagcaggtcccccaggccttgagacggctgcgcccacggacgaggaaagtgaaatctgtttcgcctcagggcaattccgtggacagaatggccgcaccacgcgctgaggcactctttgacttcacgggaaatagcaagctggaattgaatttcaaggccggagatgtgatttttctgctgagtaggattaacaaggactggctggagggcaccgtgagaggggcaacaggcattttccctctctcctttgttaagattttgaaagattttcctgaggaagatgatccaaccaattggctgcgatgttactactacgaagacaccatctctacaataaaagatatagctgtggaagaagatttaagtagtacacctttgctgaaggaccttctcgagctgacacggagagaattccagagagaagacatcgccctcaactacagggacgcagaaggagacctcgtccggctgctctctgacgaggacgtggctctgatggttcgccaggccagagggcttccctctcagaaacgtttgtttccatggaagctccacatcacgcagaaagataactaccgcgtctacaatactatgccctag

SEQ ID NO: 232610 - DNA, 1047 bp, synthetic construct
  misc_feature 1..1047: note = Description of Artificial Sequence: Synthetic coding sequence
  source 1..1047: mol_type = other DNA
atggccgtggcgcagcagttgcgggctgagtcagactttgagcaactgccggacgacgtcgccatatctgcaaatatagccgatattgaagaaaaaagggggtttacgtcacattttgtctttgtgattgaagtaaaaaccaaggggggtagcaaatacctgatatacaggcgttataggcaattccacgccctgcagagcaagttggaggagcgatttggtccagatagcaagtccagtgctttagcttgcacccttccaactctcccagccaaggtctacgtgggagtgaagcaggagatcgcagagatgaggataccggctcttaacgcttatatgaagagtctcctgagcctgccagtctgggtgctgatggatgaagatgtgaggatattcttttatcaaagcccctatgattcagaacaagtgccacaggccctgaggcgcctgcgccctcgcactaggaaggtgaagtccgtatcaccccaggggaacagtgtggacaggatggccgctcctagagcagaagccctgtttgacttcacagggaacagcaagcttgaactcaattttaaggctggcgacgtaatatttttactttcgcggatcaataaggactggctggaggggacagtccgcggtgccacaggcatcttcccattgtcatttgtgaagattctcaaagatttccctgaggaggacgacccaacaaattggctgcggtgttactactatgaagacacgatatccacaataaaatccgtggcctgggaaggcggagcttgccctgcttttttgccttctctccgacccctgccattgactagtccttcccatggatccctgagccattccaaagcccctagtggaagccagatgtctcacaacgctgtcactagtcatcaaaggcctggctggcccggtcagccacactctccctttccacatccgacaccccatttccagcccgacgcctcacttctccagcctgtaacacctttgggcacctcgcgttggcggaagatttcagcagccctgccctactag

SEQ ID NO: 232611 - DNA, 501 bp, synthetic construct
  misc_feature 1..501: note = Description of Artificial Sequence: Synthetic coding sequence
  source 1..501: mol_type = other DNA
atgcgaataccggctctcaacgcctacatgaagtctctcttatcgcttcccgtgtgggtcctaatggatgaggatgtgcggatcttcttctaccagtcgccgtatgactccgagcaagtgcctcaggctcttaggcgactccgacccaggacacgtaaggtgaagagcgtgtctcctcagggcaatagcgtggacaggatggcagctccacgggctgaggctcttttcgacttcaccggaaattctaagctcgaattgaactttaaggcaggggacgtgatcttcttgctgtcacgcatcaataaagactggctggagggcaccgtcagaggtgctacaggcatctttcctctcagtttcgtgaagatcttgaaagactttcccgaggaagatgaccccaccaactggctaagatgctattattacgaagatacaataagcacaattaagagcgtggcttgggaaggcggagcttgtccagctttcctgcctagtctttag

SEQ ID NO: 232612 - DNA, 480 bp, synthetic construct
  misc_feature 1..480: note = Description of Artificial Sequence: Synthetic coding sequence
  source 1..480: mol_type = other DNA
atgaatgatataagtcagaaagctgagatcctccttagctctagtaagccagttccaaagacgtacgtgcctaagctgggaaagggagatgtaaaggacaaattcgaagctatgcaacgcgctagagaagagcgcaatcagcgcagatcccgcgatgaaaaacagcggaggaaggaacagtacattcgagagagggaatggaatagaaggaagcaagagattaaagaaatgcttgcatctgatgatgaagaagacgtaagctctaaggtcgagaaagcttacgtgccaaagctgacagggactgtgaaaggaaggttcgccgagatggagaaacagagacaggaagaacagcgaaaaagaacagaggaggagcggaagcgaagaattgaacaagacatgctagagaagcggaaaattcagcgggaattggccaagagggcagagcaaaaattagctcgcagagatggtgcccacctgtag

SEQ ID NO: 232613 - DNA, 1836 bp, synthetic construct
  misc_feature 1..1836: note = Description of Artificial Sequence: Synthetic coding sequence
  source 1..1836: mol_type = other DNA
atgaacgatatatctcaaaaggctgagatcaaagaaatgctggcgagtgatgatgaagaagatgtgagcagtaaggttgaaaaggcatatgttcccaaactcactggcacggtgaaagggcgattcgctgagatggagaaacagaggcaggaggagcaaagaaaaagaacggaggaagagcgcaagcggaggatcgagcaagatatgctcgaaaagcgcaagatccaaagagagttggctaagcgagctgagcagatagaagacatcaacaacactgggaccgagtctgcttccgaggaaggtgatgattcccttcttatcacagtagttccagtgaaaagctataagaccagcgggaaaatgaagaaaaactttgaggacctcgaaaaggagcgggaggagaaggagcgaattaagtacgaggaagataagcgcatccgctacgaggagcaacggccatcactaaaggaggctaaatgccttagcctggtgatggacgatgaaatcgagtctgaggccaaaaaggagtcattgtcccctggaaagctcaaactgacctttgaagaactagagagacagcgccaagaaaacagaaagaaacaggctgaagaagaggcacgcaagagactcgaagaagagaagcgcgctttcgaagaagcgaggaggcaaatggtgaatgaagatgaagaaaatcaggacacagctaagatatttaaaggttacagaccaggcaagctgaagctcagttttgaggaaatggagcgccagagacgagaggacgaaaaacgtaaggccgaagaagaagcacgcaggagaatcgaggaggaaaagaaagcattcgctgaggcgagacggaatatggtagttgacgacgacagccccgaaatgtataaaaccatcagtcaggaattcctcaccccaggcaagctcgaaatcaatttcgaagaattgctgaagcagaaaatggaggaagaaaaacgtcggacggaggaagagaggaaacataagctggagatggaaaagcaagagtttgaacagctccggcaggaaatgggcgaggaggaagaggagaacgagacatttggcctctcccgcgaatacgaggagctgatcaagctgaaacgctcaggctctattcaagcaaagaacctgaaatccaagttcgagaagatcgggcagctttctgagaaggagatccagaaaaaaatcgaggaggagcgggctcgcaggcgggctatagatctggagataaaggagcgagaggcagagaacttccatgaggaagacgacgtggatgtgcgacccgcaaggaagagtgaggcgccattcacccacaaggtgaatatgaaggcccgattcgaacagatggccaaagcccgtgaggaagaagaacagcgccgtattgaggaacagaaactgttacgcatgcagttcgagcagcgggagattgatgcggctttacagaagaaaagggaggaagaggaggaagaggagggaagcattatgaatggatcaacagctgaggacgaggagcagacccggtccggcgcaccttggttcaaaaagcccctcaaaaatacatccgtcgtagacagtgagccggtccgctttacagtcaaggtcacaggagagcccaaaccagagatcacctggtggtttgagggggaaattctgcaggacggtgaagattatcagtacatcgaaagaggcgagacctactgtctgtatttgccagagactttccctgaagacgggggtgagtacatgtgtaaggccgtcaacaataagggaagcgctgcatcaacttgcatcctcacgatcgagtccaagaattag

SEQ ID NO: 232614 - DNA, 2028 bp, synthetic construct
  misc_feature 1..2028: note = Description of Artificial Sequence: Synthetic coding sequence
  source 1..2028: mol_type = other DNA
atgaatgatatctcccaaaaggcagagattttgttgagcagtagtaagccagtacccaagacgtatgtcccaaaactcggcaagggcgatgtaaaagataagttcgaggccatgcagagggccagggaagagcgcaatcagcgcagatcacgggatgaaaagcagcggagaaaagagcaatatattagggaacgcgaatggaatagaaggaaacaggagatcaaagaaatgctcgcttcggacgacgaggaggacgttagcagcaaggtggagaaggcatacgtccccaaactgaccggcactgtaaagggcaggtttgccgaaatggagaagcagcgccaggaggaacagcggaaaaggaccgaggaggaacgaaaaagaaggatcgagcaggatatgctagagaaaagaaagattcaaagggaacttgctaaacgcgctgagcaaattgaggacattaacaacacaggcacagaatctgcaagcgaggagggtgacgattccctgctgattaccgtagtgcccgtaaagtcgtataaaacctctggaaaaatgaagaaaaactttgaagatctggaaaaggagcgcgaagagaaggagaggatcaaatacgaagaggataaaaggattagatacgaggaacaacgcccttccctgaaggaagccaagtgcctttctctggtgatggatgacgagattgaaagcgaggcaaaaaaggaaagtctctctccaggaaaactcaagctgacgttcgaagagctggagcgtcagcgccaggagaatagaaagaaacaagccgaggaggaagcgaggaagcgcctcgaggaggagaaaagggccttcgaggaagccaggcgtcagatggtcaacgaggacgaggaaaaccaggacactgccaagatctttaagggctatcgacctggcaaattaaaactatcgtttgaagagatggagcgtcaacggagagaagacgaaaaacggaaagccgaggaagaagccagacgtcggatagaagaggagaagaaggcctttgcggaagcacgacggaatatggtggtggacgacgatagcccagagatgtacaagacaatcagtcaggaattcttaacacccggtaagctagaaatcaattttgaggagctcctgaaacagaaaatggaagaggaaaaacggaggaccgaggaggaacgaaaacataaattggaaatggaaaaacaagaatttgaacaactgaggcaggagatgggcgaagaggaagaggaaaatgaaaccttcggactgagccgggaatacgaggaactcattaagctgaagaggtctggcagtatccaagctaaaaatcttaaatcaaagtttgaaaagataggccagctgtccgaaaaagagattcaaaagaagattgaggaggagcgcgctcgtagaagggcaatagaccttgagatcaaagagcgcgaagctgagaacttccacgaggaggacgacgtcgatgtcagacctgcaagaaagagcgaggcacctttcacacataaggtaaacatgaaggctcgatttgagcagatggccaaagcacgcgaagaggaagagcagcgtcgcattgaagagcagaaattgctgcgcatgcagttcgaacagcgcgaaattgacgccgcattgcagaaaaagagggaagaggaggaagaagaggaggggtccatcatgaacggatccactgccgaggacgaggaacagacccgcagcggggcaccatggtttaagaaacccttgaagaacacatcagtagtagactctgagccagtccggtttacagttaaagtgactggggagcccaaaccggagataacctggtggtttgaaggggaaatcctgcaggatggcgaggactaccagtatattgagcgaggggagacatattgtctatacttacccgagacattccctgaggatggcggagagtatatgtgcaaggcagttaataacaaaggctccgcggcttctacatgcatattgaccatagagtcaaagaattag

SEQ ID NO: 232615 - DNA, 1731 bp, synthetic construct
  misc_feature 1..1731: note = Description of Artificial Sequence: Synthetic coding sequence
  source 1..1731: mol_type = other DNA
taagtgaaggggcgatttgccgaaatggaaaagcaacgccaggaagaacagcgcaagcgcaccgaggaagagcgaaaacgacgcattgagcaagacatgctggaaaaacggaaaattcagcgtgagttggccaagcgggcagaacagatcgaggacataaacaatactggaaccgagagcgcttccgaggagggcgacgatagccttcttattacggtggtaccagtgaaatcttacaaaacatcgggcaaaatgaaaaagaattttgaagacctggagaaagagcgcgaagagaaagagagaatcaagtacgaagaagacaaacgcattcggtacgaggagcagcgaccatctctgaaggaagcgaaatgcctttcactggtgatggatgacgaaatcgaaagcgaggcaaagaaggaatctctgagccccggaaaacttaagctgaccttcgaggagctagagagacagcgccaggaaaatcgtaagaagcaggctgaggaggaagcccgtaaaaggctggaagaggaaaagcgcgctttcgaggaggctcgcagacagatggtgaatgaagacgaggagaaccaggacacagccaaaatcttcaaaggctatagacccggaaaactgaaactgtcttttgaagaaatggagcgccaaaggagagaagatgaaaaaaggaaagccgaggaagaagccaggaggaggatcgaagaggaaaagaaagcgttcgctgaagctaggcgaaatatggtggtcgacgacgactctcccgaaatgtacaagactatatcccaagagttcctcacccccggtaagctggagatcaatttcgaagagctgctcaagcagaaaatggaggaggagaaacggaggaccgaggaggagcgcaagcataagctggaaatggagaaacaggaatttgagcagttacgtcaggaaatgggcgaggaagaggaggaaaacgagacattcggtttgtcccgggagtatgaagagctcatcaaactgaagcgcagcgggagcatacaggccaagaacctgaagtctaagttcgagaagattggccaactgtctgaaaaggagatccagaaaaagatcgaggaggaacgggctcggagacgtgcaatcgacctcgagatcaaggagcgtgaggctgagaactttcacgaggaggatgacgttgatgtgcggccagccagaaagtctgaggctccatttacccataaagtgaatatgaaggccaggttcgaacagatggccaaagccagagaagaggaagagcagcgcagaatcgaagagcaaaagcttctccgaatgcaattcgagcagagggagatcgacgccgcactccagaagaaacgtgaagaagaggaggaagaggaggggagcatcatgaacgggtccacagcagaagacgaggagcaaacaagatctggggctccctggtttaaaaagcctttaaaaaataccagcgtggtggatagtgaaccagtcaggtttaccgtcaaggtgaccggagagccaaagccggagattacctggtggtttgaaggcgaaatcctgcaggacggggaggactaccaatacatcgaaaggggggagacttattgcctatatctgcctgaaacattcccggaggacggcggagaatacatgtgtaaagcagtaaacaacaaaggcagcgccgcatctacttgcatactgaccattgaaactgacgattattag

SEQ ID NO: 232616 - DNA, 966 bp, synthetic construct
  misc_feature 1..966: note = Description of Artificial Sequence: Synthetic coding sequence
  source 1..966: mol_type = other DNA
atgaacgacatatcccaaaaagccgaaatcaaagagatgctggctagtgatgacgaagaagacgtatccagcaaagtggagaaagcatatgtgcctaaattgaccggtactgtcaagggacgattcgctgagatggaaaaacaacgccaggaagaacagaggaagcggacagaagaagagcgtaagcgtaggatagagcaggatatgctcgaaaaacgaaaaatccagcgcgaactagccaaacgagctgagcagatagaggacattaacaacactggcaccgaatctgcctctgaggagggggacgatagtttgctcatcacggtcgtgcccgtgaaaagctacaagaccagcggaaaaatgaagaagaactttgaagacctcgaaaaggaacgagaggagaaggaaagaattaaatacgaagaggacaagagaatcagatacgaagaacagcggccaagcctgaaagaggccaagtgcctttccctagtgatggatgatgaaatcgagtccgaagccaaaaaagagtctctatcaccaggcaagctcaagcttacctttgaagagctggagaggcaaaggcaggaaaaccggaagaagcaggcagaagaggaggcaagaaaacggttggaagaagaaaaaagagccttcgaagaagcccgtcgccagatggtgaacgaagacgaggagaaccaagatacagccaagattttcaaggggtatagacccggtaaattgaagctcagtttcgaggagatggagcgacagaggcgggaggatgagaaacgtaaggctgaagaggaggctaggaggaggatagaagaggaaaaaaaagcattcgccgaggcccgacgaaacatggtcgttgatgacgactctcccgagatgtataagacaatttcacaggaatttctgaccccgggaaagctggaaattaacttcgaggagctgctgaaacagaagtag

SEQ ID NO: 232617 - DNA, 1308 bp, synthetic construct
  misc_feature 1..1308: note = Description of Artificial Sequence: Synthetic coding sequence
  source 1..1308: mol_type = other DNA
atgaatgatatctctcaaaaggctgaaatcctattgtcaagcagtaagcctgtccctaaaacctacgtgcccaagctcggcaaaggggacgttaaggataagtttgaagctatgcagagagcccgtgaagaacgaaaccagagaagatctcgcgatgagaaacagaggaggaaggaacagtatatccgggagcgcgaatggaacaggagaaagcaggagatcaaggagatgttggcctccgacgacgaggaggacgtcagtagcaaggtggaaaaggcgtatgtgcccaagttaaccggcactgtcaaggggaggttcgctgaaatggagaagcagcgacaggaggaacagagaaaaaggaccgaagaagaacgcaagagacggattgaacaggatatgcttgaaaagcgtaaaatccaacgagaacttgctaagcgtgctgaacaagagggagacgattctctgctgatcactgtggtcccagtgaaaagctataaaacctctgggaagatgaagaagaactttgaagacttggagaaggagcgagaagagaaggaacggatcaagtatgaagaagacaaacgaatccgctatgaagaacagcgcccatccttgaaagaggccaagtgtctctcactggtgatggacgatgaaattgaatcagaagcgaagaaggaatccctgtcccctggcaagctcaaactgacgttcgaggagctggaaaggcagcggcaggagaaccgtaaaaaacaggctgaggaagaagcgcgtaaaaggcttgaagaagagaaaagggcgtttgaggaagcacgacgtcagatggtaaatgaagacgaagagaatcaggacaccgccaagatctttaagggatacagaccaggcaaactgaagctaagtttcgaagagatggagaggcaacggagggaggatgagaagaggaaagcggaagaagaggctcgcaggaggatcgaagaggaaaaaaaagcctttgccgaggctaggaggaatatggttgttgacgacgactctcccgagatgtacaaaacaatcagccaagagttccttacccctggcaaactcgagattaactttgaggaactgctgaagcagaagatggaggaagagaaacggcgtaccgaggaggagcggaaacacaaacttgagatggagaagcaggagttcgagcaacttaggcaggaaatgggggaggaggaagaggagaatgaaacattcgggttgtctcgcgagtatgaggaactgatcaaacttaaaagatcaggctccattcaagcgaaaaaccttaagtag

SEQ ID NO: 232618 - DNA, 1989 bp, synthetic construct
  misc_feature 1..1989: note = Description of Artificial Sequence: Synthetic coding sequence
  source 1..1989: mol_type = other DNA
atgaacgatatctcgcagaaggcagaaatcctcctgtcgtccagcaagccagtgcctaagacttacgtccctaagctggggaaaggagatgtgaaggacaagttcgaagcgatgcaaagagctagagaagagcggaatcaacgccgttccagagacgaaaaacagcggagaaaagagcaatacatacgcgagagggagtggaatcggcgaaaacaagaaataaaagagatgctggccagcgacgatgaggaagacgtttctagtaaagttgagaaagcctatgtgccgaagttgaccgggacagtaaagggcagattcgccgaaatggagaagcagcgccaggaagagcagcgaaaaaggaccgaagaggagagaaaaaggaggatagaacaggatatgcttgagaagaggaagatacagagagaactggcaaagagagccgagcaggagggcgatgactcgcttctcataacggtggtccccgtaaaatcttataagacatctgggaagatgaagaaaaacttcgaggatcttgaaaaagaaagagaggagaaggagagaataaagtacgaagaggataaaaggattaggtatgaggaacagaggccctcactgaaagaagccaagtgcctcagcctggtgatggatgatgagattgagtccgaggcaaagaaggaaagcctgagccctggcaagttgaaactgactttcgaggagcttgagcgacagcggcaggagaaccggaagaagcaagctgaggaagaggctagaaaacgactggaagaagagaagagggcgttcgaggaggctcggagacaaatggtcaatgaggacgaggaaaaccaggacaccgctaagatcttcaagggctaccgccctggaaaactcaaattgtcctttgaagagatggaacgtcagaggagggaagacgagaaaagaaaggctgaagaagaagccaggcgcagaatcgaggaggaaaaaaaggcatttgcagaggctcgcaggaacatggtggttgatgatgattcgcctgaaatgtataagaccatatcgcaggagtttctaactccaggtaagcttgagatcaattttgaggagctgcttaaacaaaagatggaggaagaaaaaaggcgtaccgaagaagagaggaaacataagcttgagatggagaaacaggagtttgaacagcttagacaagagatgggcgaggaggaggaagaaaatgagacatttggattgtctcgggaatacgaggagctcattaagctgaagagaagcggttcaattcaggccaagaacttaaaatcaaaattcgaaaaaatcggccagttatccgagaaagaaatccagaaaaagatagaggaggagagagctagacgcagggcaattgacctggagattaaggaacgcgaggcagagaacttccacgaggaggatgacgtggacgtccggcctgccaggaaatcagaggcccctttcacgcacaaggtgaatatgaaagctagatttgaacagatggccaaagctagggaggaagaagaacagaggaggatagaagagcagaagttactcagaatgcagttcgagcagcgggagatagacgctgcgctgcagaaaaagcgagaggaggaagaggaagaggaagggtccattatgaatgggtctacagcggaagatgaagagcagacccgatcgggagctccctggttcaaaaagccgttaaaaaatacttccgtggtggactccgagccagtaaggtttaccgtcaaagtcaccggagagcccaagcctgagattacctggtggttcgaaggcgaaatcttgcaagacggagaagactatcagtacatcgagagaggtgaaacttactgtttgtatctcccagagacatttcccgaggatggcggtgaatatatgtgtaaagccgtgaataacaaagggagcgctgccagcacctgtattttaaccattgaaaccgacgactactag

SEQ ID NO: 232619 - DNA, 813 bp, synthetic construct
  misc_feature 1..813: note = Description of Artificial Sequence: Synthetic coding sequence
  source 1..813: mol_type = other DNA
atggaaaatcagccagttagatggagggctctacctggcctgccacgccctcctgggcttcccgcagcaccatggctgcttctgggtgtgttgttattgcccggaaccctgaggctggccggtggacagtccgtcactcacactggcctacccattatggccagtttagcaaatacggcaatcagcttttcatgtcgcataacttatccgtatactccccagttcaaggtgtttactgtgtcctatttccacgaggatttgcagggacagcgttccccgaagaagcccactaattgccacccagggctcgggaccgagaatcagagccacacactggattgccaggttacactggtgctgcccggtgcatctgccaccggaacctactattgttcggttcactggccacatagcacagtacggggtagtggcacctttattcttgtacgcgacgccggttaccgggaaccgcctcagagcccacagaagctgctgctctttgggttcacaggtctcctgagtgttttatctgtcgtgggcaccgccctgctcctatggaataagaaacgcatgcgcggacctggcaaggaccctacgcgaaaatgcccagatccgcgttctgcctcttccccaaagcagcacccttcagaaagcgtctataccgcactgcagcgtcgcgaaacagaggtttatgcctgtatcgaaaatgaggatggcagcagtcccacagcaaagcagtcaccactaagccaggagaggccccacagattcgaggatgacggagaactgaacctcgtgtatgaaaacctgtag

SEQ ID NO: 232620 - DNA, 1248 bp, synthetic construct
  misc_feature 1..1248: note = Description of Artificial Sequence: Synthetic coding sequence
  source 1..1248: mol_type = other DNA
atggcccctgtttccggctcccgatctccagatagggaagcttctggtagtggaggaagacgacggtcctcctctaaatccccaaaaccctcaaagtcagctagatctcctagggggcgtagatcaaggtcacattcttgttctagaagcggggaccgcaacggtctcacccatcagctgggtgggctttctcagggaagccggaaccagagctaccggtcccgctcccgctccaggagtcgagaaagacctagcgcaccaagagggatccccttcgcctctgctagcagttcggtctattatggcagctacagccggccttacggctccgataaaccctggccctcgctcttggacaaagagagagaggagtccctgagacaaaaaaggctgagcgagcgtgagaggatcggtgagctcggggcacccgaggtttggggccttagccctaagaaccctgagccagatagcgatgagcacacccctgtggaagacgaagagccgaagaagagcacaacatccgcatctacgtccgaagaagaaaaaaaaaaaaagtctagtcggtccaaagagcggagcaagaaacggagaaaaaagaaaagtagtaagcgaaagcataagaaatactcggaggacagcgacagcgactcggacagcgaaaccgactcctccgatgaggacaataaacggagggctaaaaaggcaaagaagaaggagaaaaagaaaaaacataggagcaaaaagtataagaagaagcggtcaaagaaatcccgcaaggaatcctctgatagctcttcaaaggagagccaggaggagtttctggaaaatccttggaaagatcgtaccaaggcagaggagccatctgatctgattggccctgaggctccaaaaaccctgaccagtcaggatgacaagccactaaattatgggcacgcactcttgcctggcgaaggggctgccatggctgaatatgttaaggccggtaagagaatccccagacgaggagagatcggactgacgtccgaagaaattgcgtcttttgaatgtagtggttatgtgatgagcgggagcaggcacaggcgtatggaagccgtgcgcctcaggaaggagaatcaaatctattccgccgacgagaagcgcgctctcgccagtttcaaccaagaagaaagaagaaagagagaaaacaagatccttgcatccttccgcgaaatggtgtacaggaagacgaagggcaaagatgataaatag

SEQ ID NO: 232621 - DNA, 2073 bp, synthetic construct
  misc_feature 1..2073: note = Description of Artificial Sequence: Synthetic coding sequence
  source 1..2073: mol_type = other DNA
atggagaagatattacaaatggcggagggtatagatataggggagatgccctcttacgatcttgtgttgtctaaaccatctaagggtcagaagagacacctttctacatgcgatggccagaacccacccaaaaaacaagccggaagcaagtttcatgcgcgtccccgattcgaacccgtccactttgtagcaagttcctccaaagacgagaggcaagaagacccttacgggcctcaaactaaagaagtaaacgagcagacacacttcgcttccatgcctcgcgatatctaccaagattacacacaggacagtttctctattcaggatgggaacagccaatattgcgatagctcaggatttatactgaccaaagaccaacctgtgactgccaatatgtatttcgattcgggtaatccagcccctagtacgacctcccagcaggccaactctcagtctactcctgagccaagccctagtcagacctttccggagagtgttgtggcagagaaacaatatttcatagaaaagctaacagctaccatatggaaaaatctatcaaatccagaaatgacctccgggtccgacaagattaactacacttatatgctcacgcgatgtattcaggcttgtaagacgaacccagaatacatctacgcccctctaaaggaaatacctcccgcagatattcccaagaacaagaagctactcacggatggatatgcttgtgaagtgagatgccaaaacatttacctgacaacagggtacgcgggtagtaagaatggctcgagggatcgcgcaacagaactcgctgtgaagttattgcagaaacgcatcgaggtcagggttgtgaggagaaagtttaaacatacattcggggaagatctagtggtctgtcagataggcatgagcagctatgagtttcctcccgcactgaaaccaccggaggatctcgttgtgcttgggaaggatgcttccggccagcccattttcaatgcgtctgcaaagcattggactaacttcgtgatcactgagaacgccaatgacgctattggaattctgaataatagcgcctccttcaataagatgtccatcgaatataagtatgaaatgatgcctaatcgcacatggagatgccgcgtgtttctccaggaccattgtctggccgaaggctatggcactaagaagacaagcaagcatgccgcagccgatgaagccctcaagatactgcagaaaacccagcccacttatccttctgttaaatcatctcagtgccatactggctcatcccctcgcggaagtggaaaaaagaaagatatcaaggacctcgttgtgtacgagaattcctcaaatcccgtctgtacactgaatgacactgcccaatttaaccgtatgaccgtggaatacgtctatgagagaatgacaggcctgaggtggaaatgtaaggttatcttggagagcgaggtcatcgccgaggccgtgggagtgaaaaaaacagtgaagtacgaagctgccggagaagctgtcaagactctgaagaagacacaacccactgtgattaataatctgaaaaaaggcgctgtggaagacgtgatctctcgaaacgaaatccaaggtcgctcagcagaggaggcttacaaacaacagattaaggaagataatatcggtaatcagcttcttcgcaaaatggggtggacgggagggggtctgggcaagtctggggaaggcatccgcgaaccgatatccgtcaaagagcagcataagcgtgagggcctcggacttgacgttgaacgcgtcaataagatcgcaaagcgcgatattgagcagattatcagaaattatgcgagatcagaaagtcacacggatcttactttttccagggaactgacgaatgacgagcgcaagcagattcaccagatagctcagaaatacggcctgaaatccaaaagccacggcgtaggtcatgacaggtatctggttgtagggagaaagcgtcggaaagaagacctgttggatcagctgaagcaggaggggcaggtgggccactatgagttagtgatgcctcaggctaattag

SEQ ID NO: 232622 - DNA, 2073 bp, synthetic construct
  misc_feature 1..2073: note = Description of Artificial Sequence: Synthetic coding sequence
  source 1..2073: mol_type = other DNA
atggagaagattctccagatggctgaaggaatcgacattggtgagatgccatcatatgacttagtcctttctaagcccagcaaaggacagaaaaggcatctgagtacttgcgacggccagaacccccctaagaagcaagcaggctcgaagttccacgcaagaccccgattcgagccggttcatttcgtggcgtctagctccaaagatgagcggcaagaggatccatacggaccccagacaaaagaagtcaatgagcagactcatttcgccagcatgcctagagacatctatcaggattacacccaggacagcttctctattcaggacggtaacagtcagtattgtgacagctccggatttatcctcactaaagaccagcccgtaaccgcaaacatgtacttcgatagcggcaaccccgctccaagcaccacgtctcagcaagctaattcccagtccactcccgagcctagtccttcccagactttccccgaatccgtcgtcgccgaaaaacaatacttcattgaaaagctgacagctacaatctggaaaaacctctccaaccctgaaatgacatcgggttcagacaagattaattacacgtatatgctcacaaggtgcatccaggcttgcaagacgaacccggaatacatctacgcccctctgaaagaaatcccaccagccgatattccaaaaaacaagaaattactcacggatggctacgcctgcgaggtgaggtgtcagaacatttaccttacgacaggctacgcaggatcaaagaacggttccagagacagggccaccgagcttgctgtgaagctgctacagaagcgcattgaagttagagtcgtgaggcggaaatttaaacatacctttggggaggatctggtcgtgtgccagatcggcatgagtagctacgagtttccccctgcccttaagcccccagaggacctggtggtgctgggcaaggacgcgtcaggacagcccattttcaatgcctctgctaaacattggaccaatttcgtaatcacagaaaacgcgaacgatgccatcggaatcctgaataacagcgcatctttcaacaagatgtcaatagaatacaaatacgagatgatgcccaacaggacatggcgttgtagggtgttcctccaggaccactgtctggccgagggatacgggacaaagaagactagcaagcatgctgcggctgacgaggcgctcaagattctccagaaaacccagcctacttatccttcagtcaaatctagtcagtgccacaccggctcctcgcctcggggtagtgggaagaagaaggacatcaaggatttggtggtttacgaaaacagtagcaatccagtgtgcaccttaaatgacaccgcccagttcaaccgcatgacagtcgagtacgtgtacgagcgaatgactgggctgcgttggaaatgcaaggtgatcctggagagcgaggtgatagccgaggctgtcggggttaaaaaaacagtgaaatacgaggctgccggtgaggccgtcaaaacgctgaagaagacgcagcctaccgtgattaacaacctcaaaaagggcgcagttgaagacgtgatcagcaggaatgaaattcagggccgttctgccgaagaagcatataaacagcagataaaggaagataacataggcaatcagctgctaagaaaaatgggatggaccggcggaggactcggtaagtcaggcgaggggatccgtgagcccattagtgtcaaagaacaacataagcgcgaaggcttgggcctcgatgtcgaaagagtgaataaaatcgccaaacgcgacattgagcaaataatacgcaattacgcacggtcagagtctcatacagatctcaccttcagtagagagctgacaaacgacgagcggaagcagatccaccagatcgcccagaagtacggtctcaagagcaaaagccatggcgtgggccatgaccggtatctggtggtcggtcgaaaaagacggaaggaggacctgctggaccagctgaagcaggagggccaggtcggacactacgaactcgtgatgccgcaggcaaattag

SEQ ID NO: 232623 - DNA, 2118 bp, synthetic construct
  misc_feature 1..2118: note = Description of Artificial Sequence: Synthetic coding sequence
  source 1..2118: mol_type = other DNA
atgggctttatgctgcccttgatcttccgatattctcccaggcttatggaaaagatcctgcagatggcagaaggcattgatatcggagaaatgccttcatatgacctggtgttatcaaagccctcaaaggggcagaagcgccacctctccacctgcgatgggcagaatcctcctaagaagcaggcagggtccaagtttcatgccagaccaagatttgagcccgtgcactttgtagccagctctagtaaggacgaaaggcaggaagacccatacgggccacagacgaaggaagtcaatgagcagactcatttcgcatcaatgccccgtgatatttatcaagactatactcaggactccttttctattcaggatgggaacagccaatactgtgactctagtggcttcatattgaccaaagaccaacccgtgaccgccaacatgtacttcgacagcggaaaccctgcccctagcacgacatcccagcaagcaaactcacaaagcacaccagaacctagtccatctcaaacgtttcctgaaagcgttgtggccgaaaagcagtattttattgaaaaactgacagccacaatttggaaaaacctttctaaccctgaaatgacgtctggttctgacaagattaattatacctatatgctgacaagatgcatccaggcttgcaagaccaaccctgagtacatatacgcccctctaaaggaaattcctccggctgacatccctaagaacaaaaaactcctgaccgacgggtatgcatgcgaggtgcggtgccagaatatttaccttaccaccggatacgccggtagtaagaatggatccagggatcgcgcaaccgaactggccgtgaagctgctgcagaagcgcatcgaagtgagggtggtgcgtcggaagttcaaacatacattcggcgaagacctcgtggtttgtcaaatcgggatgagtagttatgagttccctcctgcattaaagcctccagaggacttggtggtgctggggaaagacgcatcgggacaacctatctttaatgcatcagccaagcattggactaattttgtgattactgagaatgctaacgacgctatcggtattctaaataactcagcctccttcaacaaaatgtccatcgaatataagtacgaaatgatgcccaatcggacatggagatgcagggttttcctccaggatcactgcctggcagagggctatgggacaaagaagacgtcgaaacatgctgctgccgacgaggcgctcaaaattttacagaagactcaaccaacttatcccagcgtaaagagtagtcagtgtcatacaggaagctcacccaggggatccgggaaaaagaaagacattaaggatttggtggtgtatgagaattcctccaaccccgtctgtactttgaacgacacagcccaattcaatcgaatgaccgtggaatacgtgtacgagaggatgacagggctgcgctggaaatgcaaagttatcttggaatccgaagtgattgccgaggctgtgggcgtcaaaaagaccgtcaagtacgaggccgcaggcgaggccgtgaagactctaaagaagacccagcccacagtgatcaacaatctcaagaagggcgcagtcgaggatgtgatttcccggaatgaaatccaggggcgatctgccgaggaggcatacaagcaacaaatcaaagaagacaatatcggcaatcagctactgagaaagatgggatggaccgggggaggcctggggaagtctggcgaaggcattagagagcccatctccgtgaaggagcagcacaagagagagggactcgggttggacgttgagcgcgtcaataagattgctaagagggacatagaacagatcatcagaaactacgccagatctgagagccacacagatctcactttcagccgcgagttgacaaacgatgaacggaagcagatccatcagatcgcccagaaatatggcctgaagtctaaaagccacggggtgggccacgacagatatctcgtggtggggcgaaagagacgtaaagaggatctgctggaccagttgaaacaggaagggcaagtgggccactatgagctagtcatgccgcaagccaattag

SEQ ID NO: 232624 - DNA, 570 bp, synthetic construct
  misc_feature 1..570: note = Description of Artificial Sequence: Synthetic coding sequence
  source 1..570: mol_type = other DNA
atgttattaagagccgcatggcggcgtgctgctgtggcagtgactgcggctcctggcccaaagccagccgctccgacccggggtctgcgcttgagggttggcgatcgagccccacaatcagctgtgccagcagataccgccgcagcccctgaggtcggcccagtcctgaggccactctatatggacgtgcaggctacaactcccctggatcccagagtgcttgatgccatgctcccctacttgatcaactactacggaaacccccatagccggacgcatgcatatggatgggaatcagaggctgccatggagcgagcccgtcagcaagtcgcatccctgattggtgctgaccctcgtgaaataatttttaccagcggcgcaactgagagtaataacattgccattaagactgagtcccacagcgttatacaagccggtgtgcagtggcacgatcttgatagcctacaggcccctccacctgggtttacaccatttagctgtctgagtttactgagtagctgggattaccggaggccgccacctcatcctgccaactttctttacttttag

SEQ ID NO: 232625 - DNA, 1374 bp, synthetic construct
  misc_feature 1..1374: note = Description of Artificial Sequence: Synthetic coding sequence
  source 1..1374: mol_type = other DNA
atgctgctgcgtgctgcttggaggcgggctgctgtggccgttacagccgcaccaggcccaaagccggctgccccaacccggggactgaggcttcgggttggtgacagagccccacaaagcgcagtacccgctgataccgcagccgctcccgaggtgggtcccgttctgaggcccctgtacatggacgtccaggccactacaccactagaccctagagtcctggatgcaatgttgccctatctcatcaattattacggaaatccacactcaagaacacatgcctacggctgggaatctgaggctgcgatggaacgagccagacaacaagtggcttccctgataggcgcagatcctagggagattatatttactagcggagccactgagtccaacaacatcgccatcaagggcgtggccaggttctaccgaagccggaaaaagcacctcataacaactcaaacggaacataaatgtgtgctggattcttgccgatccctggaagctgagggatttcaagtgacttatcttcctgtgcagaagtcgggcataatcgaccttaaggagctggaggcagccatccagccagataccagcctcgtgagtgtgatgacagtaaacaatgagataggtgtcaaacagccgattgccgagatcggacgaatctgttcatcgcggaaagtttattttcatacggacgccgctcaggccgtgggaaagattccactggatgtgaatgacatgaagatcgacctgatgagcatctccggacataagatctacggccctaagggcgtgggagcgatatatataaggcgtcgtcctagggtcagagttgaagccttgcaaagtggcggagggcaggaaaggggtatgaggagcggaaccgtaccaactcctcttgtcgttggacttggagcagcgtgcgaggttgcccaacaggaaatggaatatgatcacaagagaatttcaaagctgtcagagaggctgatccaaaatataatgaaatctctcccagatgtagtaatgaacggggacccaaagcaccactatccgggatgcatcaatctcagttttgcctatgtcgagggcgagtcactgctgatggcacttaaagacgtggcactgtcttccggcagtgcgtgtacctcagcttctctcgaaccttcatatgtcctgcgcgcaattgggactgacgaagacctggctcactcatcaattagattcggaattggacgctttaccaccgaggaagaggtcgattatacggtagagaaatgcatacagcacgtaaagagactgcgggaaatgagtcccctttgggaaatggtgcaagatggcatagatctgaagtctattaagtggactcaacattag

SEQ ID NO: 232626 - DNA, 486 bp, synthetic construct
  misc_feature 1..486: note = Description of Artificial Sequence: Synthetic coding sequence
  source 1..486: mol_type = other DNA
atgctcctgagagccgcttggaggagggcggctgttgcagtgaccgctgcacctggcccaaagccggctgccccaacaaggggattgaggctgcgggtgggagatcgggcaccccaatctgctgtcccagctgacacagctgctgcccctgaggttggaccagtgctacggcctttgtacatggatgtgcaggcgacgactcctcttgaccctcgggttctggacgcaatgctgccttatctaatcaactattatgggaacccccattcgaggacacatgcgtatggttgggagagtgaggccgctatggaaagagcgcgacagcaggttgcatccctgattggggcagatccacgagagattatatttacatcaggagcgacagaaagtaacaacatcgccattaagggggtggctcgcttctacaggagccgcaagaaacatctcattactaccctgtctggtggtgccggtggttgcgtgtag

SEQ ID NO: 232627 - DNA, 768 bp, synthetic construct
  misc_feature 1..768: note = Description of Artificial Sequence: Synthetic coding sequence
  source 1..768: mol_type = other DNA
atgacagtgaataacgagatcggggtcaaacagccaattgctgaaatcgggagaatttgctcctcccggaaggtttatttccacacggacgccgcacaggccgtcgggaaaattcctctggatgtaaacgacatgaagatagaccttatgtctatcagcggtcacaaaatctacggcccaaagggcgtcggcgctatctacattagaaggcgaccccgagtgcgcgtggaggccctgcagtctggagggggacaggagaggggaatgaggtccggaaccgtgccaactcctctcgtcgtgggactaggagctgcttgtgaggtagcacaacaggagatggagtatgatcacaagagaatttcgaagctgtcagagaggctgatccagaacataatgaaaagtctgcccgatgtagtgatgaatggggaccctaaacatcactaccccggttgtattaatcttagcttcgcatatgttgagggtgagtcactcctcatggccctcaaagatgtggcacttagcagtggatccgcatgcacctccgcctcactggagccatcatacgtgctgagggctatcgggaccgacgaggatcttgcacactcatctattcggttcgggattgggcgattcacaacagaggaagaggtggactatacggtggagaagtgcattcagcacgtaaagcgtttgagagagatgagtccactctgggagatggtccaggacggaatcgatctaaagagcattaaatggacgcagcactag

SEQ ID NO: 232628 - DNA, 1221 bp, synthetic construct
  misc_feature 1..1221: note = Description of Artificial Sequence: Synthetic coding sequence
  source 1..1221: mol_type = other DNA
atgctacttcgcgctgcctggaggagggccgcagtggctgtgaccgcagcacccggtcccaaacccgctgcaccgactagaggacttcggctgagagtgggcgaccgggctccacagagtgccgtgcccgcagacactgcagctgctcctgaggtagggccagtgctgagaccactgtatatggacgtacaggccactacccccttagacccccgagtcctcgatgccatgcttccatacttgatcaattattatggaaacccacatagtcggactcacgcctacggctgggaaagcgaagcggctatggaaagagcccgacagcaagtcgcatccctcattggcgctgaccccagggagattatttttacaagcggggcaactgagagtaacaatattgcgatcaaagaacttgaagccgcaattcagccggatacttcattggtctctgtgatgacagtgaataacgaaatcggggtgaagcagcccattgctgagataggacgcatatgtagctcgcgtaaggtgtattttcatacagatgcggctcaggccgtgggcaagattccacttgacgtgaacgacatgaagattgatttaatgtctatttctggacataaaatctatgggccaaagggcgtgggcgcaatttatatcagacggagaccgagagtcagagttgaagcattgcaaagcggagggggtcaggaaaggggaatgcgaagtgggaccgttccaacccccctggttgttgggctgggcgctgcctgtgaggtcgcccagcaggagatggagtacgaccacaagaggatttcgaagctctcagaaagacttatacagaacattatgaaaagcctccccgatgtagtgatgaacggggatcctaaacaccattaccccggatgcatcaaccttagctttgcctacgtcgagggcgagtctttactgatggctctgaaagacgtggccctttcgagtggtagcgcctgtacatcggcttccctggagccttcctatgttctgagagccattggaaccgatgaagacctggcccattcttccattagattcggaattggtcgcttcacgacagaagaggaagtcgattatactgtggaaaaatgcattcaacacgtgaagaggcttcgcgagatgtcccctttatgggagatggtgcaggatggcatcgatttgaagtcgatcaagtggacgcagcattag

SEQ ID NO: 232629 - DNA, 693 bp, synthetic construct
  misc_feature 1..693: note = Description of Artificial Sequence: Synthetic coding sequence
  source 1..693: mol_type = other DNA
atgcttaagaacccatacaccatcaaaaaacagcctctccaccagtttgttcagcggccactgttccctctgcctgccgcattttaccatccggtgaggtatatgttcatccagacacaggatacccccaacccaaacagccttaagtttatacctggaaagcctgtgctagagactagaacgatggactttcccacccctgcggctgcgttcagaagccccctggcgcgtcagctcttccgaatagagggcgtgaaaagcgtgttttttggtcctgacttcataactgtaactaaagagaacgaagaacttgactggaatttgctcaagcccgatatctacgcaaccatcatggacttctttgcctccggactgccgttagttaccgaggagacgccaagcggtgaggcaggatcagaggaggacgatgaagtcgtggccatgatcaaagagcttctcgatacccggatccgcccaacagtgcaagaggatggtggcgacgtgatttacaaaggcttcgaagatggcattgtgcaactcaaactgcaaggctcttgcaccagctgtccaagctccatcataaccttgaaaaatgggattcagaatatgctgcagttctacattccagaagtggagggggtggaacaggtaatggacgatgagtctgatgaaaaggaggccaatagcccctag

SEQ ID NO: 232630 - DNA, 342 bp, synthetic construct
  misc_feature 1..342: note = Description of Artificial Sequence: Synthetic coding sequence
  source 1..342: mol_type = other DNA
atggactttttcgcaagcgggctgccattagttaccgaagagaccccctcaggcgaggccggttcggaagaagatgatgaagttgtggcaatgattaaggagttgctggatacccggatccggcctacggtgcaggaagatgggggtgacgtgatctacaaaggctttgaggacggaattgttcaacttaagctgcagggatcgtgcactagctgtccatcatccatcatcacacttaagaatggcatacagaatatgctccaattttatattcccgaggtggagggcgtcgagcaagtgatggatgacgagtcagacgagaaggaggcaaactccccctag

SEQ ID NO: 232631 - DNA, 765 bp, synthetic construct
  misc_feature 1..765: note = Description of Artificial Sequence: Synthetic coding sequence
  source 1..765: mol_type = other DNA
atggccgctaccgcacgacgagggtggggcgcagccgctgtcgccgcaggattaagacgccgtttctgccacatgctgaagaacccctacaccatcaagaagcagccactgcaccagttcgtgcagcgccctctgttcccgctgccagccgctttttaccaccccgtaaggtacatgttcattcaaactcaggacacgcccaaccccaattctctcaaatttattcccggaaaacctgtgcttgaaactagaacaatggacttcccaacccccgcagccgcattccgcagtccactggcccgtcagctcttcaggatcgaaggggttaagagcgtttttttcggtcccgacttcataaccgtaaccaaagaaaatgaggagttagactggaacctgcttaagcccgatatttacgcgacgattatggacttcttcgccagtggtctcccgctcgtcaccgaggagacccctagtggagaggccggatccgaggaggacgacgaggtcgtcgccatgataaaggaactcctggacacacgcattcggcctaccgttcaagaagacgggggagacgtgatctataagggctttgaggatggtatcgtgcagctcaaactgcaaggttcatgtacaagctgcccttcctctatcattacactcaagaacggaattcagaacatgctgcagttttacattccagaggttgagggcgtggaacaggtcatggatgacgagagtgatgagaaggaagctaacagcccatag

SEQ ID NO: 232632 - DNA, 300 bp, synthetic construct
  misc_feature 1..300: note = Description of Artificial Sequence: Synthetic coding sequence
  source 1..300: mol_type = other DNA
atggacttctttgcttcagggctgcccctggtaacagaggagacccctagtggcgaagctggcagcgaggaagatgatgaagtggtagccatgattaaggagctgctggatacgcgtatcagaccaactgtccaagaggacggcggtgacgtgatttacaagggttttgaagacgggatcgttcagctcaaactgcagggctcctgcacttcctgtccatcatcaattattaccctcaagaacggcatccaaaacatgttacagttctacattcccgaggtcgaaggggtagaacagtag

SEQ ID NO: 232633 - DNA, 342 bp, synthetic construct
  misc_feature 1..342: note = Description of Artificial Sequence: Synthetic coding sequence
  source 1..342: mol_type = other DNA
atggatttctttgcctccggcctcccactggtcaccgaggagaccccctccggcgaggccggtagcgaggaggacgatgaggttgtcgccatgatcaaggaactcctggacacgagaattaggcctactgtccaagaggatggaggagatgtgatctataaaggattcgaggatggaatagtgcaactgaaacttcagggcagctgcacttcgtgtcccagctccatcatcacgcttaagaatgggattcagaatatgctgcagttttacattcccgaagtcgagggcgtggaacaggtcatggacgacgaaagtgacgaaaaggaggctaattccccctag

SEQ ID NO: 232634 - DNA, 291 bp, synthetic construct
  misc_feature 1..291: note = Description of Artificial Sequence: Synthetic coding sequence
  source 1..291: mol_type = other DNA
atggatttcttcgccagcggcttgcccttagtgactgaggagactccttctggggaggcaggcagtgaggaggacgatgaggtggtggcaatgatcaaagaactcctggatacaagaattagacctaccgtccaagaagacggtggagatgtaatctacaaaggcttcgaagacggcatcgtgcagcttaagctgcagggaagctgcacttcgtgtccctctagtattattaccctgaaaaacgggattcaaaacatgttgcagttttacatccctgaagtagaggggtag

SEQ ID NO: 232635 - DNA, 1464 bp, synthetic construct
  misc_feature 1..1464: note = Description of Artificial Sequence: Synthetic coding sequence
  source 1..1464: mol_type = other DNA
atggctgccgcactgccaaggactttgggcgagttgcagctgtatcgcatcctgcaaaaagctaacctcctaagctatttcgacgccttcatccagcagggcggtgatgacgtgcagcaactctgtgaggccggtgaagaggaatttctcgagattatggcgcttgtggggatggcctctaagcccctgcacgtgcggcgtctgcaaaaggccctgcgcgactgggtgaccaatcccggactgtttaatcagcccctaacatccctaccagtctcttctatcccgatctataagctgcctgaaggctctcccacttggctgggaatttcttgctcctcctacgagcgctcctcaaatgcacgcgaaccacatctcaaaattcccaaatgtgctgctactacgtgcgtgcagtctctggggcaaggcaagagtgatgttgtggggagtctcgcactacagtcagtgggggaaagccgactgtggcagggtcaccatgcaacagagtcagagcatagcctctcccccgcagatttgggatctccagcatcacctaaagaatcctcagaggctttggacgcagccgcagccctctccgttgccgaatgtgtggaaagaatggctccaaccctccctaagtcggatctgaacgaggtgaaagagctgcttaagactaacaagaagctcgcgaagatgatcggccatatcttcgagatgaacgacgacgatccacataaggaagaggaaattcggaagtactccgctatctacggcagattcgactctaagcggaaggacgggaagcacttgaccctgcatgagttgacggtgaacgaggccgcagcgcagttgtgcgtgaaggataatgcgcttctgacgagacgtgacgagttgtttgcccttgctaggcagatctcaagggaggttacctacaaatacacatacagaactacgaagtcgaagtgcggggagagggacgagctgtcgcccaaacgcattaaagtggaggacgggttcccagatttccaggacagtgtgcagactcttttccaacaggctagagcaaaatccgaagagctcgctgcactaagcagccagcaaccggagaaagtgatggccaaacagatggaattcttgtgcaaccaagcaggatatgagcgcttacagcacgctgagcgaagactgagtgctgggctctaccgacagtcttctgaggaacatagcccaaatggactgacctcagataatagcgatggtcagggcgagaggcctctaaacctgcggatgcctaacctccagaaccggcagcctcaccatttcgtcgtcgatggtgaactgagcagactataccctagcgaagccaaaagtcattctagcgagagtttgggaattctgaaggactacccacacagcgcttttacgttagaaaaaaaggttattaaaaccgaaccggaggactcaaggtag

SEQ ID NO: 232636 - DNA, 1377 bp, synthetic construct
  misc_feature 1..1377: note = Description of Artificial Sequence: Synthetic coding sequence
  source 1..1377: mol_type = other DNA
atggctgccgcactgccgagaacccttggagagctccaactttataggatcctgcagaaggcgaacctgttatcctacttcgatgcctttatccaacagggcggagacgatgtgcaacagctttgcgaggctggcgaagaagaattcctggagatcatggcattagtaggcatggcaagcaagccactgcatgtgcggaggttgcagaaagccctgcgcgattgggttacgaatcctggcctattcaaccagccacttacaagtctacccgtatcctccattcctatttacaagctgcctgaagggagccccacttggcttggcatctcttgttcatcttatgaaagatcttcaaacgctcgagagccacacctaaagatcccgaagtgtgcagctaccacttgcgtgcagtcactggggcagggtaagagcgacgtggtgggctcccttgcgctgcagtctgtcggggagagcagattatggcagggacatcacgccactgagagcgagcatagtctgagtcctgccgacctcggctcacccgcatcccccaaggagagttccgaagctctggacgccgcagcagcgctgtcagtggctgagtgcgttgaacggatggccccaaccctgccaaagtccgatttgaatgaggtaaaagaactccttaaaacgaacaagaagctggcgaaaatgatcggacatatctttgagatgaatgatgacgaccctcataaggaagaggaaattagaaaatatagtgcaatctatggtaggttcgatagcaaacgcaaggacggcaagcacctgacactgcacgagcttaccgtcaatgaggccgcagcccagctttgcgttaaggacaacgcgctgttgacccgccgtgatgagctttttgctctggcaaggcagatttctcgggaggtgacatacaaatacacttaccgcacaaccaagagtaagtgtggcgagcgtgatgaactaagtcccaagcgtatcaaagttgaggatcagccggagaaggtcatggccaaacaaatggagtttctgtgtaatcaggcaggctacgagagactgcagcatgcagaacgtaggctaagcgccggtttgtatagacagtcatcagaggaacactctcctaacggcctgacaagtgataatagcgacggccagggagaaagaccattgaacttacgcatgcccaacctccaaaacagacagccccaccacttcgtagttgatggggagttgtcacggctgtacccaagcgaggccaagtcccatagtagcgaaagtctgggcatacttaaggactaccctcatagtgccttcacacttgagaagaaggtgattaagacagagcccgaagattccagatag

SEQ ID NO: 232637 - DNA, 1464 bp, synthetic construct
  misc_feature 1..1464: note = Description of Artificial Sequence: Synthetic coding sequence
  source 1..1464: mol_type = other DNA
atggctgccgcattacctcgaacactgggcgagctacaactgtacagaattctccagaaggccaacctgctatcctatttcgatgccttcatccagcagggcggagacgacgtgcaacagctttgcgaggccggagaagaagaattcttggagatcatggctctggtcggcatggcatcaaagccacttcacgtacggcgactccagaaggccctgagggattgggtcaccaacccaggactatttaaccagcctcttacctccctgccagtgagttctattccgatctacaaacttccagaaggctctcccacctggctcggaatcagctgtagttcctatgagaggagttccaacgccagagaaccgcatttaaagatccccaagtgcgccgctaccacgtgcgtccaaagcctgggtcagggcaagagcgacgtcgtgggctctctggcattgcagagcgtcggcgaaagtagactctggcaagggcaccacgctactgaaagtgaacacagtctctcgccggctgacttgggcagtcccgcttctcctaaagaatcgtctgaggcattagacgccgctgccgcactaagtgttgcggaatgcgttgagagaatggcgccaactttacccaaatctgatctcaacgaagttaaggaacttcttaagactaacaaaaagttagccaaaatgattggccatatctttgagatgaatgatgacgacccacacaaggaggaagagatcaggaagtactcagcaatttatggcagatttgatagcaagaggaaggacggtaagcacctcaccctacacgaacttaccgtgaatgaagccgctgcccagctgtgcgtgaaggacaatgcccttttaactcgcagggacgaactgttcgcactagcgcgacaaatttcccgcgaagtgacgtacaaatatacctaccgaactacgaagagcaaatgcggcgagagggatgagctctcccctaagcgcatcaaggtcgaagatggttttcctgatttccaggacagcgtgcagaccctgtttcagcaggcgcgtgcgaagtcagaagagctggcagccctgagctcacagcagccagaaaaagtgatggccaaacaaatggaatttctctgcaatcaggccggatacgagaggttgcaacacgccgagcggaggctgtccgcgggactgtaccggcagtccagtgaggagcacagtccaaatgggctgacatcagacaattcggacggccaaggggaaagacctctgaacctgcgcatgcccaacctgcagaatagacaaccgcatcacttcgtggtcgatggagaactgtccagactttatccttccgaagccaagagtcattcctctgaaagtttgggaattctgaaggattatccacacagcgccttcacacttgagaaaaaggtgatcaagacagagccagaagatagcaggtag

SEQ ID NO: 232638 - DNA, 1461 bp, synthetic construct
  misc_feature 1..1461: note = Description of Artificial Sequence: Synthetic coding sequence
  source 1..1461: mol_type = other DNA
atggccgcagctttaccaagaacactgggtgagctgcagttgtaccgcatcctgcagaaagcaaatcttctgtcctacttcgatgcatttattcagcagggtggagatgacgtccaacagctttgtgaggcaggagaggaagagttcttagagattatggccctagtgggcatggcaagtaagcctcttcatgtcaggcgcctccaaaaagctctcagggattgggttacaaatcccggactgttcaaccaaccactgacctcattgccagtcagttcaattcctatttacaaactgcccgagggtagcccgacgtggctcgggatcagctgtagtagctacgagcgtagttcaaatgccagagagccacacctgaagattccaaagtgcgcggctactacatgcgtacagtctctcggccagggcaagtctgatgtggttgggagtttagccttacaaagcgtgggagagagtcgtctgtggcagggccatcatgccacggagtccgagcatagtctgagccctgctgacttgggttctcctgcatcgcccaaagagtcttcagaagccttagacgcagctgcagccctctctgttgctgaatgcgtcgagaggatggcccctacactcccaaaatctgacttaaacgaagtgaaagagcttttgaagactaacaagaagcttgccaagatgattggtcatatattcgagatgaatgatgacgatccgcataaagaggaagaaatccggaagtatagtgccatctacgggagattcgactctaagcgaaaagatggaaaacatttaacactgcatgagttgactgtcaatgaggccgcagcccagctgtgcgtgaaagacaacgctttgctcaccaggcgcgacgaacttttcgcattagctcgacagatctccagggaagtcacctacaagtacacctacagaacaactaaaagtaagtgcggcgaacgggatgagttatctccgaagagaatcaaggttgaggacggattcccagattttcaggatagcgtgcagaccctgtttcagcaggctcgcgcaaagtccgaagagctggcagctctgagctcccagccggaaaaggttatggcaaaacagatggaattcctgtgcaaccaggccggatatgaacggctgcagcatgccgagcggcgtctgagcgcgggtctctatcgccaatccagcgaggagcactcacccaatggtttaactagcgataactccgacggtcagggtgagcgccctctcaatctgaggatgcccaacctccagaatagacagccccaccactttgttgtggatggggagctatcaagactttacccctcagaggctaagtcgcactcctccgagtccctggggatcttgaaggactatccccactcagcatttaccctggaaaaaaaagtgataaaaacagagcccgaagactcccggtag

SEQ ID NO: 232639 - DNA, 474 bp, synthetic construct
  misc_feature 1..474: note = Description of Artificial Sequence: Synthetic coding sequence
  source 1..474: mol_type = other DNA
atggccgcagcactgcctcggaccttaggcgaactccagctgtaccgtattcttcaaaaggcaaacttgctgtcctattttgatgcgtttatacagcaagggggagacgacgtccagcagctctgcgaggccggagaggaggaatttcttgagattatggcccttgtaggaatggccagcaaacctctgcacgtgcgcaggctccaaaaagctctgcgcgactgggtcactaatcccggtttatttaatcaaccgctaaccagccttcctgtgtcgtccattccaatttataagttgccagaggggagcccaacctggctgggcatttcctgctcaagctatgagcgttcttcgaatgctcgtgaaccccatttgaagataccaaaatgtgccgctaccacatgtgtgcagagcttaggacagggtaaatcagacgtggtgggctccctggcattacaatcagtcggcgaatag

SEQ ID NO: 232640 - DNA, 189 bp, synthetic construct
  misc_feature 1..189: note = Description of Artificial Sequence: Synthetic coding sequence
  source 1..189: mol_type = other DNA
atggccgctgcactaccacggacactgggtgaactgcaactctaccggatcctgcaaaaagccaatttacttagctactttgacgcgttcattcagcaaggaggggacgacgtgcagcagctctgtgaggccggtgaagaagagttcttggagataatggcactcgtgggaatggcatctaagccctag

SEQ ID NO: 232641 - DNA, 303 bp, synthetic construct
  misc_feature 1..303: note = Description of Artificial Sequence: Synthetic coding sequence
  source 1..303: mol_type = other DNA
atggctgctgccttgcctagaaccttgggggagctgcagctgtatagaatcctgcagaaagccaacctactatcctatttcgatgctttcatccaacagggtggcgatgatgtacagcagttgtgtgaggccggagaagaggagtttttggagatcatggcgctggtgggcatggccagcaagccgctgcatgtgagaaggctccaaaaggccctgcgggattgggtaaccaaccctggactgtttaatcagccccttacctctctccctgtcagctccatacctatctacaaactaccatag

SEQ ID NO: 232642 - DNA, 723 bp, synthetic construct
  misc_feature 1..723: note = Description of Artificial Sequence: Synthetic coding sequence
  source 1..723: mol_type = other DNA
tgaaaggaactgttgaaaactaataagaaactggcaaagatgatcgggcacatcttcgaaatgaacgacgatgatcctcacaaggaagaagaaatcaggaaatactctgccatttatggtaggtttgacagcaagaggaaggatggtaaacatctcacactccatgaactaaccgtgaacgaagccgcagcacagctgtgcgtgaaagacaacgctctcctcacacggcgagacgaactgtttgccctggcgcgacagatttcaagagaggtgacatacaaatacacttaccggaccacaaagtcaaaatgcggcgaaagagacgagctatctcccaaaaggatcaaagtggagcaacctgagaaggtgatggccaagcagatggaatttctatgcaatcaggcagggtacgaacgccttcagcatgctgagaggcgcctctcagctggactgtaccgccagagcagtgaggagcactcgccgaacggtctaactagtgacaatagcgatggacagggagagcgcccactgaatctcagaatgcctaatcttcaaaatcgacaaccccaccatttcgtggttgacggcgagctatcccgtctttatcccagtgaggcgaagagccatagtagcgagagtctcggcatactgaaggactacccgcatagcgctttcaccctggagaagaaggtgatcaagactgaaccagaggacagtcgttag

SEQ ID NO: 232643 - DNA, 459 bp, synthetic construct
  misc_feature 1..459: note = Description of Artificial Sequence: Synthetic coding sequence
  source 1..459: mol_type = other DNA
atggctgccgcattgcccagaacactgggcgagttacaactctatagaattctccagaaggccaatctgctgtcttacttcgatgcgtttatccagcaagggggagatgatgtgcagcaactgtgcgaggccggagaagaagaatttctagagatcatggcccttgtcggtatggcttccaagcccctgcatgtgcggagactgcagaaagccctccgcgactgggtgactaacccgggtttgttcaatcagcctctaacgtcattgccagtctcctctattcctatttacaaactgccggaggggtcgcctacttggctggggatcagctgcagcagttacgaacgatctagcaatgccagagagccccacttgaaaatccccaagtgtgcagcaactacatgcgttcaatcccttggacagggaaagagtgatgttgtgggctccctggctctgtag

SEQ ID NO: 232644 - DNA, 684 bp, synthetic construct
  misc_feature 1..684: note = Description of Artificial Sequence: Synthetic coding sequence
  source 1..684: mol_type = other DNA
atgataggacacatattcgaaatgaacgatgatgatccccataaggaggaagagataaggaagtattcagcgatatatggacggttcgactcgaagagaaaggatggcaagcaccttaccctgcatgagttgactgttaacgaagctgcggcacaactttgcgtgaaagataatgccctgctcacgcgcagggacgaactcttcgcactggcacgacagatttcccgagaggtgacatacaaatacacttacaggacaaccaagtctaagtgtggagaacgagatgaactttctcccaagcgaattaaggtggagcaacccgagaaagtgatggccaaacagatggagtttctgtgcaaccaagctggatacgagaggctacagcatgctgagcgccgtctatctgccggactataccgtcagtccagtgaagaacacagtccaaacggactaacttcggacaacagcgatggacagggcgagcgtcctctgaacctccgcatgccgaatttgcagaataggcaaccacaccacttcgttgtagacggtgaactgtctcgcctctatcccagtgaggccaaaagtcacagtagcgagtctctcggtattttgaaagattatccccattccgcgtttaccttagagaaaaaagtgatcaagacagagcctgaagacagccgctag

SEQ ID NO: 232645 - DNA, 1578 bp, synthetic construct
  misc_feature 1..1578: note = Description of Artificial Sequence: Synthetic coding sequence
  source 1..1578: mol_type = other DNA
atgcaccgggctcctagtcccaccgccgaacagccgccaggtggtggagacagcgctcggaggacgctgcagccacgactgaaacctagcgctcgagccatggccctgcctagaactctcggagaactgcaactgtaccgcgtacttcagcgggctaatctgctttcctactacgaaacttttatccaacagggtggagatgacgtccaacagctctgtgaagcaggagaggaggaatttttggagattatggcattggttggcatggccacgaaacccttacatgtgagacggctgcagaaggcacttagggaatgggccacaaatcctgggctgttttctcagcctgttcccgcagtcccagtgtcatccataccactgttcaaaatttctgagaccgccggtaccaggaagggtagtatgagcaacggacacggtagtccaggcgaaaaggctggcagcgcacggtcttttagccctaaatccccccttgagctgggcgagaaactgagccctttacctgggggtccaggcgctggggaccccagaatctggcctggacggtcaacccccgaatctgacgtaggtgctgggggagaggaagaagcgggaagtccacccttttctccacctgccggaggaggagtgcctgaagggacgggagcaggagggctcgccgctggcggtacgggaggcggaccagaccgtcttgagcctgaaatggtccgaatggtggtggagagcgtagagcgcatcttcaggtcctttcccaggggcgacgctggggaggtcacctctctgctaaaactgaacaagaaactggcaagatctgtgggccatatattcgagatggatgataacgatagtcaaaaggaagaggagatccggaaatattcaatcatatacggcagattcgattctaaaaggagggaaggcaagcaattgagccttcacgaactgacaatcaacgaggctgccgctcagttctgcatgcgcgacaatacactcttattgaggcgcgttgagttgttcagcctgtcaagacaagtggccagggagtctacttacctgtcctctcttaagggatcccgcctgcaccctgaggagttgggcggtccccctctaaagaagcttaagcaagaagtcggggagcaaagtcaccctgagattcagcaacctcccccaggtcctgagtcctacgtacccccttatcgcccttcactggaggaggattccgcctctctgtcaggagagtccttagatggacacctccaggcagttggctcatgcccaagactcaccccgccaccagcagatctgcccctcgcgttacctgcgcacggtctgtggtcacggcatatcctccagcagactctcatggatgaggggttgcgacttgcacgtctggtatctcatgaccgggtgggcagattgtccccctgcgttcccgctaagcctccactggcagagtttgaggagggcctgttggaccgctgtcccgcacccggaccacatcccgctctcgtcgaaggcagacgctcctctgttaaggtggaggctgaggcctcacggcaatag

SEQ ID NO: 232646 - DNA, 1386 bp, synthetic construct
  misc_feature 1..1386: note = Description of Artificial Sequence: Synthetic coding sequence
  source 1..1386: mol_type = other DNA
atgcacagggccccttcaccaaccgccgaacagcccccaggtggcggagactcagctcggcgaacactgcagcccagacttaagcccagcgcgcgagcaatggccctgcctagaactctaggcgagcttcagctgtaccgtgtgctgcagcgggcaaatctactgagctattacgaaacttttattcaacaaggaggcgatgacgtgcagcagctctgtgaggccggagaggaggagtttctggaaatcatggctctggtaggtatggcaacaaagccgttgcatgtgcgcagactgcagaaggcgctacgagagtgggcgacaaatccgggtttgttttcccaacccgtgcccgctgttcctgtttcttcaatacctcttttcaaaatcagtgaaacggccggtacccgcaagggttccatgtctaatggtcacggaagtcccggagaaaaagctggcagcgctcgcagtttcagccccaagagcccactggaactgggggaaaagctttccccccttcctgggggacccggagccggtgatccacggatctggcctggccgatctacccctgaaagcgatgttggcgctggcggtgaggaggaggccggatccccccctttttctccccctgcgggaggcggtgtccccgaagggactggcgcagggggactagcagctggcggaaccggaggtggtcccgatcggcttgagccagagatggtcagaatggttgtggagagtgtcgaaaggatcttccgaagcttcccgaggggagacgctggtgaggttacgtctttactgaagctgaacaaaaagctggcacggtcagtaggacatatctttgaaatggacgacaatgacagccaaaaggaggaggaaatccggaagtatagtattatttacggcagattcgactccaagagacgtgaagggaaacagctgagcttgcatgagctgaccatcaatgaggcggctgctcaattttgcatgcgggacaacaccttactgctcagacgcgtagaactgttcagtctctctagacaggtggcacgagagtctacatatctgagcagcctaaaaggctcccgattgcaccccgaggaactgggaggccctccactcaagaaactgaagcaggaggtgggggaacagtcccatcccgagatccagcagccaccaccaggtcctgagagctacgttcccccttacagacctagtctggaggaagacagcgcaagcctcagcggtgagagtctggacggtcaccttcaggagttcgaagaagggctccttgatcgctgccccgctcctggcccacacccggcactagtggagggccgtagaagctcagttaaggtggaggctgaagcttctcggcagtag

SEQ ID NO: 232647 - DNA, 969 bp, synthetic construct
  misc_feature 1..969: note = Description of Artificial Sequence: Synthetic coding sequence
  source 1..969: mol_type = other DNA
atgcacagggccccttctcccacagccgaacagcctccaggtggcggagatagtgcccgaaggactcttcagcctaggctaaagccaagcgctagggcaatggccctgcccaggactctgggagaactacagctctatcgggtgttgcaacgagctaatctcctctcatattacgagacgttcatccagcagggaggggacgacgtgcagcagttatgtgaggctggcgaggaagaattcctagaaataatggccctagtgggtatggcaactaagccacttcatgttcgccgacttcagaaagcgctgagggagtgggccaccaaccccggtttgttctcccaacctgttccagcggttcccgtgagttcgatacctctattcaaaatatctgagacagccggaaccagaaagggctcaatgagtaacgggcacggaagccccggagagaaggcgggttctgcacggagctttagccccaagtctccactggagctgggggaaaagctttcaccacttccaggtgggcctggggcaggggacccaagaatttggcccggacgctctacacccgaaagcgatgtcggcgctgggggtgaggaggaagccggatccccacccttttcaccccctgccggtggcggtgtgcctgagggaaccggggcagggggtttagcggctggcggtacaggcggtgggccagaccgcctggagcccgaaatggtgcgcatggttgtcgagagtgtggaacgaatttttcgctccttcccgaggggagacgctggcgaagtgacaagtttgttgaagctcaataaaaagcttgcacggagtgtcggacacattttcgagatggatgataacgacagtcagaaggaggaagaaatccgaaagtatagcatcatatacggcaggtttgatagtaaaaggagagaaggtaaacagctctcactgcatgaggcctctccctag

SEQ ID NO: 232648 - DNA, 723 bp, synthetic construct
  misc_feature 1..723: note = Description of Artificial Sequence: Synthetic coding sequence
  source 1..723: mol_type = other DNA
tagagtgggtcagcctcgcccgcagtggccgaactgtgtcagaacacacctgaaacattcctggaagcaagtaaactcctcctcacctatgctgacaacatccttaggaatcctaacgacgaaaaatacagatctatccggataggtaatacggctttttccaccagactactaccagtgagaggggcagtggagtgcctatttgagatggggtttgaagagggggagactcatttaatctttcctaaaaaggcctctgtggagcaactccaaaagatccgagatctgatcgcaattgagcggtcctctcgcctggacggttccaacaaatcacacaaagtgaagtccagtcagcaacccgcagcatctacacagctcccaacaacaccctccagcaacccaagcggcctcaaccaacatacccgtaacagacaggggcaaagcagcgacccgccatcagcaagtacagtcgccgctgattccgccattcttgaagtgcttcagtctaacatacaacacgttttggtgtacgaaaaccccgcactgcaggagaaggctcttgcctgcataccagtccaggagctgaaacgcaagagccaggaaaagctatcccgagcgagaaagctggacaaagatatcattacgctccggaatttctggaaacaagacgtagacggagtcgcgtccggcccaatcgttctgcactgcgccgcagaactatag

SEQ ID NO: 232649 - DNA, 1965 bp, synthetic construct
  misc_feature 1..1965: note = Description of Artificial Sequence: Synthetic coding sequence
  source 1..1965: mol_type = other DNA
atggccgctgccgcattgggtagttcctcaggctccgcctcgcccgcagttgctgaactgtgtcagaataccccagagacctttttggaggcgagtaaattgttgttgacttacgcagacaatattctgagaaaccctaacgatgaaaaatatcggagcatacgcattgggaatacagcattttcaacacgcctactgcccgtgagaggggctgtcgaatgcctgtttgagatgggtttcgaggagggtgagactcatctgattttccccaagaaagcatccgtggaacagttgcagaaaatcagagatctcatcgcaatagagcggagttctcgactcgacggatccaataaatcccacaaggttaaatcaagtcagcagccagccgcaagtacccaattgcctacgactcctagttccaacccatcaggactgaaccaacacacccgcaacagacaagggcagagctccgacccgccttctgcaagcaccgtggccgcagattcggccatattggaggtcctccaaagcaatatccagcatgtcctggtatatgagaaccccgctctccaagagaaggccttagcatgcattcccgtccaggagctcaaacgcaagtctcaggaaaagctttcacgagcaagaaaactcgataagggcatcaacatcagcgatgaagactttctcctcctggagctgcttcattggtttaaggaggagtttttccactgggtaaataacgtgctttgttccaaatgtggtggtcaaacccgcagtcgcgaccgctccctcctgccatctgatgatgagctgaagtggggtgccaaggaggtagaagatcactactgcgacgcctgccagttctccaataggtttccacggtacaataatcccgaaaagctgctggaaacaaggtgcgggaggtgtggtgaatgggcgaactgctttacactgtgttgtcgcgctgtaggcttcgaggctagatatgtctgggactacaccgatcacgtctggaccgaggtctactcaccgtcccagcagcgctggttgcactgcgatgcttgcgaggatgtgtgcgacaaaccccttctttatgaaattggatgggggaagaaattatcatacgtgatcgcattctccaaagacgaggtagttgacgtgacctggcgctatagctgcaagcatgaggaggtgatcgcccgtcgtaccaaggtgaaggaggcactgttaagagacactatcaatgggttgaataagcagcgacagctttttctgtcagaaaatagacgaaaagagcttcttcaaagaattatcgtggaattagtggagttcatctctcctaagacccctaagcccggtgaacttggcggtcgaatcagtggcagtgtggcgtggagagttgcccgaggcgagatggggctacaacggaaggagacactgtttataccttgtgaaaatgaaaaaattagcaagcagctgcacctgtgctataacatcgttaaagaccgctacgttcgagtcagtaacaataaccagacgatttccgggtgggagaacggggtgtggaagatggagagcatctttaggaaagttgagactgactggcacatggtctatctggccagaaaggaaggtagctccttcgcctacatttcctggaagttcgagtgtggttcagtgggcctgaaggtggattctatatccattcggactagctcccaaaccttccagacaggtaccgtggaatggaaacttcggtcagatacagcccaggtggaactcactggagacaattctcttcactcctatgccgactttagcggagccactgaagttattctcgaggccgagctgagccgaggcgatggcgatgtggcttggcagcatactcaactgttcagacagagtctgaatgatcacgaggagaattgcctcgagattatcattaaatttagcgatctttag

SEQ ID NO: 232650 - DNA, 1902 bp, synthetic construct
  misc_feature 1..1902: note = Description of Artificial Sequence: Synthetic coding sequence
  source 1..1902: mol_type = other DNA
gccgctcttggttcctcatccggtagtgccagccctgctgtggccgagttgtgtcagaacaccccagaaaccttcctcgaagcctctaaactgctgttgacatatgccgacaacatcctgcggaatcccaatgacgaaaagtaccgctccatccggataggtaatactgccttttctacaaggcttctgccggtccgcggtgcggtggaatgcttatttgagatggggtttgaggagggggaaacacatcttatttttcctaaaaaagcaagcgtggagcagttgcagaagattcgagacctcatcgcaatcgagaggtccagtcgactggatggcagtaacaagtcgcacaaggttaaaagcagccagcagccagccgctagtacgcaattgcctaccactccaagttctaaccctagtggcttaaatcagcatactaggaaccgacaggggcagagcagtgatccgccaagcgcaagtactgttgccgctgacagcgctattctggaggtcctgcagagcaacattcaacatgtgctggtctacgagaatccagcactacaagagaaggcgctggcctgcattcccgtgcaggaactgaagaggaaatcccaggaaaagctgtcaagagctcggaaactcgacaagggtatcaacattagcgacgaggactttttgctcctggagctgttgcactggtttaaggaggaattcttccattgggtcaacaatgtgttgtgttcaaagtgtggaggacagacccgcagcagggataggtcgctgctgccaagcgacgacgaactcaaatggggcgctaaggaggttgaagatcactattgtgacgcatgtcagttttctaaccggttcccccgttataataaccccgagaagctccttgagacacgatgcggtcgctgtggcgaatgggcgaactgcttcactctctgctgcagagcggttggcttcgaagcaaggtatgtctgggattatactgaactgcagaggaccctttctctgaagcttactacccttaaggaaatcggtaaaaccttcctgaggatctccaagcggcagaagctgatacaggtggtggacgtgacgtggcggtactcatgtaagcatgaggaagtcatcgcccgtcgcacaaaagttaaagaagctctcttgcgggacactattaacggcctaaacaagcagagacagctgttcctgtcagaaaatagacgcaaggagctactgcagaggatcattgtcgaactggtggaattcatcagcccgaaaacccctaagcctggagagctgggtggaaggatctccggcagcgtggcctggagagtggctaggggcgagatgggtctgcaacgcaaggaaacactctttatcccgtgcgagaacgaaaagatttctaagcagctgcacctatgttataatatagtcaaggatcggtatgtgcgggtgtccaataataatcagaccatttccgggtgggagaatggggtctggaagatggagagtatctttcgcaaggtagagacagactggcacatggtttaccttgcaaggaaagaggggtcttcattcgcctacatttcatggaagtttgagtgcggtagtgtagggttgaaggtagatagcatcagtatccggacgagttcccaaacgttccagacaggcaccgttgaatggaagctcaggtcagacaccgctcaggttgagctgacaggtgataattctcttcattcttatgctgatttcagtggggcaaccgaggtcattctggaggccgagctgagcaggggcgacggcgatgtcgcatggcagcatactcagctgtttcgccagtctctgaatgatcacgaagaaaactgcctggagataatcattaaattttcagacttgtag

SEQ ID NO: 232651 - DNA, 1677 bp, synthetic construct
  misc_feature 1..1677: note = Description of Artificial Sequence: Synthetic coding sequence
  source 1..1677: mol_type = other DNA
atggcagctgctgcccttggatcctcttcaggttcagcctctccagctgtggccgaattatgtcagaatacaccggagacttttctcgaagcctctaaattgcttctgacgtacgccgataacattctgcgcaaccctaacgatgagaagtatcgaagcattcggatcgggaacaccgcatttagcaccaggctcctcccggtccggggtgccgtagagtgtcttttcgaaatgggtttcgaagagggcgagacacacctgatcttcccaaaaaaggcatccgttgaacaactgcagaaaattagagacctcatcgctattgaacgctcctcacggctggacggatctaataaatcccataaagtgaaatctagccaacagccggcagcttcaacacagttgcccacaactccctcttcaaatccgtctgggctgaaccagcacacaaggaaccgacagggccagtcatccgatcctccttccgccagcactgtcgccgctgatagcgccatcttagaggtgctgcagagtaacatccagcacgtgctggtctatgaaaatcctgctttgcaggagaaggcattagcttgcatacccgtccaggaattgaagcgcaagagtcaggaaaagctgtcaagggccaggaagctggacaaggggattaacatcagtgatgaggattttctcttgctcgaactactgcactggtttaaagaagagtttttccattgggtgaacaacgtactctgtagtaagtgtgggggtcagacgcgtagcagagatcggtcgctcctcccatcggacgacgaattgaaatggggagccaaggaggttgaggaccactactgcgacgcctgtcagttctccaatagattccctagatacaataatccagagaaacttctggagacccgatgtggcaggtgcggagagtgggccaattgctttacactgtgttgccgggcagttgggtttgaggcacgatatgtttgggattacacagaccacgtttggacagaggtgtattccccaagtcaacagagatggctgcactgtgacgcctgtgaggacgtctgtgataagccactgctgtatgagattgggtggggcaaaaagctgtcatatgtgatcgctttctccaaggatgaagtggtggatgtgacatggagatattcgtgtaaacacgaggaagtgatcgccaggcgaaccaaggtgaaggaggccctactccgagatactatcaacggattaaataagcagaggcagctttttctctcagagaatcgcagaaaagagttactacagaggataatcgttgaactcgttgagtttatttcccctaaaactccaaaaccaggggaactcgggggtcgcatctccggctctgtagcttggagagtggccaggggagagatgggccttcagaggaaggaaaccctctttatcccatgtgaaaacgaaaaaatcagcaagcagctgcatctctgttataatatcgtcaaagacaggtatgtgagagtttcaaacaacaatcagaccattagcggttgggagaatggtgtctggaaaatggaaagcatcttcagaaaggttgagacagattggcatatgattacggttttcacccccatgctaatttttctggtcccccttaaacttttctggaaacagaattag

SEQ ID NO: 232652 - DNA, 1839 bp, synthetic construct
  misc_feature 1..1839: note = Description of Artificial Sequence: Synthetic coding sequence
  source 1..1839: mol_type = other DNA
atgcggaatccaaacgacgagaagtaccgctctattcgaatcggaaatactgcgttcagtactagactgctgcccgttcgaggggctgtggaatgtctgtttgaaatgggatttgaagagggagagacacatctaatttttcccaagaaagcctcggtggaacagcttcagaagatccgtgatctgatcgcaattgagcgaagctcacgattggatggatccaacaagagccacaaggtgaagtcctcccagcagcctgcagcgtccacacaattgcctactactccttcttccaatccaagcgggctaaatcagcatacccgaaaccgtcaggggcagtcgtcagacccgccttccgcttccacagtggcagctgatagtgcaatattagaggtgctccagtctaacatccagcatgtcttggtatacgagaatccggctttgcaggagaaagctctggcctgcattccagtgcaggaacttaagcgaaaaagccaggaaaaactgtcacgtgccagaaagctggataagggaattaacatctccgacgaggactttttgttgctggagctcctccattggttcaaagaagagttttttcattgggtgaataacgtgctctgttcgaagtgcggaggacagacccggagcagagatcgcagtcttttgcctagcgatgatgagctgaaatggggagccaaagaggttgaggatcactactgtgacgcttgtcagttctccaacaggtttccccgatacaataatcctgaaaagctgctggagacgagatgcggcaggtgtggcgagtgggcaaactgctttaccctgtgctgcagggcagtcggattcgaggcacggtatgtatgggactacactgaccacgtttggacagaggtctattctccatcgcaacagcgttggttgcattgcgatgcctgcgaggatgtatgcgataagccattgctctatgagattggctggggaaagaagctgtcctacgttattgccttttctaaagatgaggtcgtggacgtgacctggcgatattcctgtaagcatgaagaagtaatcgccagacgaacgaaagtcaaagaggcacttctgagggacactattaacgggctcaataaacagcgacagctatttcttagcgagaatcgcagaaaagagctcctgcagagaatcatagtggaactggtcgagttcatctcacctaagacaccaaaacctggagagctcggaggaagaattagcgggtccgttgcctggcgtgtggcgagaggggagatgggactgcagcgaaaagagactctgtttattccttgtgagaacgaaaagatatcgaagcagctccatttatgttacaatattgtgaaggatcggtatgtgcgcgtgtccaacaataaccagaccatttccggctgggagaatggggtgtggaagatggagagcattttccgcaaagtcgaaactgattggcacatggtatacctggcacgaaaggagggaagtagcttcgcctacatctcctggaagtttgagtgtgggagtgttggactaaaggtagattccatttcaattcgcacctctagccagactttccagacaggcacagtcgagtggaaattgcgcagcgatacagcccaggttgagctgacgggggataacagcttgcactcctacgctgatttctctggggcaacagaggtgatccttgaagctgagctgagccggggtgacggagatgttgcctggcaacatacacaactattccgccaaagcctcaatgatcacgaggaaaactgcctggagattatcattaaattctcagatctctag

SEQ ID NO: 232653 - DNA, 516 bp, synthetic construct
  misc_feature 1..516: note = Description of Artificial Sequence: Synthetic coding sequence
  source 1..516: mol_type = other DNA
atgggcttcgaggagggtgagacccacttgatatttcccaagaaggcctcagtggagcagcttcagaagatccgggacttaatcgctattgagcggagtagccgccttgatggcagcaacaagagccacaaggtgaagtctagccagcagccggcagctagcacccagttgcctactactccctcctccaatccatccggacttaatcagcatacacgaaacagacaggggcagtctagcgaccctccatccgcatctactgttgcagctgacagcgcaatcttggaagttctccagtccaacatccaacacgtgctagtgtatgagaatccagccctccaagagaaagcactggcgtgtattcccgtccaggaattaaagcgaaaaagccaagaaaaactttcacgcgctagaaagctcgataaagacattatcactctccggaatttttggaaacaggatgttgatggagtggcctccggaccaatcgtgttgcactgtgcagctgaactgtag

SEQ ID NO: 232654 - DNA, 1911 bp, synthetic construct
  misc_feature 1..1911: note = Description of Artificial Sequence: Synthetic coding sequence
  source 1..1911: mol_type = other DNA
atggctgcggcagctctgggctcctcaagtggaagcgcgtcacctgccgtggctgagctctgtcaaaacacccctgaaacctttctggaagcaagcaaactgctgttgacgtatgcagataatatactgaggaatccgaatgacgaaaagtatagatccatacgcatcggcaataccgctttcagcacccgcctgcttcctgtgagaggggctgtcgagtgtctcttcgaaatgggatttgaagaaggggaaacccatctcatttttccgaagaaagctagtgtcgaacagcttcagaaaattagagacctgattgcaattgagcggagttcaagactcgacgggagcaataaaagtcacaaagtgaagagcagccaacagcctgctgcaagtacacagctcccaacaaccccatcctctaatccctccggactgaatcagcataccaggaataggcagggacaatcttctgatcccccttccgcgagcactgtggcagccgactccgcaatactcgaggtcttacagagcaacattcagcacgttctggtctacgagaacccagccctgcaggagaaagctctagcctgcataccagtgcaggaattgaagaggaaaagccaggagaaactcagcagagccagaaagctggataaggggataaacatttccgatgaggattttctccttctggaactgttgcattggtttaaggaggaatttttccattgggtgaacaatgtcctatgttccaagtgtgggggacaaacccggagtcgcgacaggagcctgctgccatctgatgacgagcttaaatggggggcaaaagaggtggaggaccactactgtgacgcatgccaattcagcaataggttccccaggtacaacaatccagaaaaactactcgagacaagatgtgggagatgcggggagtgggccaattgttttactctgtgctgccgggcagttggcttcgaagccaggtatgtgtgggactatactgagctgcagagaactctgagcctcaaacttactactctcaaggagattggtaagacgttcttacgcatctccaaaaggcagaaattgatccaggtggtcgacgtgacgtggagatatagttgcaaacacgaagaggtgatcgctagaagaaccaaagtgaaagaagcgctgcttagagatacgataaatggcctgaataagcagcgccagctgtttttgagcgaaaataggagaaaggagcttctccagcgaattatagtcgagctagtcgagtttatctccccgaagacgccaaagcccggagagttgggcggtcggattagcggaagtgtagcttggcgggtggcgaggggagagatgggactgcagaggaaggaaacgcttttcatcccatgcgaaaacgagaagatcagcaagcagctgcacctgtgttacaatatcgttaaggatcggtacgtaagggtctctaacaacaaccagactatcagtggatgggaaaacggcgtctggaagatggagtcaatatttcggaaggtggagaccgattggcacatggtctatctcgccaggaaggaagggtcatccttcgcctatatcagctggaagttcgaatgtggttctgtcggactgaaagtggactcaatttccatcagaacctccagccagacctttcaaaccggcacagtggagtggaaactaagaagcgatacagcgcaggtagaacttaccggcgacaatagtctgcattcttacgctgatttctccggcgcaacagaggtcatcctggaggctgaactcagccggggtgatggagacgtggcctggcagcacacccagctcttcagacaatcattaaatgatcacgaggagaattgcttagagattataataaaattcagtgacctttag

SEQ ID NO: 232655 - DNA, 1188 bp, synthetic construct
  misc_feature 1..1188: note = Description of Artificial Sequence: Synthetic coding sequence
  source 1..1188: mol_type = other DNA
atggcagccgaggcttccgagagcggaccagcattgcatgaattgatgcgggaggccgagatcagcctgttagaatgcaaagtctgctttgagaaattcgggcaccgccaacaacgtcgtccccgaaacttgagctgtggacacgtcgtctgcctcgcctgtgtcgccgcactggcacatccccgaaccttggccctggagtgtcccttttgtagacgggcatgtagagggtgtgacacatccgattgcctccctgttcttcatcttattgaactgctggggtcagctctaagacagtcccctgccgctcatagggcagccccaagcgccccaggggctcttacctgccatcacacctttggaggctgggggacccttgttaatcctactggccttgccttatgccctaagaccggcagggtcgtggtagttcacgatgggcgtaggcgcgtgaaaatcttcgattcagggggaggctgcgcccaccagttcggtgagaaaggcgacgccgctcaagacatcaggtatcccgtggatgtcacaattacgaacgattgtcacgtcgtggtgactgacgctggggataggagtatcaaagtttttgactttttcggccagatcaaactggttatcggtggccagttctctttaccttggggagttgagaccacccctcagaatggaatcgtggtgaccgatgctgaagctgggagtctgcacctgctggatgtggacttcgccgagggggttctcaggcggactgaacggctgcaggcccatctgtgtaatcccaggggggtcgccgttagctggctgacaggagctattgcagttctcgaacatcctctggccctggggaccggagtctgcagtacccgtgtaaaggtatttagctccagcatgcagttagttgggcaagtggacactttcgggctcagcctgtattttccaagtaagattaccgccagtgccgtgacttttgatcatcagggcaacgtgattgttgctgatacgagcggcccagctatcctgtgcttggggaaaccggaggagtttcccgtgccgaaaccaatggtcacccatggattatctcatccagttgccctcactttcacaaaagaaaactccctcctggtccttgacaccgcttctcattcgatcaaggtgtacaaggtggactggggctag

SEQ ID NO: 232656 - DNA, 903 bp, synthetic construct
  misc_feature 1..903: note = Description of Artificial Sequence: Synthetic coding sequence
  source 1..903: mol_type = other DNA
atggctgctgccgcaggcgacgctgacgatgaacccaggtccggccacagttcttcagaaggagaatgtgccgttgcacctgagcccctcactgatgcagagggtctattctccttcgcagatttcggtagtgcactcggaggcggtggcgctgggctctccggcagggcatctggtggcgctcagtcccctttgcgttatctgcacgtcttgtggcagcaggatgctgaacccagagatgagctgagatgtaagatccctgctggtaggttgcggagggcggcaagaccccatcgcagactgggtcctaccggcaaggaggtgcatgcgctgaaaagactgcgcgacagtgccaacgctaatgatgttgaaaccgtccaacagctcctcgaagacggagccgacccatgtgcagctgacgataaaggacgtacagcgctgcactttgcatcttgcaacggcaatgaccagatcgttcagctcctactagaccatggtgctgaccccaaccaacgggacggactcgggaataccccgttgcaccttgccgcatgcaccaatcacgtcccagtgatcactacactgctaagggggggagccagggttgacgctctcgacagagccggtcgaacccctctgcacctagccaagtccaaactaaacatcctccaggaaggacatgcccaatgcctggaagcagtgagacttgaggtgaagcagataatccacatgctcagagagtatttggaaagactgggccagcacgagcagcgtgagagactggatgacctatgcactcggctacaaatgactagcacaaaggaacaggtggatgaggtgacagacctgctggcctccttcacaagcctgtcactccagatgcagtctatggaaaagaggtag

SEQ ID NO: 232657 - DNA, 387 bp, synthetic construct
  misc_feature 1..387: note = Description of Artificial Sequence: Synthetic coding sequence
  source 1..387: mol_type = other DNA
atgacagaggccgatgtaaaccccaaggcatatcctctcgccgatgcacacttgaccaagaaactcttggatctggtccaacagagttgcaattacaagcagcttaggaagggcgcaaacgaagcaacaaaaactctcaatagaggtatttctgagtttatcgtcatggcagccgatgccgaaccactagaaataattctacatctcccgttattgtgcgaagacaagaacgtaccctatgtatttgtaaggtcgaagcaggctctgggtcgtgcttgcggtgtttcgagacctgttattgcatgctccgttacaatcaaagagggctctcagctgaaacagcagattcaatccatacagcagtcaatcgagcgcttgttagtgtag

SEQ ID NO: 232658 - DNA, 387 bp, synthetic construct
  misc_feature 1..387: note = Description of Artificial Sequence: Synthetic coding sequence
  source 1..387: mol_type = other DNA
atgactgaggccgacgtaaatcccaaagcgtacccactcgctgatgctcacctgaccaagaaattgttggatcttgtccagcaaagctgtaactataaacagttgagaaaaggcgctaatgaagccaccaagacactgaaccgcggaatttccgaattcattgtgatggccgctgacgctgagccgctagaaattatccttcacctacccctcctgtgtgaggacaagaacgtgccctatgtcttcgtacggtccaagcaagccctgggtcgggcttgtggtgtgtcgcgtccagtcatcgcgtgctcagtcactatcaaggaaggctcccagctgaagcagcagatacagtctattcaacagtcaatcgagagattgcttgtttag

SEQ ID NO: 232659 - DNA, 399 bp, synthetic construct
  misc_feature 1..399: note = Description of Artificial Sequence: Synthetic coding sequence
  source 1..399: mol_type = other DNA
atgctcctggttcaaactgaagctgacgttaaccccaaggcctatcccctcgctgacgcccaccttacgaagaagctccttgacctcgtgcaacagtcttgcaactacaagcagttaaggaagggtgccaatgaggctacaaagactctgaacagaggcatctctgaattcatcgtaatggccgctgatgccgaaccattggaaatcattttgcatctccctctgctgtgcgaggataagaacgtcccgtatgtctttgttcggtcgaagcaggcattaggcagagcttgtggggtctctcgtccagtgatcgcctgttcagttacaataaaggagggcagccagctcaagcaacaaatccagtccatccagcaatccatagaacgattgcttgtgtag

SEQ ID NO: 232660 - DNA, 2130 bp, synthetic construct
  misc_feature 1..2130: note = Description of Artificial Sequence: Synthetic coding sequence
  source 1..2130: mol_type = other DNA
atggcaaccgcaggtgggggatccggggctgaccctgggtctaggggtctgctgcgcttgttaagtttttgtgtcttgctggccggactgtgtcgaggcaattccgtggaacggaaaatttacatccccctcaataagaccgcaccgtgtgttcggctgctaaacgcaacccatcagatcggttgccagagcagcatctcaggagataccggcgtcattcacgtcgttgaaaaagaggaggacctgcaatgggtgttgaccgatggacccaacccaccctacatggtgctgctcgagagcaaacattttacaagagatctgatggaaaaattaaaaggacgaacctctcggatagccggactggctgtctctcttactaaaccctctccggcaagtgggttttccccatctgtacaatgccccaacgatggcttcggtgtctatagcaattcatacgggcctgagttcgctcattgtcgggagatacagtggaatagtttgggcaatgggctcgcctatgaagatttctctttcccaattttcctgctcgaagatgagaacgagacaaaggtgatcaagcagtgctaccaagaccataatctgtcccagaacggttcagctccaacctttcccctttgtgccatgcagctcttctcgcacatgcatgctgtgatatctactgctacatgtatgagaaggagctccatccagagcaccttctccattaatcccgagatcgtgtgcgatcctctttccgactacaacgtgtggtctatgctgaagcccatcaataccacgggcacactcaaacccgatgatcgcgtcgttgtggctgccactaggttggattctcggtctttcttctggaatgtagcccctggtgccgaatcagctgtggcctctttcgtgacccagctggctgcggcagaggccctgcagaaagctccagatgtgaccactttgcccaggaacgttatgtttgttttcttccagggggagacgttcgattatatcggcagctcaaggatggtttacgacatggagaagggaaagtttccagtgcagttggaaaacgtggattcattcgtggaattagggcaggtcgctctaaggacgtcgctggaactctggatgcataccgatcctgtgagtcaaaagaacgaatcagtgaggaatcaagttgaggatttgctagccactttagaaaagtcgggggcaggcgttcctgccgtgatcctgcgccgtcctaaccagtctcagcctctgcctcctagctccttgcaaagattcctgagagcaaggaatatttccggcgtggtcctcgccgatcattcaggggcatttcacaacaagtattatcaatcaatctacgacacagccgaaaatatcaatgtgtcctaccctgagtggctgtctcctgaggaggatctgaattttgtaactgataccgccaaggccctggcagatgtcgccacagtcttgggacgcgcactgtacgaacttgcgggaggcaccaacttctccgataccgttcaagctgaccctcagaccgtgacccgactgctttatggattccttatcaaggcaaataatagctggttccaatctattctccggcaggatcttaggtcctatctgggggacggccctttgcagcattacatcgctgtcagcagtccgaccaacacaacgtacgttgtgcagtacgcactggcaaatctgacggggaccgtcgtcaatttgacccgcgaacagtgccaagatccctcaaaagtgccctcggagaacaaggacctgtatgagtactcatgggtgcagggcccactccatagcaatgaaaccgatcgtttgcctcgatgtgtaaggagcacagcccgactggccagagcactcagccccgctttcgagctgagccagtggtcaagtactgaatacagcacctggaccgagagccggtggaaagatattcgggctagaatcttcctgattgccagcaaagaattagagctcatcacccttacagttggctttggtatacttatattttctctgatcgtcacttattgtataaatgccaaggccgacgtgctgtttattgccccacgggagccaggcgcagtttcctactag

SEQ ID NO: 232661 - DNA, 2070 bp, synthetic construct
  misc_feature 1..2070: note = Description of Artificial Sequence: Synthetic coding sequence
  source 1..2070: mol_type = other DNA
atggatttcaatctgattctggagtccctctgcaggggcaactcagtggaacggaagatatatatcccactgaataaaaccgccccttgcgttaggttgcttaatgccacgcatcagattggctgccaatccagcatcagtggggatactggagtgatacacgtggtcgagaaggaggaagatttgcagtgggtgctgacagacggtcccaacccaccttacatggtgctactggaatcaaagcactttacacgcgatctgatggagaagttaaaggggaggacttcgcgaatcgctggtctggcagtctctctgacaaagccttcaccggcaagtggatttagcccatccgttcagtgccccaatgatggcttcggcgtgtatagcaattcctatggaccagagttcgcccattgccgagaaatccagtggaactctctggggaacggactggcatacgaggatttttcctttcctatctttctgctcgaagatgaaaacgaaacaaaggtaattaagcaatgctaccaggaccataacctctcacaaaacggcagcgctccaaccttccccctttgtgccatgcagttatttagccatatgcatgcagtaattagcactgctacttgtatgaggagatcctctatacagtccactttcagcatcaacccggaaatcgtgtgcgaccccttatctgactacaatgtgtggtcgatgttgaaacctattaacaccaccgggaccttgaaaccagatgaccgagtggtcgtagccgctacccgactggacagtcgtagcttcttctggaacgtggcacccggagccgagagtgccgtagccagcttcgtcacccagctagcagccgctgaggctcttcagaaggctccagacgtaaccaccttacccagaaatgtcatgtttgtgttttttcaaggggagacgtttgactacatcggctcctctcggatggtctatgacatggagaagggtaagtttcctgttcagctggaaaatgtggacagttttgtcgagcttggacaggtagctctgcgcacatcactagagctgtggatgcacacggaccctgtgagccagaaaaatgaatcggtaagaaatcaggttgaggatctactggcaaccctcgaaaaaagtggagcaggcgtgcccgcagtcattctgcggaggccgaatcagtcgcagccattaccgccatcctctttgcaacgcttcctccgcgcacgtaatattagcggtgtggtgctcgcagaccattcaggcgcttttcacaacaaatattatcagtcaatttatgacactgctgagaatattaacgtgagctatcctgagtggctgagtcccgaagaggatcttaatttcgtaacagatacagcaaaggcactggctgacgtggccactgtgctgggacgcgcattatacgagttggctggaggtaccaactttagtgacacagtccaggcagatccacagactgtgactaggctcctttatggatttctcattaaagcgaacaattcctggtttcagtctattctgaggcaggatcttaggtcatacctgggagacgggccactacagcattacattgccgtgtcttccccaaccaacactacgtacgtggttcagtacgcactcgcgaacctgactggcactgtagtgaatttaactagagaacaatgtcaggaccccagcaaagtgccttcggagaataaggacctctatgaatatagttgggttcaagggccacttcacagcaacgagaccgacaggctgccccgttgtgtgaggtctacagcaaggcttgccagagctctgagccccgcattcgaactgtcccaatggtcttcaacagagtacagcacatggactgaaagccgctggaaggacattagagcacggatcttcttaattgccagcaaggagttggagcttattacactcaccgtgggcttcggaatcctcatcttctctttgatcgtgacttactgcattaatgccaaggccgacgttctgttcatcgcccctagggagccaggcgctgtgagttactag

SEQ ID NO: 232662 - DNA, 1356 bp, synthetic construct
  misc_feature 1..1356: note = Description of Artificial Sequence: Synthetic coding sequence
  source 1..1356: mol_type = other DNA
atgcttaaaccaataaataccactggcactctgaaacctgacgatagagtagttgtcgcagctacccggcttgatagcaggagcttcttttggaacgtggccccaggcgctgaatctgccgtggccagcttcgtgacacaactcgccgcagccgaggcgctgcaaaaggctcccgacgtgactacactccctagaaatgttatgtttgtgttcttccagggggaaactttcgattatatcggatctagtcggatggtatatgacatggaaaagggcaagtttcctgtacagctcgagaacgtcgatagctttgttgagctggggcaggtcgctctgagaacctccctagaactgtggatgcatacggatccagtttctcagaagaacgagtcagtacgcaatcaggtagaggacttgcttgccactctggaaaagtccggcgctggggttcctgctgtgattctgcgcaggcctaaccagtctcagccactgcccccttcctctctacagcgctttctaagagctcggaacatatccggtgttgtgctcgctgaccactccggcgctttccacaacaagtattatcagtccatttacgacactgccgaaaatatcaatgtgagctaccctgaatggctgtcacctgaggaggacctcaattttgtgaccgatactgctaaagccctggccgacgttgctaccgttctcggtagggccctgtacgaattagccggtgggacgaacttttctgacaccgtacaggctgatccccagacagtcacgcgactgctgtatggctttctgattaaggctaataatagttggttccagagcatccttagacaggacctgcgtagttatctgggcgacggacctctgcagcactacatcgctgtgagctctcccactaacacaacttacgtagtgcaatacgcactggccaacctcaccggaacggtggtaaatctgacgcgggagcagtgccaggacccctcgaaggttcccagcgagaacaaggacctctacgagtatagctgggtgcaggggccactccacagtaatgagactgatagattaccaaggtgtgtcagatccacggctcgcctggccagagctctgtcgcccgcttttgagctgtcccagtggtctagtacagaatactccacttggactgagagccgatggaaagatatccgcgcaaggattttcctgatagcatctaaagaacttgagctgataaccctgacagtgggattcggaatcctgatttttagtcttattgtcacgtactgtatcaacgctaaggctgatgtcctgttcatagcaccaagggaacctggcgctgtgtcatattag

SEQ ID NO: 232663 - DNA, 918 bp, synthetic construct
  misc_feature 1..918: note = Description of Artificial Sequence: Synthetic coding sequence
  source 1..918: mol_type = other DNA
atgctcaagcccattaacaccaccggtacccttaaaccggacgacagagtggtggtggcagcaactcgcctcgattccaggtcgtttttttggaacgtggctccaggagccgaatctgcagtcgcttccttcgtgacccaactggcagcagctgaggctctgcagaaggccccagatgttacaactttgcccaggaacgtcatgtttgttttctttcagggagttgctctgagaacgtctctcgaactgtggatgcacactgaccccgtgtctcagaaaaatgaatctgtgagaaaccaggtggaagacctgttggccacccttgaaaaatccggcgctggggttcccgctgtgatcctgcggagaccgaaccaaagccagcctctgcctccaagttccctgcagaggtttttgagggctcggaacatctctggggtcgtgttagctgatcattccggagcgtttcacaacaaatattatcagtcaatctatgacacagcggagaatataaacgtctcttatcccgagtggctaagcccggaggaggatctgaattttgtcaccgacacagccaaggccctcgctgacgtggccaccgttcttggcagagccctctatgagcttgcagggggaactaatttctctgataccgtgcaggccgatcctcaaaccgttacaagactgttatacgggttcctcatcaaggccaacaactcttggttccagagtattctccggcaggatctgagatcctacctcggtgacgggcctctccaacactacattgctgtttcttcacccactaatactacctatgtcgtccagtacgctctggccaatcttacaggaaccgtggtgaatctcacgagagaacagtgtcaggacccgtcaaaagttcctagtgagaacaaggactag

SEQ ID NO: 232664 - DNA, 2070 bp, synthetic construct
  misc_feature 1..2070: note = Description of Artificial Sequence: Synthetic coding sequence
  source 1..2070: mol_type = other DNA
atggactttaaccttattcttgagagcctgtgtcgtggtaacagtgttgagagaaaaatttatattcctctgaacaagaccgcaccttgcgttcggctgctaaacgcgactcaccagatagggtgtcagtcctccatcagcggtgatacgggcgtgatccacgttgtggagaaagaggaggatctgcagtgggtccttacagacggcccaaatccaccatacatggtgctcctcgagagcaagcatttcacccgggatttaatggaaaagctcaagggccgtacctcaaggatcgcgggtctggctgtgagcttgacaaaaccttctcccgcttccgggttcagcccatccgttcagtgtcctaatgatggcttcggcgtgtattccaactcctacggaccagaatttgcacactgtagagaaattcagtggaattcgttaggtaatggactggcatatgaggactttagcttccccatcttcttgctcgaggatgaaaatgagactaaggtgatcaagcagtgttatcaggaccacaacttaagtcaaaacggttcagcccctacatttccactgtgtgcaatgcagctgttttcacacatgcatgccgttatttccacggcaacatgcatgcggaggtctagcatccaatctaccttttcaattaacccagagattgtgtgcgatccacttagcgactataacgtctggtcaatgctcaagcctattaacaccacaggaacactaaagcccgacgaccgggtggtggtggctgccacccgactggacagtagatcttttttctggaacgtcgcaccaggggctgagagtgccgtcgcaagctttgtaactcaactggcagcggcagaggccctgcagaaggctcccgacgttacaaccctgccgcgaaacgtgatgtttgttttctttcaaggagagacatttgactacatcggaagttctaggatggtgtacgatatggaaaaagggaaattccctgtgcagttagaaaacgtggactcgttcgtggaacttggacaggtagctcttaggacctcactggagctgtggatgcacactgatccagtcagtcagaagaatgagtctgtgcgcaaccaggtggaagatctccttgccacactagagaaaagcggagccggagtgcccgcagtgattctgagaagacccaatcaaagccagcccttacccccaagctccctgcagagattcttgcgagccaggaatatttccggcgtcgtgctcgcagaccactcaggcgcatttcacaacaagtactaccagagcatttatgacactgctgaaaatattaacgtctcatatccagagtggctgtccccagaggaggatcttaactttgttaccgacaccgccaaagcattagccgacgtggccacagtcttgggcagagcactctacgaactagcaggcggaaccaacttctctgacacagtccaggccgacccccaaacagttaccaggctgttgtacggctttctgatcaaagctaacaacagctggttccagagtatcctgcggcaagacctgcgctcttatttaggagacggacccctgcaacactacatcgcagtgtccagtcccactaacaccacctacgtggtccagtacgcgctcgcaaatctgactgggaccgtcgtgaatctgacacgcgagcagtgccaggatccctccaaggtcccaagcgagaacaaggacctgtatgaatattcctgggtgcaaggccctctgcacagtaacgaaactgatcggcttcccagatgtgtaaggtcaacggctcggctcgcgagggcactttccccagccttcgaactttcccagtggtcctctaccgaatactctacgtggactgaaagccggtggaaggacatccgagctcgcatctttctcattgcgtccaaagaactggagctgatcactctgactgtaggatttggcatcttaatcttttctcttattgtgacatactgcatcaatgccaaggcagacgtgctgtttatcgcccctcgggaacctggggcagtttcatactag

SEQ ID NO: 232665 - DNA, 768 bp, synthetic construct
  misc_feature 1..768: note = Description of Artificial Sequence: Synthetic coding sequence
  source 1..768: mol_type = other DNA
atggccactgccggaggcggatccggcgctgatcctggctcacgtgggctgctgcgactgctgtctttctgcgtcctcttggctggcctctgccggggtaattccgtggaaagaaagatttacattccactaaacaaaaccgcaccatgtgtcagactgttgaacgccacacaccagattggatgtcagtccagcatatctggagacacaggagtcatccacgtggtcgagaaagaggaagaccttcagtgggttctcaccgatggccctaacccaccttacatggtactcctcgaatccaagcatttcacccgcgacctgatggagaagttaaaggggagaacttctagaattgcaggcctggcagtcagcctgaccaagcccagccccgcaagcggtttttctccctccgtgcagtgccccaacgacgggttcggtgtttatagcaattcatacggccctgagttcgcgcactgccgggagattcagtggaactctttaggtaacggcctggcttacgaagacttttcttttcccatctttctgctggaagacgagaatgaaaccaaggtaattaagcaggagacttttgactatatcggcagtagtagaatggtctacgacatggaaaaggggaaattccccgtacaactggagaatgtcgatagtttcgtggagctaggccaagttgctctgcgtacctccctggaattatggatgcacacagaccccgtgtctcagaagaatgaatctgttaggaaccagtag

SEQ ID NO: 232666 - DNA, 963 bp, synthetic construct
  misc_feature 1..963: note = Description of Artificial Sequence: Synthetic coding sequence
  source 1..963: mol_type = other DNA
tagggcttcggcgtgtatagcaactcctacgggcctgagttcgcgcactgcagagagatccagtggaatagcctgggaaacggcctggcttacgaagactttagtttcccaatcttcctgctggaggacgaaaatgagactaaggttatcaaacagttattttcccacatgcacgctgtcatctccacagccacatgtatgcgtcgcagttctatccagagtaccttcagcataaatccggaaatcgtgtgcgatcccctgagcgactataacgtgtggtccatgttgaagccaattaataccactggcaccctcaagcccgatgatcgtgttgtggtggctgcaactcggctggattcccggagctttttctggaacgtggccccaggagccgagtctgcggtcgccagcttcgtgacccaactggccgcagcggaagcactccagaaggcacctgacgtgaccacattacctcggaatgtgatgtttgtgtttttccagggagaaacctttgactatattggctctagccgcatggtgtatgatatggaaaagggcaagttccctgttcagcttgagaacgttgattcctttgtcgagctgggacaagtggctttgcgcacttccctggagctgtggatgcacacagatcccgtgtcgcagaagaatgaaagtgtgcgcaatcaagtggaggatctgctggctactctggagaaatccggagcaggcgtgcctgccgttatactcaggagaccgaatcagagtcagccccttccacccagctcgctgcagcgctttctgagggccaggaacattagcggagtcgtgctagctgaccattcaggcgctttccataacaagtattatcaaagcatttacgatacagccgaaaatatcaatgtctcgtacccggagtggctgtctcctgaagaagacctgaattttgtcaccgataccgcctag

SEQ ID NO: 232667 - DNA, 660 bp, synthetic construct
  misc_feature 1..660: note = Description of Artificial Sequence: Synthetic coding sequence
  source 1..660: mol_type = other DNA
cgatcatccattcagagtactttctcaattaacccagagatcgtgtgcgaccccctgtccgactacaacgtatggtcaatgctcaagcccataaacaccactgggactctgaagccagacgatagagtcgtggtggccgcaacccgccttgccgcagccgaggcgcttcagaaggccccagatgtgacgacactgccccgtaatgttatgttcgttttttttcaaggtgagacatttgattatatcggttccagcaggatggtgtacgacatggaaaaaggcaaattcccagtgcaactggagaacgtggactcttttgtggagctggggcaggtcgcccttaggacctcactggaactatggatgcacacagacccagtgagccaaaagaacgagagtgtgcggaatcaggtggaagacctactcgcgaccctggagaaatcaggggctggcgtaccagccgttattctccggaggcctaaccagtcccagcctctccctccctcttcattacaacgcttcctcagggcacgcaatatatcaggggtagtgctcgccgatcactcaggagcctttcacaacaaatattaccaatccatctacgacacagcagagaacataaacgtatcttaccctgagtggctttctcctgaggaatag

SEQ ID NO: 232668 - DNA, 828 bp, synthetic construct
  misc_feature 1..828: note = Description of Artificial Sequence: Synthetic coding sequence
  source 1..828: mol_type = other DNA
tagaacgttgcacctggggcagaatccgccgtggcctcttttgtgacccagctggctgccgctgaagctctgcaaaaggcccctgacgtgacgactctgccacgtaacgtcatgtttgtgtttttccaaggtgtggcactcagaacctcactggagctttggatgcatactgatcccgtatcccagaagaatgaatctgttcggaatcaggtcgaggatcttctcgccaccctggaaaagtcaggcgctggagtacccgctgtgattctcagacggcctaaccagagccagcctctcccgccaagctcgctgcagagattcctcagagcccgtaatatttcaggagtggttttggccgaccactccggagcctttcacaacaagtactaccagtctatctacgacacagccgagaatataaatgtcagctacccagagtggttgtccccggaggaagacctaaactttgtgacagacaccgctaaagctcttgccgacgttgctacagtgctcggaagagccctgtatgaactagcgggtggaactaacttttcagacacagtgcaagccgaccctcagacagtgacacgcctgctgtatggattcttgatcaaagccaacaatagctggtttcaatccatactccgtcaggatcttcggtcatatctaggagacggaccactgcagcactatatcgccgttagctccccgacaaataccacatatgtcgtgcagtatgcccttgccaacctgacgggtacggttgtaaaccttactagagagcagtgccaggacccatccaaggtgccatctgagaacaaagattag

SEQ ID NO: 232669 - DNA, 405 bp, synthetic construct
  misc_feature 1..405: note = Description of Artificial Sequence: Synthetic coding sequence
  source 1..405: mol_type = other DNA
atggccactgctggcggtggctctggcgcagatcccggttccagaggtctgctgcgtctcttatccttttgcgtgctcctggctggcctgtgcaggggcaactcggttgagcgtaagatttacattccactaaacaagactgccccatgtgtgcgattgctcaacgccacacatcagattggctgccagtcctcaatctctggcgataccggtgtgattcacgtggtcgagaaggaggaggacttacagtgggtgttgaccgatggcccaaatccgccttatatggtactcctcgagtccaaacattttactcggcagaatgtgcgtctttccgatactttcttgtgctcttttatggaatttctgtcttactctagggacttaatggaaaaactgaagggatag

SEQ ID NO: 232670 - DNA, 699 bp, synthetic construct
  misc_feature 1..699: note = Description of Artificial Sequence: Synthetic coding sequence
  source 1..699: mol_type = other DNA
atggctacggctggaggtgggtctggagccgatcccggaagcaggggactgctgcgcctgctaagcttctgtgtattgttggcaggcctattcctggactttgaacctgatccacttcctctgtgcccagacgtgtcctttttcccacaacctcagcccccaacccctcagtcaaaagggacaggactgtgtagggggaattcagtggaaaggaagatttacattccactgaataaaacggcaccttgtgtgcggctcctgaatgcaacccaccagattggatgccagtcctctatctctggcgatacgggagtaatccacgtggtggagaaggaggaggatttacagtgggttctgactgacggacctaatcccccatacatggtgctgctggagtctaaacactttacacgcgatctgatggagaagctgaagggtcggaccagcaggatagctggtctggcagtctctctgaccaaaccgtccccggcttccggattttcacctagcgtgcagtgcccaaacgacggtttcggagtgtatagtaactcttacgggccagagtttgcacattgtagagagatccaatggaatagcctgggcaatgggctcgcctatgaagacttctcgtttcctatctttttgctggaagacgaaaatgagaccaaggtaatcaaacaatgctatcaggaccactag

SEQ ID NO: 232671 - DNA, 1716 bp, synthetic construct
  misc_feature 1..1716: note = Description of Artificial Sequence: Synthetic coding sequence
  source 1..1716: mol_type = other DNA
atggccaccgcaggcggaggatcgggtgccgaccccggtagccgagggctgctcagattgttgtctttctgtgtgctccttgccggtctatgccgtggcaactccgtcgaacgaaagatctacatcccgctcaataaaactgccccttgcgtgcgcctgcttaatgcaacacaccaaatcggctgccagagttcaatctccggggacacaggggtcatccacgttgtggagaaggaagaagatctgcagtgggttctcacggacggcccaaatccaccttacatggtcctgcttgaatctaaacattttaccagagacctgatggagaagttaaagggccgtacctccagaatcgcgggtctggcggtcagccttaccaagccatcccctgccagcggcttttcgccttctgttcaatgccccaacgatgggttcggagtgtattctaattcctacggcccagaatttgcccattgcagagagattcagtggaatagcctgggaaatggtcttgcctacgaggacttctcctttcctatttttcttctggaggacgaaaatgagactaaagtgattaaacaggagacgttcgattacattggctcatccagaatggtctacgatatggagaaaggcaagttccccgtgcagctggagaatgttgatagtttcgttgagcttggacaagtcgccctcagaacgagccttgaactgtggatgcatactgatccagttagtcagaagaacgagtccgtccgaaatcaggtggaggaccttctggcgacgctggagaaatcaggggcaggtgtgcctgcagtgattctcagaaggccaaaccagtctcagcccctgcctccctcatctctgcagcggtttttgagagcccgtaacatcagcggtgtggtgctcgccgatcattccggggcattccacaacaagtattaccagtccatctacgatactgcagagaatatcaacgtctcttacccggagtggttaagtcctgaagaggacttgaacttcgttactgacactgcaaaagctcttgcagatgtcgccaccgtgctgggacgcgctttgtatgaattagctgggggaacaaacttctctgatacagttcaggccgacccacagacagtgacacggttgctctacgggttcctgattaaagcaaacaattcctggttccagtctatcctgcgccaagatctacggtcgtacttgggggacgggccactgcagcactacatcgccgttagtagtcctactaatactacttacgtagtccaatacgccctcgctaacctcactggcactgtggtgaacctcacccgggaacagtgccaagatccaagtaaggttccgagtgagaacaaagatctttacgaatactcctgggtgcagggacctctgcattctaatgagaccgatcgcctcccacgatgtgtgaggtcaacagcaagactggctcgggctttgtcgccagctttcgagctttcgcagtggagctctactgaatacagcacttggacagagagccgatggaaggacattagagcccgtatctttctgatcgcgagtaaagaactcgagcttattacacttacagtcggctttggcattttgatttttagcctgattgtcacctactgtatcaatgccaaggcagatgtcctcttcattgcacccagggaacctggcgctgtatcttactag

SEQ ID NO: 232672 - DNA, 642 bp, synthetic construct
  misc_feature 1..642: note = Description of Artificial Sequence: Synthetic coding sequence
  source 1..642: mol_type = other DNA
atgtctcgggtcctcgtaccgtgtcacgttaagggttctgttgctctgcaggtgggtgacgtgcggacctcacaagggcgtcctggtgtcctggtaatagacgtcacattcccatctgtggccccattcgagctgcaggaaatcacattcaaaaactactatacagctttcctgtcgattcgggttaggcagtataccagcgcgcacactcccgcaaaatgggtcacatgcttaagggattattgccttatgcccgacccacatagcgaggaaggcgctcaggagtacgtgtctctgttcaagcatcagatgctgtgcgatatggccagaatatctgaacttcgcctgatactgcgacagccttcccctctttggctgtcattcactgtggaggagcttcagatttaccaacaggggcctaaatcaccttccgtaacatttcctaagtggctctctcatcccgtgccctgtgagcagcctgccctgctccgcgagggattgccggacccaagcagggtcagttccgaagtccagcaaatgtgggcactgactgagatgatacgtgcctcacacacctccgctaggataggccgttttgatgtggacggttgttacgacctgaatctcctgtcctatacgtag

SEQ ID NO: 232673 - DNA, 642 bp, synthetic construct
  misc_feature 1..642: note = Description of Artificial Sequence: Synthetic coding sequence
  source 1..642: mol_type = other DNA
atgagtcgtgtgctggtgccatgccacgttaagggtagcgtggccttgcaggttggagacgtgagaaccagccagggtaggcccggagtgttagtgatcgatgtaacatttcctagtgttgctccgtttgagctgcaagagatcacattcaagaattactacacagccttcctgtccattcgcgtgagacagtatacctcagctcacacaccggcaaaatgggtcacatgcctcagagattactgcctgatgcccgacccccacagtgaggagggagcccaggagtacgtttcattattcaaacatcagatgctgtgcgatatggcacggatcagcgaacttaggctgattctcaggcaacctagccctctctggttgtctttcacagtggaagagttgcagatataccagcagggccctaaaagtccgtcggttacatttcccaaatggctcagccatcccgtgccatgcgaacagcccgctctgctgcgggagggactacccgacccgtctcgggtaagcagcgaagtacagcagatgtgggccctaacagagatgattagagcctctcacacatcagctagaattggccgatttgatgtggacgggtgttatgacctcaatcttctgagttatacgtag

SEQ ID NO: 232674 - DNA, 528 bp, synthetic construct
  misc_feature 1..528: note = Description of Artificial Sequence: Synthetic coding sequence
  source 1..528: mol_type = other DNA
atgagcagggtgcttgtgccttgtcatgtgaagggcagtgtggcactgcaggtgggcgacgtccgcacttcacaaggccgacccggagtgctcgttatcgacgttacgtttccctccgtagctcctttcgagctgcaggaaatcaccttcaagaactattacacagcgttcctgagcatccgcgtgcgacagtatacatccgctcataccccggctaaatgggttacctgcctgagagattactgcctcatgcctgacccccatagcgaggaaggcgcacaggaatatgtcagcctgtttaagcatcagtcaccctccgttaccttccccaagtggctgtcccatcccgtgccatgtgaacagcctgcccttttgcgcgaggggctgccagacccctccagggtaagctccgaagtgcagcaaatgtgggccctgacagagatgatacgcgcatcacacacctctgctcgaattggaagatttgatgtggacggttgttatgacctgaacttactcagttacacctag

SEQ ID NO: 232675 - DNA, 795 bp, synthetic construct
  misc_feature 1..795: note = Description of Artificial Sequence: Synthetic coding sequence
  source 1..795: mol_type = other DNA
atggaaagcggcttcacgtctaaagatacgtatctgtcccattttaatcccagagattatttggaaaaatattataaatttggatctcggcactccgcggagagccagattctgaaacacttgttgaaaaacttattcaaaatcttctgtctggatggagtcaagggagacctgcttatcgatattgggtcaggaccgacaatttaccaattgctctccgcctgcgagagtttcaaagaaatcgtcgtgacagactatagcgatcaaaatctacaggagctggaaaaatggctgaagaaagagcccgaagcattcgactggagccctgtcgttacgtatgtctgtgacctcgaggggaatcgcgtgaagggcccagagaaagaggaaaagctccgacaggcggttaaacaggtattgaagtgcgatgttacccagagtcagccattaggggctgttcccctgccaccagcagattgcgttttgtccaccctttgcctggacgctgcctgccccgacctgcctacctactgccgcgctctgaggaatctgggctcactactaaagcctggaggttttctggtaatcatggatgcactcaagtcttcgtactatatgattggtgagcagaaattctcatcgctgccgcttggtcgtgaagccgtcgaggcagcagttaaagaggcgggttacacaatcgagtggttcgaggtgatttctcagtcgtattcatccaccatggctaataatgagggcctatttagtctggtggcaaggaaacttagtaggcctctgtag

SEQ ID NO: 232676 - DNA, 795 bp, synthetic construct
  misc_feature 1..795: note = Description of Artificial Sequence: Synthetic coding sequence
  source 1..795: mol_type = other DNA
atggagagtgggttcacatctaaggatacatatctgtcccattttaatccgagagactacctggagaagtactacaagtttgggtcacgacactcagcagaaagtcaaatcttgaagcatctactcaaaaatctgttcaaaattttttgtctcgacggcgtcaagggcgaccttctcatcgacatcggttcaggccctactatttaccagctcctctccgcctgcgaaagtttcaaagagatagtagtgacagactatagcgaccagaacttgcaagagttggaaaagtggctgaagaaggaacccgaagcttttgactggtctccggtggtcacttacgtctgtgatcttgagggaaacagggtcaaggggccagagaaggaagagaagctgcggcaagctgtgaagcaggtcctcaaatgcgacgtcacacagtcacagccgttgggtgccgtgccactccccccagccgactgcgtcctgtctacactgtgccttgatgccgcttgccccgatcttcccacctattgtagagcgttacgtaacctcggatccctcttgaaaccaggcggttttctcgttattatggacgcattgaagagtagctattacatgatcggggaacagaaattctccagcctccccctaggtagagaggctgtcgaggccgcagtcaaagaggccggttataccattgagtggttcgaggtgatatctcagagttatagctctacaatggccaataacgaaggcttatttagtttggtcgcccgaaaactcagcagaccactctag

SEQ ID NO: 232677 - DNA, 759 bp, synthetic construct
  misc_feature 1..759: note = Description of Artificial Sequence: Synthetic coding sequence
  source 1..759: mol_type = other DNA
atgaagtctagaatccccgttgtgttgctggcgtgcggttcatttaacccgatcacaaatatgcacttgcggatgttcgaagtggcacgggaccacctgcatcaaacaggaatgtatcaagtgatccagggaatcatctccccagtcaacgacacatatggaaaaaaagacctggccgcatctcaccaccgagtcgctatggcccgactcgctctccaaacgtccgattggatccgagtagatccatgggaatctgagcaggctcagtggatggagaccgtgaaagtgttgcgccatcaccattctaagcttctaaggagcccaccacagatggaagggcctgatcacggcaaggccctgttttctacccccgcagcggtaccggaactgaaacttttatgcggtgccgatgttctcaaaacattccaaacccctaacctgtggaaagacgcacatatccaggagattgtggagaagtttggtcttgtgtgcgtaggccgtgtcgggcatgacccaaagggctacatcgctgaatctcccattcttaggatgcatcagcacaatattcacctggcaaaggagcctgtccaaaacgagattagcgcgacttacatcagacgcgcattgggacagggccagtctgtgaagtacctcattccagatgccgtcataacttatattaaggaccacggtctgtatacaaagggaagcacatggaaagggaagagcacccagtccacggagggaaaaacgtcctag

SEQ ID NO: 232678 - DNA, 648 bp, synthetic construct
  misc_feature 1..648: note = Description of Artificial Sequence: Synthetic coding sequence
  source 1..648: mol_type = other DNA
atgtatcaggtaatccagggcattattagccccgttaacgacacctatggaaaaaaggatttagccgcatctcaccatcgcgtagctatggctcggttagccttgcagacatccgattggatccgggtggatccatgggagtcagaacaggctcagtggatggaaaccgtaaaggtgctgagacatcatcactctaaactgcttcgcagtccaccccagatggagggaccagaccatggcaaagctctgtttagtactcccgcagccgtcccggaactgaaattgctctgcggggcagacgtactgaaaacctttcagactccaaatctctggaaggatgcacacatccaggagatagtggagaagtttggcctggtgtgtgtgggtagagtgggacacgaccctaagggatacatcgctgagtctcctattctgaggatgcaccaacataatatccacttggccaaagagccagtgcagaatgaaatctctgcaacatatattaggcgggctttgggacagggccagtccgtgaagtacctcatccctgatgcagttatcacttatataaaagatcatggcctatacacaaaaggctcaacatggaaggggaaatcaacacaaagtacagaaggcaaaacatcttag

SEQ ID NO: 232679 - DNA, 648 bp, synthetic construct
  misc_feature 1..648: note = Description of Artificial Sequence: Synthetic coding sequence
  source 1..648: mol_type = other DNA
atgtaccaagttattcagggcatcatcagcccagtaaacgatacatacgggaagaaggacctggccgctagtcaccatcgggtggccatggcgaggttagccttgcagacctctgattggataagggtcgacccatgggagtctgaacaggcacagtggatggaaacagtgaaagtgctgagacatcaccattcgaagcttcttcgatctccccctcagatggaaggacccgaccatggcaaagcgctcttctctacacctgcagctgtgcccgaactcaagctcctgtgtggcgctgatgtgctgaaaacctttcagaccccgaacctctggaaggacgctcacatacaggagatagtcgagaagttcgggctcgtgtgcgtgggcagggtgggacacgatcccaagggctacatagctgagtcccccattcttagaatgcaccagcacaacattcatctggctaaggagcctgttcaaaacgagatttcagctacatacattcggcgtgccttagggcagggacagagcgtaaaatacttgatccctgacgcggttattacatacattaaagatcacggactgtataccaaggggtctacttggaagggcaagtctacgcagtccaccgaggggaaaactagctag

SEQ ID NO: 232680 - DNA, 429 bp, synthetic construct
  misc_feature 1..429: note = Description of Artificial Sequence: Synthetic coding sequence
  source 1..429: mol_type = other DNA
atggagggcccagatcacggcaaggccctgttcagtacccccgctgccgtaccagagcttaaactgctgtgcggggctgatgtgctcaagaccttccagactcctaatctttggaaggatgcacacatccaggagattgtggagaagtttggccttgtgtgcgtggggagagtaggacacgaccctaagggctatatcgcagagtccccaatcctcaggatgcaccagcataatatccatcttgcaaaagagccggttcagaacgaaatctccgccacctatatcaggagagccttgggtcaaggtcagtccgttaaatacctgattcccgatgcagtcattacttacatcaaggaccacggcctgtacactaagggaagcacctggaaaggcaagagtacccaaagtactgagggcaaaacctcgtag

SEQ ID NO: 232681 - DNA, 345 bp, synthetic construct
  misc_feature 1..345: note = Description of Artificial Sequence: Synthetic coding sequence
  source 1..345: mol_type = other DNA
atgaagtcacgaattccagtcgtgctccttgcttgtgggtctttcaaccctatcaccaatatgcaccttcgcatgtttgaagtggctagagaccacctccatcagacaggcatgtaccaggtgattcaaggcataatctctcctgtcaacgacacctatggcaaaaaggacttagctgctagtcatcacagagtagccatggccagactggcactccagacatccgattggattagggtggatccctgggaatcagagcaggcgcaatggatggaaaccgtaaaggtgctccgccaccaccacagtaagctgctcaggagtcctcctcagatggaggggccttag

SEQ ID NO: 232682 - DNA, 492 bp, synthetic construct
  misc_feature 1..492: note = Description of Artificial Sequence: Synthetic coding sequence
  source 1..492: mol_type = other DNA
atgaagagtaggatcccagtcgttctcctggcctgcggttccttcaatcctattaccaacatgcacctgagaatgtttgaggtcgcaagggaccatcttcatcaaacagcagtgccagagttaaagctgctgtgcggagccgacgtgctgaaaacctttcaaacccccaacctctggaaagatgcacacatccaggaaatagtggagaaatttgggctcgtctgtgtgggacgagttggtcatgatcccaagggatatatcgccgagtcaccaatcctgcggatgcatcaacataatattcacttggctaaagaaccagtgcagaacgagattagtgcaacctacattcgacgcgcactgggccagggtcagtccgtgaagtaccttatcccggatgcagtgatcacatacataaaggaccacggcttgtacacaaaaggatccacctggaaagggaagagcactcagtcgactgagggcaaaacgtcatag

SEQ ID NO: 232683 - DNA, 3261 bp, synthetic construct
  misc_feature 1..3261: note = Description of Artificial Sequence: Synthetic coding sequence
  source 1..3261: mol_type = other DNA
atggctaacctcctgaagactgtggttaccggctgttcttgtcctttgctctctaatctcggatcatgtaaagggctgcgtgtcaagaaggatttcctgcgcactttttatactcatcaggagctgtggtgtaaggcccctgttaagccaggcatcccctacaagcagttgaccgtgggcgtgcccaaagaaatcttccagaacgagaagagagtcgcattaagtccagctggagtccagaaccttgtaaagcaggggtttaatgttgtggtcgagtcgggtgccggagaggccagcaagttcagcgacgaccattaccgcgtggcaggtgcccaaatacagggagcaaaagaagtgctggcctccgacttagtggtgaaggtgcgcgcacccatggtcaaccccaccctgggggttcatgaagcagacttgctgaagacgagtggcactctcatatcattcatataccctgcccagaatccggagctgctcaacaaacttagccagcgcaagaccaccgtgcttgccatggatcaggttccaagagtgacaatcgcacaagggtatgacgcattgtctagtatggccaatatcgccggatacaaggctgtggtactggccgctaaccattttggaaggttctttactgggcagatcacagctgccggaaaggtgccgcctgccaaaatactgatcgtcgggggtggggttgccggtcttgccagcgccggtgccgctaaatccatgggggcaatcgtcaggggttttgatacacgggctgcagccctagagcaattcaaatccctcggtgccgaaccgcttgaagtcgacctgaaggaatccggagaaggacagggtggttatgccaaagaaatgagtaaagaatttatcgaagctgagatgaagttattcgctcaacagtgcaaggaagtcgatatcctcataagcacagctttgattccagggaagaaagctcctgtgttgttcaacaaagaaatgatagaaagtatgaaagaggggagcgtggtggtggacctagctgccgaggcaggtgggaatttcgaaacgacaaagccaggtgaattgtatattcacaagggcatcacacatataggctacaccgatctacctagtcgtatggcgacacaggccagtacattatactccaataacattaccaaactactgaaagcaatcagcccagacaaagacaacttttacttcgatgttaaagatgacttcgactttggtacaatgggccatgtgatccgaggtaccgttgtgatgaaggatgggaaagtgatatttcccgctccaacaccaaagaatatccctcaaggtgctcctgtgaagcaaaagaccgtggccgagctggaagccgagaaggcagcaacaatcacccctttccgcaaaaccatgtctaccgccagcgcctataccgcagggctgaccggaatccttggactgggcatagcggcaccaaatcttgcattctcccagatggtgacgacctttggactggccggtatcgttggctaccatactgtatggggtgtgactccagctctgcacagccctctcatgtctgtgactaatgctatctctggactcactgccgtcggtggtttggctctgatgggcggtcacctgtatcctagcacgacttcacagggactggctgccctggctgcttttatcagttctgtgaacatcgcgggtgggtttctcgtgacacagcggatgcttgatatgtttaagcggccaacggatcccccagagtacaactacttgtacctgttacccgcaggcacatttgtcggagggtaccttgccgcattgtatagtggatacaatatcgagcaaataatgtatttaggcagcggactttgctgcgtaggcgctctggcgggtctatcgacacagggtactgctcgcctgggaaacgctctgggcatgattggtgtcgcgggtgggctggccgcaacccttggagtgctgaaaccgggtccggagttgctcgctcaaatgagcggggcaatggcactcgggggtactattggcctcaccatagctaagcgcatccagatcagcgacctgccccagttggtggccgcattccattctctggtggggctggccgctgtgctgacttgcatcgcggaatatattatcgagtatcctcatttcgcaactgacgccgctgctaacctgaccaaaattgtcgcttacctagggacttacattggtggcgttacgtttagcggatccctgatcgcctacggaaagttgcaggggctgttgaaaagcgcgccattgctactgcccggtcgccacttactaaatgccggactgcttgccgcttccgttggaggaatcataccattcatggtagacccgtcatttacgactgggatcacctgcttgggatccgtgagtgctctgtccgcagttatgggcgtgaccctgaccgccgctatcgggggtgcagacatgcccgtcgtaattaccgtacttaacagttacagcgggtgggctctgtgcgcagaagggtttcttctcaacaataatctgctcaccattgtcggcgctctgataggatcgtctggtgcgattcttagttatattatgtgtgtggccatgaacagatctctggcaaatgtgattcttggcggatatgggacgacctctacagcaggcggaaaaccaatggagatctctgggacccatacggagataaatctggataatgctatcgatatgatcagagaagccaactccattattatcacccccggttatggattatgtgccgctaaggctcagtaccctattgcagatctcgttaaaatgctcaccgagcaaggaaagaaggtaaggtttgggatccaccctgtggcgggacgtatgcccggacagctgaacgttctgctcgccgaggccggtgtaccatacgatatcgtgctggagatggatgaaattaatcacgacttcccagacacagacttggtcctggttataggagccaacgatacagtgaattctgccgctcaagaagatcctaatagtataatcgcaggaatgcccgtcctggaggtgtggaagagcaaacaggtcatagtgatgaagagaagcttgggcgtgggatatgctgctgtggataatccaatcttttataagcctaataccgctatgctgcttggcgacgcaaagaagacctgcgacgctcttcaggcaaaagtccgggaatcttaccagaaatag

SEQ ID NO: 232684 - DNA, 3261 bp, synthetic construct
  misc_feature 1..3261: note = Description of Artificial Sequence: Synthetic coding sequence
  source 1..3261: mol_type = other DNA
atggccaacttacttaagactgtcgtaaccggctgctcctgtcccctcctgagtaacctgggctcttgcaagggcttgagggtcaagaaggacttcttaagaaccttttatactcatcaggagctgtggtgtaaagccccagtaaaacctgggattccttacaaacagcttactgttggggtaccaaaggagatcttccaaaatgagaaaagagtcgcactcagtccagccggagtgcaaaacctggtgaaacagggtttcaacgtggtcgtggagagcggagcaggagaagctagcaaatttagtgatgaccactatagggtggctggagcgcagatccagggtgctaaggaggtgctggccagcgatctggtggttaaagtgagggctcctatggtcaatcctacactgggggtgcacgaggctgacctgctcaaaacgtccggaacactcatttctttcatataccctgcccagaatccagagttactcaacaaactttcgcagcgcaagaccaccgtgttagccatggatcaagtccctcgggttactatcgcacagggatatgatgcccttagctctatggccaacatcgcaggttataaagcagtggttcttgctgctaatcactttgggaggttttttacaggacagattacagcagccggaaaagtccccccagccaaaatcttaatagtgggcggaggagtggcaggcctagcctcagcaggcgcagccaagagcatgggtgctattgtgagaggattcgacacacgggctgcggctctagagcagtttaagagtttaggcgcagagcccttagaggtggatctgaaggaaagtggggaaggccagggcggatacgccaaagagatgtccaaagagtttatcgaggccgagatgaaacttttcgcccagcaatgcaaggaagtcgacattctgatttcaaccgctctgatccccggaaagaaagctcctgttctgtttaacaaggaaatgattgagtcgatgaaggagggttctgtcgtggtggacctcgctgcagaagcgggtggtaattttgagactacgaagccgggagaactgtacatacacaaaggaatcacacacattggatatacagacttaccctctcgcatggcaacccaggcatccaccctgtactctaataacatcactaaactactcaaagccatctcaccggacaaggataacttctatttcgacgtgaaggacgactttgatttcggaacaatggggcacgtcattagagggaccgtggtcatgaaagatggcaaagtgatctttccagcacctacacccaagaatatcccccagggagccccagtgaaacaaaagaccgtggcagagctggaagccgagaaagctgccaccatcaccccgtttcggaagactatgagcaccgcgagcgcttatacagccggattaactggaatcctgggcttaggcatagcagctccaaacctggccttttctcagatggttacaacttttggactagccggaattgtcgggtaccataccgtatggggtgtcacgccagcccttcatagccccctcatgagtgtaaccaatgccatctcgggcctgaccgctgtgggaggcttggcgctgatgggtggacatctgtatccgagcacaacaagtcagggtctagctgcgctggctgccttcattagtagcgtcaatattgccggtggattcctcgtaactcagcggatgcttgatatgtttaagaggccgacggaccctcccgagtacaattacttgtacctcctgcctgctggcacgtttgtaggcggttatcttgccgctctgtactccggatacaatatcgagcaaatcatgtacctaggatcaggcctgtgttgtgtgggcgctcttgccggtttaagcacccagggaactgcgaggttagggaacgccctggggatgattggcgttgcaggcggtttagctgccacgttgggcgtccttaagcccggtccagagttacttgcacagatgagcggcgctatggcactgggcggaaccatcgggcttaccattgccaagcgtatccaaatctcagatcttcctcagctggtggctgcttttcattccctcgtaggtctcgccgctgtgctgacatgtattgctgagtacatcatagagtaccctcattttgctacagacgctgcagctaacctcaccaagatcgtcgcatatcttgggacttacattggaggggtcaccttttccggcagcctgattgcttatggaaagctgcagggcctgctgaaatcagctcccctgctgttgccagggagacacctactgaatgcaggactactagccgctagtgtgggtggtataatcccttttatggtcgatccgagcttcaccactggcatcacttgcttgggctccgtgagcgctctgtctgcagtcatgggtgtgacactcaccgccgcaatcggcggagcagatatgcccgttgtgatcacagtgctgaatagctacagcggatgggcactgtgcgcagaggggtttcttctcaacaacaatctgcttaccattgtcggtgcactgattggaagttcaggggctatcctgtcttatattatgtgcgtcgccatgaataggtcactagctaacgtaattctgggagggtacgggaccacctcaactgctggcggaaagccaatggagatcagcgggacccacaccgagatcaaccttgacaacgcgatcgatatgatccgtgaggctaattccatcatcatcacccctgggtatggcctctgtgccgctaaagctcagtatcccattgcggatttggtaaagatgctcacggagcagggaaagaaggtacggttcggtattcacccagtcgccggaagaatgccaggacagttgaatgtgctcctcgccgaagcaggagtcccgtacgatattgtgttggagatggacgagattaaccacgacttcccggatacagacctggtactcgtcatcggggctaacgatacagtcaactcggccgctcaggaggatccaaattccatcatcgccggaatgccggtcctcgaggtgtggaagagcaagcaggtaatagttatgaagaggagcttaggggttggatacgccgcagtggacaaccctatattttataaacccaacaccgccatgcttctgggagatgccaagaagacctgcgatgccctccaggccaaggttcgtgaatcttatcaaaaatag

SEQ ID NO: 232685 - DNA, 600 bp, synthetic construct
  misc_feature 1..600: note = Description of Artificial Sequence: Synthetic coding sequence
  source 1..600: mol_type = other DNA
atggccaatctgctcaagacagtagttacaggttgtagttgccctctcctctcgaacctggggtcttgtaaaggcctccgggtgaaaaaagatttcctaaggactttctatacccaccaggaactctggtgcaaggctccagtgaagcccggaatcccttataagcagttaactgtgggggtgcccaaggagatcttccaaaacgaaaagagggtggcgctcagtcctgctggcgtacagaacctggtcaaacaggggttcaacgtggtcgtcgagtcgggggctggagaagcttcaaagttctccgacgaccactaccgggtggccggagctcagatacagggcgcaaaggaagtattggctagtgacctcgtagtgaaagtacgcgctccaatggttaatccgacattgggagtgcatgaggccgacctccttaagacttcaggcactctaataagttttatctatcccgctcaaaatcctgagcttctgaacaagctgtcacagcgtaagacaacagtgcttgctatggaccaggtcccacgagttacaattgctcaggggtatgacgctctgagttctatggcaaatatagcttag

SEQ ID NO: 232686 - DNA, 654 bp, synthetic construct
  misc_feature 1..654: note = Description of Artificial Sequence: Synthetic coding sequence
  source 1..654: mol_type = other DNA
atggccaacttgctgaaaactgtcgttacagggtgctcttgtccactgctgagtaacctcggctcttgtaagggactgcgagtgaaaaaggattttctgcgaaccttttatactcaccaggagctttggtgtaaagcaccggtgaagcccggtatcccctataagcagctgaccgttggagtgcctaaggaaattttccagaatgagaagcgcgtcgcattgtcccctgcaggcgtgcaaaatttagtgaaacagggctttaatgttgtggtggaatctggggctggagaggcctctaagttttccgacgaccactaccgcgtcgctggcgcacagatacaaggagctaaagaagtccttgcctcagacttggttgtaaaggtcagggccccaatggtcaaccccactctcggagtgcatgaagccgatttgctgaaaaccagtgggacactgataagtttcatttatcccgctcagaaccctgagctgttaaataaactgagtcagagaaagacgacagttctggccatggaccaagtaccaagggtgactattgcccaagggtacgatgctctgtctagtatggccaatattgcagggtataaggctgtcgtcctggccgcaaaccacttcggcaggttctttactggttag

SEQ ID NO: 232687 - DNA, 1806 bp, synthetic construct
  misc_feature 1..1806: note = Description of Artificial Sequence: Synthetic coding sequence
  source 1..1806: mol_type = other DNA
atgctgtcttggaaccgtgtgcgagcaaaacttccgtcatcacaaatggtcacgacatttggtctggcgggaattgtggggtaccatacagtgtggggtgtcacccccgctcttcattctcctctgatgagtgtcacaaacgccatatccggcctcacagctgtcggcggactcgcgctcatgggcggacatctgtacccttccaccacttctcaagggttggccgctctggcagcatttatatctagtgttaatatagccggagggtttctggtaactcaaaggatgcttgacatgttcaagcgtcctacagaccctcccgagtacaattatctatatttgctgcccgcaggcacgtttgtaggtggctacctggccgcattatactcgggatacaacattgagcagattatgtacctcggttctggcctatgctgcgtcggagcgctggctgggctgtccacgcagggtacagccaggctcggtaacgcactcggaatgatcggcgtcgccggaggcttggccgctacccttggggtattaaaaccaggtcctgaattgttagcccaaatgtccggcgcaatggcacttggcggtacaataggcctgaccatcgcaaagcgtatccaaatttccgatctcccacaactcgtcgccgctttccactctcttgtgggactagccgctgtcctaacatgtatagctgaatacatcatcgaatatcctcatttcgctacggatgcagcagcgaatctaactaagattgttgcttacctcggtacctacattggcggtgtaacattctcaggctctttgatcgcatacggcaagctacagggcctgctgaagtctgcacccctcctgctccccggacgccacctactgaacgcagggctgcttgccgcttccgtgggcggaattatccccttcatggtggacccctccttcacaacgggcatcacctgtctggggtccgtgagcgcactcagcgccgtcatgggggtcaccttaaccgcggctatcggaggagccgacatgccagtggttatcaccgtgctcaatagttactcaggttgggctctctgcgccgagggctttcttctgaacaacaacttgttaactatcgtgggggcactgataggaagctccggggctatcctgtcatatattatgtgcgttgccatgaataggtccctggcaaatgtcattctaggcggttacggcacaacttccaccgcagggggtaaacctatggagataagcggaactcataccgagatcaacctggacaatgctattgatatgatccgtgaagccaatagcattatcataacacccggatatggactctgtgctgcaaaggcacagtatccgatagccgacttggttaaaatgctcactgagcaaggcaaaaaggtgcggttcggaattcaccctgtggcgggacgtatgcccggtcagttgaacgttctgctagctgaggccggtgtcccttacgatatcgtactggagatggacgagattaatcacgacttccccgataccgatctcgttctagtcatcggtgccaatgacacagttaactccgccgcacaggaggatcccaacagcattattgctggcatgccggttctagaggtgtggaagagcaagcaggttattgtgatgaagagaagtctgggtgttggttatgctgctgtagataaccctatcttctacaagcccaacacagctatgctcttgggggacgccaaaaaaacttgcgatgccttgcaggctaaagtgcgagaaagctatcagaagtag

SEQ ID NO: 232688 - DNA, 357 bp, synthetic construct
  misc_feature 1..357: note = Description of Artificial Sequence: Synthetic coding sequence
  source 1..357: mol_type = other DNA
atgcggcgagcaggccttggagagggcgtcccaccgggtaattatggcaattatggatatgcaaatagtgggtacagcgcttgtgaggaagaaaatgagcgactgacggagtcattgcgaagtaaagtgactgcaattaaatctctgagtattgagataggccatgaagtgaagacacagaacaaactgctggccgaaatggactcacagtttgacagcaccacaggattcctgggcaagaccatgggcaaattaaagattctaagtcgaggctcgcagactaagctgttatgctatatgatgctattttccttattcgtgttcttcataatttactggattattaagctgagatag

SEQ ID NO: 232689 - DNA, 1107 bp, synthetic construct
  misc_feature 1..1107: note = Description of Artificial Sequence: Synthetic coding sequence
  source 1..1107: mol_type = other DNA
atgaatccggcagccgaagccgaattcaatatactgctggcgactgacagctacaaggtcacgcactataagcaatatccacccaataccagcaaagtttatagctacttcgaatgcagagagaaaaagacagagaatagtaagctgcgcaaggtgaaatacgaagagaccgtgttttatggcttgcagtatatcttaaacaaatatcttaaagggaaggttgtgacgaaagaaaaaatccaagaagctaaggacgtgtacaaggagcatttccaagacgacgtatttaatgaaaagggctggaactacatactggagaaatatgatgggcacctgcctatcgagatcaaggccgttcctgaagggtttgtgatcccaagaggcaacgtcctgtttacagtggagaacactgatcctgaatgttactggctgaccaactggatagaaactatcttagtacaatcttggtatccaatcactgttgccaccaatagtagggagcagaagaagatactggctaagtatctcttggagacatcaggaaatctggatggacttgagtacaagctgcacgattttgggtaccggggtgtgtccagtcaggaaacggctggtataggggctagcgcacacctcgtcaatttcaagggtaccgatactgtggccggtcttgctctgatcaagaaatattatgggacaaaggaccctgtacctggatactcagtgccagcagctgagcattctacaatcaccgcatggggcaaagatcatgagaaagatgcctttgaacacattgtcactcagttctcttccgtgcctgtctcagtggtctccgactcttatgatatatacaatgcatgtgagaaaatatggggcgaggacttgaggcaccttatcgtgagcaggagtacccaggcgcctctgatcataaggcccgattccggtaacccactagacacagttcttaaggtacttgaaattctgggaaagaagtttcccgtgaccgaaaattccaaagggtataagctattgcccccttacctgagagtaattcaaggggatggagtcgatatcaatacgctacaggaggtgtgcgtcctttattag

SEQ ID NO: 232690 - DNA, 183 bp, synthetic construct
  misc_feature 1..183: note = Description of Artificial Sequence: Synthetic coding sequence
  source 1..183: mol_type = other DNA
atgaatccggctgcggaggccgagttcaacattctgctcgccacggatagctacaaagtgacccactacaagcagtaccctccaaacacttctaaggtgtactcatacttcgagtgtagagagaagaaaactgagaactcaaagttgcgtaaagtcaagtacgaggagactgttttttattag

SEQ ID NO: 232691 - DNA, 267 bp, synthetic construct
  misc_feature 1..267: note = Description of Artificial Sequence: Synthetic coding sequence
  source 1..267: mol_type = other DNA
atgaacccagcagcagaagccgagttcaacattttactggcaaccgatagctacaaggttactcactataaacagtatccgccaaacacttccaaagtgtattcttatttcgaatgcagggaaaaaaaaacagaaaatagcaagctgcgaaaagttaagtacgaagaaaccgtgttttacgggcttcagtatatccttaacaaatatctgaagggtaaggtggtgacgaaagagaagattcaggaagccaaggacgtatacaagtag

SEQ ID NO: 232692 - DNA, 1701 bp, synthetic construct
  misc_feature 1..1701: note = Description of Artificial Sequence: Synthetic coding sequence
  source 1..1701: mol_type = other DNA
atggcagctgagcaggaccccgaagctcgggctgcggctcggccactgttaacagatttgtatcaagcaaccatggcccttggatactggcgggcaggcagagccagagacgctgccgagtttgagctcttcttccgtagatgtccctttggcggagccttcgctctggctgccggactcagagattgcgtgcgcttcctgcgagcctttaggctccgggatgcggacgtccagttccttgcatcggtcctgcccccagacacggatcccgcattcttcgagcatctgcgagcgctagattgctctgaggttaccgtcagggctctgcctgagggatctttggcctttcccggagtgcctctgttgcaggtttccggacccctgcttgtagtgcaactcctggagacccccctgctgtgcctagtcagttacgcttctctggtagctactaatgccgctcgtctccgcctgattgcaggcccagagaagcggctgctggagatgggcttacggagggcccagggacccgatggaggcctgacggcctccacttactcgtacctcggcggattcgacagctcctctaatgtgctggccggtcaattgcgaggcgtccccgtggccggaaccctggcccattcttttgttacatcattctctgggtcagaggttccccctgaccccatgctggcacccgcagcgggagagggtcccggtgtagatctagctgcgaaagcccaggtttggctggaacaggtctgcgcacacttaggcctcggcgtgcaggaaccacaccccggagaaagggctgccttcgtcgcttacgctctcgcttttcctagagctttccagggtctgctcgacacttactccgtctggcgtagtggcctaccaaattttctggctgtcgccctggccctgggtgaactcggataccgggctgtcggtgttcgattagacagcggggacctcttgcaacaggcgcaggagatccgcaaagttttcagagcagccgctgcacagttccaggttccttggctggaatcagtgctgatcgtcgttagtaacaacatcgatgaagaagccttggccagactggcccaggaagggtctgaagtcaatgtgataggtatagggacttctgttgtgacttgcccacaacagccaagcctgggaggggtttacaagctagttgctgtgggcggtcagccgagaatgaaacttacagaagacccggaaaagcagacactgccgggatccaaggccgctttcaggctcctaggttcagatggaagccccttgatggatatgttgcaattagcagaggagcctgtcccacaagccggacaggagttgagagtatggcctccaggcgcacaagagccctgtacggtccggcctgcacaggtagaaccccttctgcgcctctgcctccagcagggccagttgtgcgaacccctgccgagccttgctgaatcaagagcacttgcccagttgtccctgtctagactttctccagagcaccgcaggctgagatcccctgcccagtaccaggtgggcggtggaccgccttgtcactctgctctttgcgctcccgctctgacgctcccgactgcaccggtcctctgttccctgcaggtcgtgctttctgagcggctgcaggccctggttaatagcctctgcgctggccagagcccatag

SEQ ID NO: 232693 - DNA, 1578 bp, synthetic construct
  misc_feature 1..1578: note = Description of Artificial Sequence: Synthetic coding sequence
  source 1..1578: mol_type = other DNA
atggctgcagagcaagaccccgaggctcgcgcagctgcacggccacttttaacggacctctatcaggccaccatggctctgggctactggcgggctgggcgtgcgagggacgcagccgaatttgaactgtttttcaggaggtgcccatttgggggagcctttgcactcgcggcaggattgcgcgattgtgtgcggttcctgcgcgcatttagactgcgcgacgctgatgtgcaattcctggctagcgtcctcccacctgacacagatccggcttttttcgagcaccttagagcgttggactgcagtgaggtgacggtgcgagccctgccggaggggtcactggcattccctggcgtgccactgctacaggtcagcggtcccttgctggtggtacagctcttagaaacgccgcttctctgtctggtttcttacgcaagcttggtggctactaatgcggctcgactcaggctgatagccggtcctgaaaaacggctgcttgagatggggcttcggagagcgcaggggcctgacggagggcttacagcttcaacttatagctatctgggagggttcgattcatctagcaacgtgttagccggacagctccgaggtgttccggtggccggtacgctggcacactcatttgtgactagcttttcaggaagtgaggtgccacccgaccccatgctggccccagctgcaggggaagggcctggtgtggacttggccgcaaaagcccaggtctggctcgaacaggtctgcgcccacctcggactaggggttcaggaaccccaccccggtgagcgggcagcctttgtagcttacgcattggcttttccaagagcattccagggcttactcgacacctattctgtgtggagaagtggtttaccaaacttcctcgccgtagccctcgcgttgggtgaactagggtatcgtgccgtcggcgtaaggctcgactccggggacctcctgcaacaggcccaggaaatccgtaaggtgttccgcgctgccgctgcacaattccaagtgccttggctagaaagcgttttaatcgtggtgtctaataacatagacgaggaggcccttgctcggctggcccaggagggcagcgaggtaaatgtgattggtatcggaactagcgttgtaacatgtcctcaacagccgtcactgggtggcgtgtacaaactcgtagcagtcggcggtcagcctcgtatgaaactaaccgaggacccagaaaagcagacactccctgggagtaaagccgcttttagactcctcggcagcgatgggtctccacttatggatatgttacaacttgcggaggagcccgtgccccaggctggccaggaactgcgtgtctggccaccaggtgcccaggagccctgcaccgtccgtcctgcgcagctctgcgagccactcccctctctggcggagtcaagggccctggcacaactgtccctttctaggttgagccccgaacatcgtagactgagatctccagctcaatatcaagtggtgttgtctgagaggctccaagctctggtgaacagcttgtgcgccggacagagcccttag

SEQ ID NO: 232694 - DNA, 1473 bp, synthetic construct
  misc_feature 1..1473: note = Description of Artificial Sequence: Synthetic coding sequence
  source 1..1473: mol_type = other DNA
atggcagccgaacaggacccagaggcacgggcagccgcacggccattactcacggatctttaccaagcaaccatggctcttgggtactggcgcgcaggcagggccagggacgctgccgaatttgagctgttctttcggcgttgtccctttggtggagccttcgctctggccgcaggattgcgcgactgtgtcaggttcctcagggccttcagactgcgggacgccgatgttcaatttctcgccagcgttctcccgccagacactgatcctgcttttttcgagcacctccgtgccttagactgttctgaagttactgtgagagcgcttcctgaggggtccttggccttccctggagttcccttgctgcaggtttcaggccctctgctggttgtacagctcttggagacacctctgctgtgcctcgtgtcgtacgcttccctagtggccaccaacgcagcccgtctgaggctgattgcagggcctgaaaagagactgctagagatggggttgcggagagcccagggtccagatgggggattgactgcctcaacatatagttacctggggggttttgacagctcatctaacgtactggccggacagttacgaggcgtcccggtggccggaacgctcgcacactcctttgtgacttcttttagcggttcagaagtccccccagatccaatgctagccccagctgctggcgagggccctggagtcgacctggccgcaaaggcccaagtctggctcgaacaggtgtgtgctcaccttgggctgggggttcaagagccacatccaggcgagcgcgctgcctttgtggcctacgcactggcttttccacgtgctttccaaggattgctagacacctattccgtatggcgcagcggccttcctaactttctggccgtggctttggcacttggcgagctgggttaccgcgctgtgggagtgcggctcgactctggtgacctcctacagcaagcccaggagatcagaaaggtgtttagagccgctgctgcccagttccaggtgccctggctcgagtccgtcttaatcgtggtttctaataacatcgatgaggaagcactcgccaggttggctcaggaaggcagcgaagtgaacgttatcggaatcggaacaagtgtggttacgtgcccgcagcagcccagtctgggaggcgtgtacaagctcgtcgctgttggaggccagccaagaatgaagctgaccgaggaccccgagaaacagacgctgccagggagcaaggctgcatttcggttactggggagtgacgggagtccgttgatggacatgctgcagctggccgaggaaccagtgccccaagctgggcaggagctgcgcgtttggcctcctggagcacaggagccctgcacagtaagacccgctcaagtcgaaccgttgttgagactgtgtttacagcagggccaggtggctgcgccaccgccatccagctag

SEQ ID NO: 232695 - DNA, 1617 bp, synthetic construct
  misc_feature 1..1617: note = Description of Artificial Sequence: Synthetic coding sequence
  source 1..1617: mol_type = other DNA
atggccgcagagcaggatcctgaggcacgggctgctgccaggcctctattaacggacctgtaccaggcaactatggcactcggatactggcgtgctggacgcgcaagagatgcggctgagttcgaattgtttttccgtagatgtcccttcggcggagctttcgcgctggccgcaggactcagggattgtgtgcggtttcttcgagccttcaggttaagggatgctgacgtgcagttcttggccagcgtgttgccacctgacaccgaccccgctttttttgagcaccttagggccctggattgcagtgaagtgaccgtgagggccctccccgaggggagccttgctttccccggagtccctctgcttcaagtctctggtcccctcctggtggtgcagctgttggagactccgctgctgtgtttagtttcctacgcctcactggtcgccaccaatgcagctcgtctcaggctgatcgcgggacccgaaaaacggcttttggaaatgggtcttcggcgtgctcagggcccagatggcggacttaccgcctccacatactcctacctcggcggtttcgactcctcctccaatgttctagcagggcagcttaggggagtgcctgtggccggaaccctggctcactcctttgtcacttccttctctggcagcgaagtgcctccagaccctatgctggcacccgctgcaggcgaggggcctggggtagatctggcagccaaagcccaggtgtggctggagcaggtgtgtgcccacctaggattgggtgtgcaggagccacatcccggtgagagggcagccttcgttgcatatgcgctggccttccctagagcctttcagggtctactggacacctacagtgtttggcggagtgggctgcctaattttctcgccgtagcccttgccctcggagaactcggctatcgggctgtaggtgttcgtctagactcaggtgatctgctgcaacaagcccaggagatacgcaaggtgttcagagccgctgctgcccagttccaagtcccttggctcgagtccgtgctgattgttgtttcaaataacattgacgaagaggccctggcccgactggcccaggagggtagcgaggtaaatgttatcggcataggaaccagcgttgtgacgtgtccccagcagcccagcctgggtggcgtgtataagctggtagccgtcgggggacagccaagaatgaagcttacagaagacccggaaaagcagacacttcccggtagcaaggccgcttttcggttgctcggttctgacggctccccactcatggatatgctccaattagctgaagagccagtgccacaggctgggcaggaactgcgggtgtggccacctggggctcaggagccttgcaccgtgcgacccgctcaggtcgagccgctccttcgactgtgtctgcagcaaggccagctatgcgagcctctaccatcacttgcggagtcacgcgctctcgcccaattgtccttgagccgtctgagccctgaacataggagactcaggtctcccgcacagtaccaagtggtcctgagtgagaggctgcaggctctggttaattcattgtgcgctggtcaaagcccctag

SEQ ID NO: 232696 - DNA, 2199 bp, synthetic construct
  misc_feature 1..2199: note = Description of Artificial Sequence: Synthetic coding sequence
  source 1..2199: mol_type = other DNA
atgccggaggaaactcagacacaggaccagcccatggaggaggaggaagttgaaacttttgcttttcaggctgaaatcgcgcagctcatgtcattgatcatcaatactttctattcgaacaaggagatttttctgcgggaactcatttcaaactcttccgatgccctggataagatccggtacgagagtttgacagacccctccaagctggacagtggtaaggaactgcatattaatttgattcccaacaaacaggacagaaccctcacgattgtggatacggggatcggtatgacaaaggccgatctcataaacaatctgggtaccatagccaaatctggcacaaaggcctttatggaagcactccaagcgggagccgacatcagtatgattgggcagtttggagttgggttttacagcgcttatttggtcgctgagaaggtcactgtaatcaccaaacataatgacgatgaacagtacgcttgggagagcagcgctggaggctctttcactgtgaggaccgacaccggggagccgatgggaagaggaacaaaagtcattctgcatctgaaggaggatcagaccgagtatcttgaggaacggaggattaaagaaatagtcaagaagcatagccagtttatagggtaccccattacactcttcgttgagaaggagcgagacaaagaggtgtccgatgatgaagctgaagagaaggaggataaggaagaggaaaaagagaaagaagagaaggaatccgaagataaaccagagatcgaggacgtcgggagtgacgaggaggaagagaaaaaggacggtgacaagaagaaaaaaaagaaaatcaaggaaaagtatatcgaccaggaggaactgaacaaaaccaagcctatttggactagaaaccctgatgacattacaaacgaagaatacggtgaattttataagagtttgaccaatgattgggaagaccatcttgcagttaagcacttttccgtcgaaggtcagctggagtttcgggcactgctctttgttcccagacgtgctccttttgacctgtttgaaaaccgtaaaaagaagaataacatcaagctttatgtgcggagagtgtttatcatggataactgtgaagagctgatccccgagtacttaaatttcatccgaggagtggtggattctgaggatctcccgctgaacattagccgcgagatgcttcaacagagtaaaattctcaaggttatccgaaagaatctggtgaaaaaatgcctggaactctttactgagctagccgaggacaaggagaactataaaaagttctacgagcaattttccaaaaacatcaagctgggaattcacgaagactcccagaaccggaagaaattgtcggagctgctccgctactatactagcgcgagtggggacgaaatggtgagcttaaaagactattgcactagaatgaaagagaatcagaagcacatttactatatcactggcgaaaccaaggatcaggttgctaacagcgctttcgtagagagactgagaaagcacggcttggaagtgatctatatgatcgagcccattgacgagtactgcgtgcagcagctgaaagaatttgaaggaaagacccttgtcagcgtcacaaaagaaggcttagaactccccgaggatgaagaggaaaagaaaaaacaggaggagaaaaaaactaaatttgagaatctgtgcaagattatgaaagatatcctggaaaaaaaggtggagaaggttgtcgtttcaaataggcttgtgaccagtccttgttgtatagtaacctctacatatggatggacagctaatatggagcgaattatgaaagctcaggctctgcgggataattccacaatggggtacatggcggctaagaaacatctggagatcaatcctgatcactctatcattgaaaccctgcgccagaaggccgaggcggataagaatgataaatccgtaaaggacctggttatcctcctgtatgaaacagctcttttgtcttctggttttagcctggaagatcctcagacccatgccaataggatctacagaatgatcaaactgggtcttggcattgatgaagacgatcccacagcagatgatacgtcagcagccgtgactgaagaaatgcctcccctcgagggggatgatgacacatctagaatggaagaagtcgattag

SEQ ID NO: 232697 - DNA, 2910 bp, synthetic construct
  misc_feature 1..2910: note = Description of Artificial Sequence: Synthetic coding sequence
  source 1..2910: mol_type = other DNA
atggagggagacagggtggcagggagacccgtgctttctagcctccccgtgttgcttctgctacccctgcttatgctgcgagctgctgccctgcaccccgatgagttgttcccccacggagagtcctggggtgaccagctcctgcaggagggggatgacgagtcttcagctgtggtgaagctggccaatcccctgcacttttacgaagctcgattctctaacctctatgtcggaactaatgggatcatttcgacacaggacttcccgcgagagacacaatatgtagactatgattttcctacagattttcctgcaattgctccattcctggccgacatagatacctcccacggacggggaagggtcctgtatagggtcaacggtaaggtgagcggccatctgcacgtggggcatactccggtgcatttcactgatgtcgacctgcacgcttatatcgtcggtaatgacggcagggcttatacagcaatctcacacatccctcaaccagcggctcaggcgctactgcccctgacccccataggaggtctctttggttggctgttcgcccttgagaagcccggatctgaaaacggctttagcttagccggagcagccttcactcacgacatggaggtcacattttatccgggtgaggaaaccgtcagaattacacagacggctgagggacttgatccagaaaattatttgagcatcaaaacgaatatacagggccaggtgccatacgtctcagctaactttaccgctcatatctctccctataaggaactgtaccactatagcgattcaacagtgacaagtacgagctccagagattactcccttacgttcggagcaataaaccagacatggagttacaggatccaccagaacattacttatcaagtctgccggcatgctccgcgacacccttcatttcctactactcagcaactgaacgtggatcgagtgttcgcgctgtataatgatgaagagcgggtgctcaggttcgccgtgactaaccagattggccctgtaaaagaagacagtgacccaactccgggaaatccttgctacgacggcagccatatgtgcgacactaccgcccgttgtcatcccggtacaggcgtggactatacctgcgagtgcgcctctggctaccaaggagatggacggaactgcgtagacgagaatgagtgcgccaccggcttccatcgctgcggccctaactccgtctgcattaacctgcctggttcttaccgctgtgagtgccgcagtggatacgagttcgctgatgacagacacacttgtatcctgataacacctcctgccaacccctgcgaagacggctcccacacctgtgcaccagccggtcaggccagatgcgttcaccacggaggcagcacttttagttgcgcttgtctacccggatatgctggggacggccaccaatgtaccgatgtggacgagtgtagcgaaaataggtgccatccggctgccacgtgttacaatactcccggttcttttagctgtcgatgtcagccaggttattatggagacggttttcaatgcattcccgattccacgtccagccttacaccctgcgagcagcaacagagacacgcccaggctcagtatgcatatccgggtgcccgatttcacattccccagtgtgacgaacaggggaacttcctccccctacagtgtcatggatcaaccggattttgctggtgcgtggacccggacggacatgaggtcccagggacacaaaccccaccaggatccacaccgcctcactgtgggccttcccctgagcccacacagagacctccaaccatttgtgagaggtggagagagaatctgctggagcactacggaggaactcctcgcgatgaccaatatgtgccccagtgcgacgatctcggtcatttcatccctcttcagtgccatggaaagtccgacttctgttggtgtgtggacaaggatggccgtgaagtccaaggaacgagaagtcagcctgggacaactccggcatgtattcctactgttgcccctccgatggtgcggccaacccctagacctgatgtaactccacctagcgtcggcaccttcttgctctatacacaggggcagcaaatagggtaccttccattaaatggtactcgtctgcagaaggacgccgctaagacactgctatctctccacggcagcattatcgttggaatcgactatgactgcagagagagaatggtgtactggaccgacgtcgccggaaggactatctctagagccggactcgaattgggggcagaacctgagacaattgtcaattccgggctgatctctcccgagggccttgccattgaccacatcagaaggactatgtattggaccgacagtgtgcttgacaaaatcgagagcgccctcttagacggatcggagcgcaaagtgttattctacaccgacctcgtaaaccccagagccattgccgtggacccaatccggggtaatctgtactggacggactggaaccgcgaagcacccaagatagaaacttcctccctggacggtgagaacaggagaatattgatcaacactgatattggcttgcccaatggcctcacattcgatccattctccaagcttctgtgttgggctgatgcaggcactaagaaactggaatgtactcttcctgacggaaccggcagaagagtcattcagaacaacttaaaatatcccttttcaatagtgagctacgcagaccacttctaccacaccgattggaggagagacggagtagtgtctgtaaacaaacatagcggtcagttcaccgatgaatacttgccagagcagcgatcgcatctatatggcattacagccgtatatccgtattgtcctaccggacgcaaatag

SEQ ID NO: 232698 - DNA, 3543 bp, synthetic construct
  misc_feature 1..3543: note = Description of Artificial Sequence: Synthetic coding sequence
  source 1..3543: mol_type = other DNA
actcctcagaccgagcgtatcacccacagtagtatcagttggagttttctgttgcggtttagcagaggcaaattgttgatgcttagagccgctgcattacatcctgacgaactgtttccccacggtgagtcgtggggagaccaactgctccaggaaggcgacgacgaatcttccgcggtggtcaaactcgccaatccattacacttttacgaagctcggttctccaatctctatgtagggaccaacggcatcatctctacacaggatttccctagggagactcaatatgtggattatgactttcccaccgacttccctgccatcgctccttttcttgctgacatcgacacgtctcatgggagggggagagtactgtatagggaggacactagtccagccgtgctcggcctggcagcgcgttatgtccgcgctgggttcccacgcagcgccagatttacgcctacgcatgcgttcttggctacatgggagcaggtaggagcctatgaagaggtcaaacgaggggctctgccatccggggagctgaataccttccaggccgtcctcgcatcagacggaagcgacagctacgctctgtttctctaccccgcaaacggtctgcaatttctgggcacacggcctaaggagagttacaatgtgcagcttcagcttcccgcacgcgtgggattctgtaggggcgaggccgacgatttgaagagcgagggcccttacttttccctgaccagcactgagcagtctgttaagaacctttaccagcttagcaacctcggcatccctggagtttgggccttccacataggctctacaagccccctggacaacgtgcggcctgctgctgtcggcgacctcagtgccgctcattcctctgtgccactgggaaggtcattttctcatgctaccgctttggaaagtgattacaatgaggataacttagactactacgatgtgaacgaagaggaggccgaatatctgcctggggagccagaagaggcactcaacgggcacagcagcatcgacgtatcttttcaaagcaaggtggataccaaacctctcgaggagagcagtaccctggatccccacactaaggaggggacatcgctaggagaagtgggaggacctgatctcaaaggacaggtagagccctgggacgagagggaaactcgcagtccggctccccctgaggtcgatcgcgattccctagcccctagctgggagactcccccaccctaccctgagaacggttcaatacaaccatatcccgatgggggaccagtgccttccgagatggatgttcctccggcacaccctgaagaggagatcgtgctaagaagttaccccgcatcagggcacacaacacctctcagcaggggaacttacgaggttggcctcgaagataatattggatcgaacaccgaggtgttcacatataacgctgccaataaggagacttgtgaacataaccacagacagtgctcaagacatgcgttttgtacagattacgcaacagggttctgctgccattgtcagagtaaattttacggcaatggcaagcactgtctgcctgaaggggcaccccaccgggtcaacgggaaggtcagcggccaccttcacgttgggcacactcctgtgcactttacggatgtagatctgcatgcatacattgtcggcaatgatgggagggcctacacagctatctcacacatccctcagcccgcagcccaagccctgttgcccctaactccgatcggagggcttttcggatggctgtttgcgttggaaaagcctggatctgagaacggcttttccctggctggggctgctttcacacatgacatggaggtgacattctatccgggtgaagaaaccgttaggatcacccagactgctgagggcctcgaccccgagaactacctatccattaagaccaatatccaggggcaggttccttatgtgtctgccaacttcactgctcatatctctccatacaaagaactgtaccactacagtgattccactgtcacaagcactagctccagagactattctctaaccttcggtgccattaaccagacctggtcttaccggatacaccagaatataacatatcaagtgtgccgacatgcaccaaggcatccctctttccctaccacccaacagctcaatgtggacagagtatttgctctgtacaatgacgaagagcgcgtgcttaggttcgctgtgacaaaccagattggaccagtgaaagaggactctgatccaacacctggcaacccgtgctatgatggctcacatatgtgcgacactaccgcaagatgccaccctggaacaggcgttgactatacctgcgagtgcgcttcggggtatcagggggacggacgaaattgcgtggatgagaatgagtgtgccacaggcttccacagatgtggacccaacagcgtgtgcatcaaccttcctgggagttaccgctgtgaatgccgtagcggctacgagttcgcagacgaccggcatacctgcatactcattacccctccagccaacccctgtgaggatggctctcacacttgcgcacccgctgggcaggctcggtgtgtgcaccacggaggctccacattctcctgcgcctgtctccctggctacgctggcgatggacatcagtgcacggacgttgacgaatgtagcgaaaataggtgccaccccgcagcaacatgctacaacacacctgggtcttttagctgccggtgtcaacctggatactatggcgatggcttccagtgcatccccgacagcacgtcttcccttaccccctgtgaacagcagcagagacatgcccaggcccaatacgcttaccctggagcaagattccacatcccacagtgtgatgaacagggcaactttctcccgctgcagtgccacgggtcaacaggattttgctggtgtgtggaccccgacggacatgaagtccctggaacgcaaacaccacccggatccacaccaccacactgtggccctagtccggaacctacacaaagaccacccacgatttgtgagcgttggagagagaatctactggaacattatggtggtactccaagggatgaccagtatgtgccgcaatgtgatgatttaggtcatttcattcccctacaatgccatggaaaatcagacttctgctggtgtgtagacaaggacgggagggaggtacagggcacgagaagccagcccggaacaacgccggcttgcattccaactgtagctccccctatggttcgcccaacaccaagacctgacgtgactccaccttccgtgggaaccttcctgctatatacccaaggccagcagattggatatctgcctctgaatggaaccaggctacagaaggacgcagctaaaaccctgttatctctgcatgttaagtggattagcccagtgggaggcagggctgcttggctcagccaatgggagccccctcatcggccttgctgtagtgaggtcgactggtgtcgcgaggtgctggaaggcttctag

SEQ ID NO: 232699 - DNA, 3825 bp, synthetic construct
  misc_feature 1..3825: note = Description of Artificial Sequence: Synthetic coding sequence
  source 1..3825: mol_type = other DNA
atggagggagatagggtgaaactcgctaaccctctgcacttctacgaggccaggtttagtaatctttatgtcggcactaatgggatcatatccacccaagatttcccacgagagacccagtatgtcgattatgactttccgacagatttcccagccattgcaccctttttggccgatatcgatacctctcacggacggggtcgtgtcctgtatcgggaagatacctctccagctgtgctgggcttggcagcaagatacgtccgggctggattccctcggtctgctagattcacccccacgcacgcctttctcgcaacctgggaacaggtcggtgcatacgaggaagttaagaggggggctctgcctagcggtgagctgaacacgtttcaggcggtcctcgcatctgatgggagtgattcatacgcactctttctctatccagctaatggattgcagttcttggggacacgacctaaggagtcttacaacgtccagctgcaattgcccgctagagtcggattctgccggggagaggcagacgatctgaagtccgagggcccatatttctcactgacaagcaccgaacagtccgtcaaaaacctctaccagcttagcaacttagggatccccggagtctgggcattccacatcgggtccaccagcccactcgacaatgtgagaccagccgctgttggagacttgagtgccgcacattcatccgtccctctgggcaggtccttttcccatgccactgcactggagagtgattacaacgaagataacttggactactacgatgtgaacgaagaggaggcagaatatttgcccggagagcctgaagaagcgcttaacggtcacagcagcatagacgtgagtttccagtcaaaggtggataccaagccactggaagaatcatccacattagatcctcatactaaggaaggtacatctctgggtgaagttggtggaccagacctgaagggccaagtagagccatgggatgagcgcgagacaagaagtccagcccctcccgaggtggatcgggattccttggcgccaagctgggagacccccccaccttacccagaaaacggctcaatccagccctaccccgatggcggacccgttcccagcgaaatggacgtcccgcctgctcaccccgaagaagaaatagtcctgcgcagctacccagcgtctggtcacactactcccttatctcggggtacctatgaggtaggactggaggataacattggctcaaacacggaggtgtttacctacaatgccgcaaacaaggaaacctgcgagcataaccaccgccagtgttcacgccacgctttttgcacagattacgcgacaggcttctgttgccactgccagagcaagttttatggtaacggcaagcactgtctgcccgagggagccccacacagggttaacggaaaggtttccggccacttgcatgtgggccacacccccgtacacttcactgacgtggacctgcatgcttatatcgtgggcaacgatggacgcgcatatacagccatctctcacatcccccagccggcagctcaggccctcctcccgttgactccaataggtggcttgtttggttggctttttgcccttgaaaagccgggttcagaaaacggcttttcactggccggagcggcatttacgcatgatatggaagtgaccttctaccccggagaggagaccgtccggattacacaaacagctgagggactggatcctgagaattatttgtcaatcaagactaacatccagggccaagtgccttatgtgtccgcgaatttcactgcacacatctccccgtacaaagagttgtatcactactccgatagcacagttacgtcaacctcatctcgagactattccctgacgtttggcgctatcaatcagacctggtcatatcggatccatcagaatattacctatcaggtctgtcgacacgcacccaggcaccctagctttccaacgactcagcaactaaacgtcgaccgggttttcgccctttacaacgacgaggagagggtcctcaggttcgcagtcaccaaccaaatcggccctgtgaaagaagacagtgaccccacacctggaaatccctgttatgatggatcccatatgtgcgacaccaccgctaggtgtcaccccggaacaggcgtggattatacctgcgaatgcgccagtgggtatcagggagacggccgaaactgtgtggacgagaatgaatgtgccacgggcttccataggtgcggtccaaactccgtgtgtattaatctccctggatcatatcgttgcgaatgcaggtccggttacgaatttgctgatgataggcatacctgcatctacgtcgacgaatgttctgagaaccgttgccaccctgctgccacctgctacaacacccccggttctttctcttgtcgatgtcagcctggatactatggtgacgggtttcagtgcatccccgattcaacaagttccctgaccccctgtgagcagcaacaacgacacgcacaggctcagtacgcttaccctggtgctcgtttccatattccacagtgtgatgaacagggaaatttcctgcccctgcagtgccacggttcaaccggattctgttggtgcgtcgatcctgacggccatgaggtgccaggaacacagacccctccagggagcaccccccctcactgcggccctagccccgagcctacacagcgcccacccacgatttgcgagcgctggcgcgagaacttgttagagcactacggtggtacaccaagggatgatcagtatgtcccccaatgcgacgatctcggtcactttatacctctacagtgtcacggtaaaagtgatttctgttggtgtgtggacaaagacggacgcgaagtgcagggcacccgctcacaaccgggaaccacccctgcatgcattccaacagtcgctcccccaatggtacggccaacaccacgccctgacgtcactccaccgtcggtcggaacatttctgctctacacccaaggccagcagatcggatatctgcccctaaacggcacccggcttcagaaagacgctgctaaaaccctgttgagcttgcatggctccataatcgtggggatcgattatgattgtcgggagaggatggtctactggacggatgtcgctggtcggactatttcaagagccggactcgaactaggtgcggagccagagacgatcgttaattccggattgatttctcccgagggtctcgccatcgaccacattaggcggacgatgtattggacggattcggtgcttgacaaaatagagtccgcactcctggatgggtccgagaggaaggttctattctacacagacctcgttaatccaagagccattgccgtggaccctatccgcggtaatttgtactggaccgactggaaccgggaggccccaaagattgaaacctcatctctggatggcgagaaccggagaatcttgattaatacagacattgggctgcccaacggattgaccttcgacccatttagcaaactgttgtgttgggccgatgcaggcaccaagaaattggagtgtacattaccagacgggacgggcaggcgcgtaattcagaataacctgaagtacccattcagtatagtgagctatgctgatcatttttatcatacggattggcggagagacggcgtcgttagtgtgaacaagcactcaggccagttcaccgatgagtacctccctgagcagaggtcgcacctctacgggatcactgccgtttacccctattgccctacagggagaaagtag

SEQ ID NO: 232700 - DNA, 3837 bp, synthetic construct
  misc_feature 1..3837: note = Description of Artificial Sequence: Synthetic coding sequence
  source 1..3837: mol_type = other DNA
atgaccgcccgtggcctagcgctgggtctattgcttctgctcctatgccctgctcaagtgttctctcagagctgcgtctggtacggtgagtgtgggatcgcctacggcgacaaaaggtacaactgcgagtattccggtcccccaaagcccttacctaaggatggttatgatctcgtgcaggaactttgcccagggtttttttttggaaacgtcagcctgtgttgtgatgtgagacagcttcaaactctgaaggacaatttacagctcccactccagttcctcagccgctgcccaagctgcttctacaatctcctgaacctgttttgcgagctgacgtgtagcccgcgacagagccaatttctgaatgttaccgctacagaggattacgtggatccagttacaaaccagacaaagacaaacgtgaaagaactgcagtattacgtgggtcagtccttcgcgaatgccatgtacaatgcatgcagggatgttgaggccccaagttctaacgacaaagctttaggattactgtgtgggaaggatgctgacgcatgcaacgctaccaactggatagagtatatgttcaataaggataatgggcaggcccctttcacaatcactccggtatttagcgatttccctgtacatgggatggaacccatgaacaatgccaccaaagggtgcgatgaatctgtcgacgaagtgaccgccccatgcagttgtcaagattgtagcattgtctgcggacccaaaccccagcctccccctccgcctgcaccttggaccattttaggtctggatgcgatgtatgtgatcatgtggattacctacatggccttcttgctcgtctttttcggcgcttttttcgctgtctggtgttatagaaaacggtacttcgtatctgagtatacacccatcgatagcaatattgctttctctgttaacgcaagcgataaaggcgaagctagctgttgcgacccagtgtccgcggcattcgagggctgcctgaggagattattcacaagatggggcagcttttgtgtgcgcaaccctggatgcgtgatctttttctcccttgttttcatcaccgcctgcagcagcgggctggtctttgtgcgcgtcacaactaaccccgttgatctttggtcagcgccatcatcgcaggcaagactggaaaaggagtactttgaccagcactttgggcctttcttcaggaccgagcagctgatcatccgggctccgcttactgacaaacatatttaccaaccttacccatctggtgcagatgtgccgtttgggccacctctggacatccagatcctccatcaggttcttgatctccagatcgccatcgagaatattacagcctcctacgataacgaaacagtgaccctgcaggatatttgccttgccccactgtctccctacaacacaaattgtactatcctgagcgtgttgaactatttccagaattcacactctgtgctggaccacaagaaaggtgacgatttttttgtgtacgctgattaccatacgcattttctgtattgcgtgcgggctcccgcttctctgaatgacacctcactgcttcacgatccttgcctgggaacgttcggagggccagtttttccttggctcgttcttgggggatatgatgaccagaattacaataacgctaccgctctggttatcaccttccccgtgaacaattactataacgacaccgaaaaactgcaacgtgcgcaggcgtgggagaaagaattcataaacttcgttaagaactacaaaaaccccaatctgacaatctcattcactgccgaaagaagcattgaagatgaattaaacagagagtctgactctgatgtgttcactgtggtcatttcatatgcaatcatgtttctgtatataagcttagcactgggacacatgaaatcctgtcgaaggttgcttgttgactctaaggtgtcactgggcatcgcaggaatcttgattgtgctctcttcagtggcttgttctttaggcgtgttctcatatatcgggcttccactgacattaatcgtgatcgaagtgatcccgttcctcgtgctggccgtgggcgtcgacaatatattcattctcgtgcaggcctaccagagggatgagcgcctgcaaggagagacactagaccagcaattgggtagggtcctgggcgaagtagcaccttccatgttcctgagttcattttctgagacagtagcctttttcctgggggctcttagtgtgatgcccgctgtgcatacatttagtctctttgctggactggccgtctttatagactttctgctgcaaataacctgttttgtgtccctgctgggcctcgatataaagcggcaggaaaagaataggttagatatcttttgctgcgtgcgcggtgccgaggacggtacctccgtccaggccagtgagtcatgcctgttccggttctttaagaattcgtattctcctctgcttttgaaggactggatgcgccctattgtgattgcgatcttcgtcggcgtgctaagcttttccattgccgtgttgaataaagtggatattgggctggatcaatctctgagcatgccggatgacagctacatggtggattattttaaatccatcagccaatatcttcatgccggtccaccagtgtacttcgtcctggaagaaggccacgactacacctcatctaagggccagaacatggtttgtggagggatgggctgtaataatgactctttagtccagcaaattttcaacgcagcccagcttgataactacaccagaattgggtttgctccttcatcttggatcgacgactacttcgactgggtgaaacctcagtcttcttgctgccgcgtggataacatcacagaccaattctgtaatgcctcggttgtggacccagcgtgtgtgcgttgtcgccctctgacacccgaggggaagcaaagacctcaaggcggagatttcatgcggttcctaccaatgttccttagcgacaaccctaacccaaagtgcggtaagggagggcacgcggcatacagtagcgccgttaacatcctcctgggtcacgggactagggttggcgctacatatttcatgacctaccacaccgtgcttcagacaagcgccgacttcatcgatgctttgaaaaaagctaggctcatagcctcaaatgttacagaaaccatgggcatcaacgggtctgcataccgcgtctttccctactctgttttttacgtattctatgagcaatacctgactattatagacgatactatattcaatcttggcgtgtctcttggggctatctttctcgtcaccatggtgctgctcggttgtgaactgtggagcgcagtcatcatgtgcgcgacgattgcaatggttttggtgaatatgttcggagtgatgtggttgtggggcatcagtcttaacgcagtgtcgttagttaatctggtgatgtcttgcggaatctccgtcgagttctgttcacatataacaagagccttcacggttagtatgaaggggtcccgcgtcgagagggctgaggaagccctggcacatatgggcagctccgttttcagtggtattactttgactaagttcggaggcattgtcgtattagcttttgccaaaagtcaaatttttcagatcttctacttcaggatgtatctcgcgatggtcttgctgggggcaacccatggcctgattttcctgccagtccttttgagttatatcggtccttccgttaataaggccaaatcctgcgcgacggaagagagatataagggaaccgagagagaacgcttgttgaatttctag

SEQ ID NO: 232701 - DNA, 2883 bp, synthetic construct
  misc_feature 1..2883: note = Description of Artificial Sequence: Synthetic coding sequence
  source 1..2883: mol_type = other DNA
atgtacgtgattatgtggattacatacatggccttcctgttggttttttttggggctttctttgcagtttggtgttatcggaaacggtatttcgtgagcgagtacacaccaattgattcaaatattgccttttctgtgaatgcttccgataaaggtacagcctggctcttaaccagcacattcccctctagtccagtcctcccgggagaggcttcttgctgcgatcccgtgtccgccgcttttgagggttgcctgagaagattgtttactagatgggggtccttctgtgtgcggaacccagggtgtgtcatcttctttagtttggtgttcatcacagcctgttcgtccgggctcgtcttcgtgcgcgtgaccaccaatccagtagacctgtggtcagcccctagctcccaagcacggctagagaaggagtatttcgaccagcactttggtccattctttagaacagaacaacttatcataagagcccctctgaccgataagcacatttaccaaccttatccatccggcgcagatgtgccgtttggccctcctcttgacatccagatcctacaccaagtgctcgacctccaaatagccatcgaaaacataaccgcatcatatgacaatgagaccgttaccttgcaggacatttgtctggcgccactttccccttacaacacgaactgcacaatcctttctgttttgaattacttccaaaactcgcatagcgttctcgaccacaaaaagggagacgacttcttcgtgtatgctgattaccatacccatttcctatactgtgtgagattcatcaattttgtcaaaaattacaaaaacccaaatctgacaatctcctttaccgcagagcgttctattgaagatgaactgaatagagagtcagacagcgatgtgtttactgtcgtgattagttatgcgattatgttcctgtatatcagtctggcgctcggacatatgaagtcttgccgacgactgctggtcgacagcaaagtttccttaggtattgcgggaatcttaatcgttctaagctcagtcgcatgtagtttgggagtcttttcctacattggcctacccctgacactgatcgtgattgaggtgattccctttctcgtgctggccgttggtgtggacaacatcttcatccttgttcaggcctatcagagagatgagagactgcagggcgagactctggaccagcagctcggtcgggtgctcggggaggtagccccttccatgttccttagctcattcagtgaaaccgtggcctttttcctcggggcactctcagttatgcctgcggtgcataccttcagcttatttgcaggactagctgtttttattgactttctgcttcagattacgtgttttgtctctctactgggtcttgatatcaagcggcaggaaaagaatcggctggatattttctgttgtgtgaggggagccgaggatggcacatccgtccaggcttcagagtcgtgcctgttccggttcttcaaaaatagctattctcctctattactaaaagattggatgcgccctatagtcatcgccatcttcgtgggcgtcctgtctttcagtatagcagtattgaacaaggttgacattgggctggatcagagcctgtcaatgccggacgattcctacatggtagactactttaaatccataagccagtatcttcacgctggaccaccggtgtactttgtcctggaagagggccacgactatacaagctcaaaaggccaaaacatggtgtgcgggggaatgggctgcaataacgactccctggttcagcagattttcaacgccgcacagttagacaattacactaggatcggattcgcccctagctcttggatagatgactactttgactgggttaagccccagtctagctgctgtcgggtagacaatatcacagatcaattttgcaatgccagcgtggtcgacccagcttgcgtgaggtgcaggcccctgaccccggagggaaaacaacgaccccaggggggagacttcatgcgctttctgcctatgttcttaagtgacaacccaaatcccaagtgcggcaaggggggtcatgccgcatactcctctgccgtaaacatcctcctggggcatggcacacgggtcggagcaacatactttatgacatatcacaccgtgttacagactagcgcagatttcatcgacgctttgaaaaaggccagacttattgccagtaatgtcaccgaaaccatggggattaacgggagcgcttaccgggttttcccatactctgtgttctacgtgttttatgaacaatatctgactattattgatgacaccattttcaacttgggagtctccctcggagcaattttcctcgtcacaatggtgcttctgggctgcgaactctggagtgccgtgattatgtgcgccactatagccatggtgcttgtcaatatgttcggtgttatgtggctgtggggaatttctcttaatgcagtatcattagtgaacctggttatgtcttgcggtataagtgtggaattttgctctcacataacgagagcatttactgtgagcatgaagggctctcgggtagagcgcgctgaagaagccttagcccatatgggatccagcgtgttcagtggaattactctgactaaatttggtgggattgtggtcctcgcattcgctaagtcccagatcttccagatcttctacttccgaatgtatctggcaatggtcctcctcggggcaacacatggtctgatcttcttacctgttctcctaagctatattgggccaagcgtcaataaggcaaaatcatgcgccaccgaggaacgctataagggcacagagcgcgaacgtctgttaaacttttag

SEQ ID NO: 232702 - DNA, 2331 bp, synthetic construct
  misc_feature 1..2331: note = Description of Artificial Sequence: Synthetic coding sequence
  source 1..2331: mol_type = other DNA
atgtacaacgcgtgtcgagacgtagaagcacccagctccaatgataaggctcttggcctgctttgtggaaaggatgctgatgcatgcaacgccactaattggatcgaatacatgttcaacaaagataacggccaggcccctttcactatcactcccgtcttttccgactttccggtgcacggtatggaacccatgaacaacgctaccaagggatgcgacgagtccgttgatgaagttaccgcgccttgtagttgccaggactgctcaatcgtctgcggacccaaaccccaaccgcctcccccacctgccccatggaccattctgggacttgatgccatgtatgtcattatgtggatcacctatatggcgttcctgctagtcttcttcggagcctttttcgccgtatggtgttaccgtaagcgctactttgtcagtgaatatacccctatagacagcaacatcgcttttagcgttaatgcttctgataaaggcgaagcatcctgctgtgatccagtatctgctgcctttgagggctgcttacgacgactttttaccaggtgggggtctttctgtgtgcgcaatcccggttgcgttatcttcttctcgctggtgtttatcaccgcatgcagtagtgggctggtcttcgtgagagtgacaactaacccggtggatctgtggtcagcaccctcgtctcaggctcgattggaaaaagagtattttgatcaacattttggaccctttttcagaacagaacagctgatcattagagctcccctcacagacaagcatatctaccaaccatatccttcaggagccgatgtgccattcgggccaccactggatatccagatcctgcaccaggttctggatttgcagatcgcgattgagaatatcactgcctcctacgataacgaaacagtcactctgcaagacatttgcttagcacctttgtccccttacaatactaactgtaccattctgagcgtgttgaactactttcagaacagtcacagcgtgctcgaccataaaaagggcgatgacttctttgtgtacgctgactaccacacccatttcctgtattgcgtcagagcacctgccagcctcaatgacacctcactcctccatgacccctgcctgggtacctttgggggtcctgtattcccatggctcgtactgggcggttacgatgatcagaactacaataacgctaccgccctggtgataaccttcccggtaaacaattactacaacgacaccgaaaagttgcagagggctcaagcttgggagaaagaattcattaacttcgtcaaaaattataaaaatcccaatcttacaatatcattcacagccgaacgatcaatagaggacgagctcaatagagaatccgactcggacgtgttcactgtcgtcatctcttatgccatcatgtttttgtatattagcttggccctggggcacatgaagagttgtagacggcttctggtggattccaaagtctccctaggtatagccggaattctgattgtgctctcaagtgtagcctgtagtctgggagtgtttagctatatcggactgcccctgaccctcatcgttattgaggtgattccttttctcgtgcttgccgtgggcgttgataacatctttattctggtgcaggcataccagcgtgacgagcgcttgcagggcgagacgctcgaccaacagctgggtcgggtcctgggagaggtcgcaccctccatgttcttgtcgtcctttagtgaaacggtagctttctttttgggtgcattgagtgtaatgcccgcagtgcatacattttccctctttgctggactggctgtctttattgattttcttctccagatcacttgcttcgtctcattgctggggctggatataaagagacaggaaaagaaccggctggatatcttctgctgcgttcgtggagctgaagatgggacgtcggtgcaggcttccgaatcctgcttgtttcggttttttaaaaacagctatagcccactcctgctcaaagattggatgcgcccaattgtgattgctatttttgttggcgttctcagcttctcgatcgcggtactgaacaaggtggacattggactggaccaatcactaagtatgccagatgactcttatatggtcgattactttaaatccatctctcagtaccttcacgccggtccacctgtctacttcgtgctggaagaaggacacgactacacaagctccaaaggccagaacatggtctgcggcggtatgggatgtaataatgactctctggtccaacagatattcaacgctgcacagctcgacaactag

SEQ ID NO: 232703 - DNA, 369 bp, synthetic construct
  misc_feature 1..369: note = Description of Artificial Sequence: Synthetic coding sequence
  source 1..369: mol_type = other DNA
atgcggtttcttgccgcaacctttctgctattggctctcagtaccgcagcccaagctgagccggtgcagttcaaagactgcggaagtgttgatggcgttatcaaagaggtcaatgtgagcccatgtccaactcagccttgccaattgagcaaaggacaaagttactctgtaaatgtgacttttacctccaacatacagtcgaagtcctcaaaggcagtagtccatgggatcctcatgggagtgccagtgccattcccaatacccgagcccgatggctgtaaaagtggaatcaattgtcctatccagaaagacaaaacttattcatacctgaacaaattgccagtcaagtccgagtatcccagcgtgtag

SEQ ID NO: 232704 - DNA, 456 bp, synthetic construct
  misc_feature 1..456: note = Description of Artificial Sequence: Synthetic coding sequence
  source 1..456: mol_type = other DNA
atgaggttcttagccgcaacatttctgttgctagctttaagcacagccgctcaggcagagcccgtgcagttcaaagactgtggaagtgtcgatggggtgatcaaggaagttaacgttagcccctgcccgacgcaaccctgtcaactctccaaaggacaaagctattcagtgaatgttacatttacctccaacattcagtccaaatcctcgaaagcagtagtacacggcattctcatgggggtgccagtcccctttccaatccctgaacctgatgggtgcaagtccggcatcaactgtcccatccaaaaggacaaaacatattcctacctcaataagcttcctgttaaaagcgagtacccgtccatcaagctcgtggttgaatggcagctccaggacgacaagaaccaatccctgttctgttgggagatccccgtgcaaatcgtttcacatctttag

SEQ ID NO: 232705 - DNA, 1053 bp, synthetic construct
  misc_feature 1..1053: note = Description of Artificial Sequence: Synthetic coding sequence
  source 1..1053: mol_type = other DNA
atggacctgaaagcactgctttcatctctgaacgattttgcctcattgtccttcgcggagtcgtgggataacgttggtctgctggttgaaccctccccgccacacaccgtgaatactctgtttttaactaacgatctgacggaggaggtcatggaagaggtgttgcaaaaaaaggcggacctgattctgtcgtaccatccgccaattttccgacccatgaaacgtatcacatggaacacctggaaggaaaggctggtgatcagggccctcgagaatagagttggcatttactctcctcacaccgcttacgatgccgcaccccagggcgtgaataactggttagccaagggcctgggcgcatgcacgtctcggccaattcacccaagcaaggctcctaattatcctaccgagggtaatcaccgggtggaattcaatgtgaattacactcaggatttggacaaagttatgtcagctgtcaagggcatcgacggagtgtctgttacatcgttttctgctaggacaggtaacgaagagcaaacaagaatcaatctgaattgcacacagaaagctctgatgcaagtcgtcgatttcctgtcaagaaataagcagctgtaccagaaaactgaaattttgtcacttgagaaacctctgctcctgcacacggggatgggaagattgtgcacgctcgatgaatcggtgtccctagcgacaatgatagataggataaaacggcacctcaagttgtcccacatccgtctggcccttggcgtcgggaggaccctagagtcccaggtgaaggtcgtcgccctgtgcgccggaagtggttcaagcgttctacagggagtggaggccgatctgtaccttacgggcgagatgagccaccacgatacgctggacgctgcatcccaggggatcaacgtgattctgtgtgaacattccaatacagaacgaggatttctctcagatttacgtgacatgctcgattcccatctggaaaataaaattaacattatattgtcggagacggacagagatcctttgcaggtcgtctag

SEQ ID NO: 232706 - DNA, 759 bp, synthetic construct
  misc_feature 1..759: note = Description of Artificial Sequence: Synthetic coding sequence
  source 1..759: mol_type = other DNA
atgctgagtagctgcgtccgccctgtcccaactaccgtgcgttttgtggactctctgatatgcaatagctctaggagttttatggatctgaaagccttactgtcttcactgaacgactttgctagtctgagttttgccgagagctgggataacgtggggttgctggtggagccgtctcccccacatacagttaatactctgttcctaaccaacgatttaaccgaggaggtaatggaagaggtgctccagaaaaaggctgacctgattctgtcatatcatccaccaatctttcggcctatgaaacgtatcacctggaatacatggaaagagagattggtcatccgtgctctggaaaaccgtgtcggcatctacagcccccacactgcctacgacgccgcaccccaaggtgtgaacaactggctggctaaaggactgggtgcatgcacgagccggcctatccatccctccaaggctccaaactacccaaccgagggaaaccacagagtggagttcaacgtcaattacacccaggacctggataaggtgatgagcgctgtgaagggtatagatggcgtgagcgtgacatccttcagcgctcggaccggaaatgaggaacaaactcgaataaacttaaactgcacacaaaaggccctgatgcaggtggtggacttcttgagccgcaacaagcagctctatcagaagcatcaggataataccttctataagtccgccggatgccagctcaagtttgtaacgtag

SEQ ID NO: 232707 - DNA, 1134 bp, synthetic construct
  misc_feature 1..1134: note = Description of Artificial Sequence: Synthetic coding sequence
  source 1..1134: mol_type = other DNA
atgctctcgtcatgtgttaggcctgtgcccacaaccgtgcggttcgttgacagcctgatctgcaattcatcccgctctttcatggatttgaaagcgctgctatcttccctgaacgatttcgcatctttatcatttgcagaatcttgggataacgtgggattactggtggagcctagccctcctcacacagttaacaccctcttcctgaccaacgacctgactgaggaggtcatggaagaggttttgcagaaaaaggccgatcttatcctatcttaccatcctcctatctttagacctatgaagagaatcacctggaacacttggaaggagcgacttgtcatccgggctcttgagaatagggtgggcatttactccccacatacagcctacgatgcggcacctcagggggtgaataattggctggccaaagggctgggggcttgtacatcgcggcctattcatccgagcaaggccccaaattatccaaccgagggcaaccaccgtgtggaatttaacgtaaattatacacaggacttggacaaagtgatgtcggccgtgaaggggatcgacggggtaagtgtcacctctttttcggcccgaacggggaatgaggagcaaacaaggatcaacctaaattgtacgcagaaggcactgatgcaggtggtcgactttctgagtcgaaataaacagctctaccagaaaaccgaaattctctccctagaaaaacctctcctactccacactgggatggggcgattatgcactctcgacgagagcgtgtccctggcaaccatgattgatcgcatcaagaggcacctaaaacttagtcatattagactagcactcggcgtgggacgtacgctcgagtcccaagtaaaggtcgttgccctgtgtgccggaagtgggtcttctgtgctccagggcgtcgaagccgacctgtacctgacaggcgagatgtcgcatcatgacacccttgatgcagcatcccaaggcattaatgttatcctctgcgagcattcgaacaccgagcgagggttcttaagcgatctgagggacatgctggactcacatctggagaacaaaatcaacatcatcctctctgagacggaccgggaccctcttcaggtagtgtag

SEQ ID NO: 232708 - DNA, 489 bp, synthetic construct
  misc_feature 1..489: note = Description of Artificial Sequence: Synthetic coding sequence
  source 1..489: mol_type = other DNA
atggatctcaaggcactgctaagttctctgaatgattttgcatccctgagtttcgctgagtcgtgggataacgtaggacttctggtggaaccatctcctcctcacacagtgaatacgctttttctcaccaatgacctcaccgaggaggtgatggaggaggtactccagaagaaggctgatttgatcctgtcctatcaccctcccatctttcggcctatgaagcgcattacttggaatacatggaaagagcgattggtcatccgagctctggaaaatcgcgtgggtatttattcaccccacactgcatacgatgctgccccacaaggggtgaacaactggctcgccaaaggccttggtgcctgcaccagtcgccctattcacccctctaaagctcctaactaccccactgagggcaaccaccgagtcgagttcaacgtgaactacacccaggacctggacaaggttatgtccgctgtgaaaggaatctag

SEQ ID NO: 232709 - DNA, 1134 bp, synthetic construct
  misc_feature 1..1134: note = Description of Artificial Sequence: Synthetic coding sequence
  source 1..1134: mol_type = other DNA
atgctgtctagttgcgtgcgtcccgtccctaccactgtcaggttcgtggatagtctcatatgtaatagctcgaggtcatttatggatctcaaggccctgctttctagtctgaacgatttcgcctcgcttagcttcgccgagtcctgggacaacgtaggcctgcttgtggaacccagcccgccacatactgtgaacaccctgttcttaacaaatgatttgaccgaagaagttatggaagaagtactgcagaagaaggctgaccttatcctgtcgtaccacccgccaatctttaggccaatgaagcgcattacttggaacacctggaaggagaggcttgtgattcgggctctggagaaccgtgtgggtatttacagcccccacaccgcttatgacgccgcaccccaaggagtgaacaactggctggcaaagggactaggagcctgtacctcccgtcctattcacccatcaaaagctccaaattaccctaccgaaggtaatcaccgagttgaatttaatgtgaattacacacaggatttggacaaggttatgtccgccgtcaagggaatagacggcgtgagcgtaacttccttttcggccaggaccggtaacgaggaacagaccagaattaacctaaattgtacccagaaagctttaatgcaggtggtagacttcctctccagaaataagcagctgtaccagaaaactgagattctctccctggagaaacctttactcctgcacacaggcatgggcaggctttgtaccctggacgagtccgtttccttagccaccatgattgataggatcaagcgccatctgaagctgagtcatataaggctcgctttgggagtgggtcgaactttagaaagtcaggtcaaggtggtggcgctgtgtgctggctccggctcctcggttttacaaggtgtcgaagcagacctgtatctcaccggagaaatgtcacatcacgatacactggatgcagccagtcagggcattaatgtaattctgtgcgagcacagcaatacagaacggggttttctgagcgatctgagagacatgcttgactcacacctggagaacaaaatcaatataatactatctgaaactgacagagacccactccaagtcgtgtag

SEQ ID NO: 232710 - DNA, 858 bp, synthetic construct
  misc_feature 1..858: note = Description of Artificial Sequence: Synthetic coding sequence
  source 1..858: mol_type = other DNA
atgctgtcctcttgtgtccgaccggtgccgacaacagtgagatttgtggattccctgatctgtaattcgtcaagatcatttatggatctcaaggccctgctgagctctttgaacgactttgctagcctatcctttgctgagtcctgggacaatgttggactgctggtcgagccatctccaccacacacagtgaacacactcttcctcaccaacgatctcaccgaggaagtgatggaggaggtcctgcagaaaaaggcagacttaatcttatcctaccacccacccattttccggcctatgaaaagaattacatggaatacctggaaggaaaggctggtgatccgcgcactagagaatcgcgtgggtatatacagtcctcacacggcctatgatgcggcacctcagggggtaaataactggttggcaaagggtctgggagcatgcacctcaagaccaattcacccgtcaaaggcacccaactaccctaccgagggaaatcatcgggttgagttcaacgtgaattacacacaggacctggataaggttatgtccgccgtaaagggaattgatggggtgagcgtgaccagcttttcagcacggaccggcaacgaggagcagacccggatcaacctgaactgtactcagaaggctctgatgcaagtcgtggactttctaagtcgcaacaaacagctctaccagaagaccgagatactgtcccttgagaagtcactcaagtcaaagagctggccatgtgttttggtcttaggggcagctttctgcagggtgctgcgtcttacattcacatcccaggtgcggtgtcctatcatgattttgtggatgctcctgccgaaagagtag

SEQ ID NO: 232711 - DNA, 1134 bp, synthetic construct
  misc_feature 1..1134: note = Description of Artificial Sequence: Synthetic coding sequence
  source 1..1134: mol_type = other DNA
atgctctcatcatgcgtgaggcctgttcctacaacagttagattcgtcgatagcctcatatgtaattcgtcccgcagcttcatggacctgaaagctctgctgagttccctaaacgattttgcctcactctcattcgctgagtcctgggacaacgtgggcctcctggtcgaaccctccccaccccatacagtgaataccctcttcctgacaaatgatctgaccgaagaggtgatggaagaggtcctgcagaagaaggccgaccttatcctgtcgtatcatcctccaatctttagaccgatgaagaggataacttggaatacctggaaggagagactcgtgattagggccttagaaaatagggttggcatctacagtcctcacaccgcatatgatgcagctccacagggggtaaacaactggctcgccaagggcctgggagcctgtacaagcagacccatccatccatctaaagcaccaaattaccctactgagggcaaccaccgggtggaattcaatgtgaattacacacaggatctggataaggtgatgagcgctgtgaaggggatcgatggcgtgagcgtaacctcattttcggccaggactggtaatgaggagcaaactaggattaatctcaattgtacacaaaaggcccttatgcaagtagtagatttcctaagccgaaacaagcagctatatcagaaaactgagatcctttccttagagaaaccactgttgctgcataccggcatgggcaggttgtgtacgctggatgagtcagtgtctctagctaccatgattgatcgaataaaacgccacctgaaactcagccacatccggctcgctctgggagttggtcggaccctcgagtctcaagttaaggtggtggccctttgtgctgggtctgggtccagcgttctccaaggcgttgaagcagatctgtatctcacaggcgagatgtctcaccacgacactctcgatgccgcatcccagggaatcaatgttatcctctgtgaacactctaacaccgagcggggttttttgagtgaccttcgagatatgctagattcccatctggaaaacaagattaatatcatcctttctgaaaccgaccgtgatcctctccaggtagtgtag

SEQ ID NO: 232712 - DNA, 630 bp, synthetic construct
  misc_feature 1..630: note = Description of Artificial Sequence: Synthetic coding sequence
  source 1..630: mol_type = other DNA
atggatctcaaggccctgctgtcctctctgaatgatttcgcctccttatccttcgccgagagctgggataatgtggggctgttagtggagccatcacctcctcacactgtaaacaccctttttctaactaatgatctgactgaagaagtgatggaggaggtgcttcagaagaaagcagatctgattctgtcataccaccctcccattttcagacctatgaaaaggatcacgtggaacacatggaaagaacggctggtgatccgtgccctcgaaaaccgcgtcggaatctactccccgcacaccgcttatgatgcggcaccgcaaggggtgaacaactggctcgccaagggcctgggtgcttgtacgtcaaggccaattcacccctctaaagcgccaaattatcctacggagggtaaccatcgagttgaatttaatgtcaactacacccaggacctggataaggtcatgagcgccgtgaagggtatcgacggagtgtctgtcacttcattctctgcaagaaccggtaatgaggagcagacccgcatcaatctgaattgtacccaaaaagcactaatgcaggtagtggatttcctatcgcggaataagcagttgtatcagaaaacagaatag

SEQ ID NO: 232713 - DNA, 492 bp, synthetic construct
  misc_feature 1..492: note = Description of Artificial Sequence: Synthetic coding sequence
  source 1..492: mol_type = other DNA
atgctgagcagttgcgttaggcccgttcctaccactgtccgctttgtggactccctgatttgcaacagtagcaggagcttcatggatttaaaagctttgctatcctcactgaacgattttgcatccctgtcgtttgcagaatcctgggataatgtagggctgctggtcgagccttctcccccacacaccgtgaatactctttttttgaccaacgatctaaccgaggaagtgatggaggaggtccttcagaagaaggcagatttgatcctatcataccacccgcctattttcaggcctatgaaacgtattacgtggaacacctggaaggagcgactcgttattagagcgctggaaaacagagtaggaatctactccccccacactgcgtacgacgcagcgccacaaggagtcaacaactggctggcaaaagggctgggtgcttgcaccagccgccctattcatccctctaaagccccaaactacccaacctag

SEQ ID NO: 232714 - DNA, 4749 bp, synthetic construct
  misc_feature 1..4749: note = Description of Artificial Sequence: Synthetic coding sequence
  source 1..4749: mol_type = other DNA
atggctggcccaggaggctggagagatcgcgaggtaacagacttaggccacctccctgacccaacagggatctttagcctggacaagacgattggcctgggaacttacggcagaatttacctgggattgcacgagaagactggcgcttttacggccgttaaagtcatgaacgccagaaagactcctctgcccgagatcggaagaagggtccgggtcaataaataccagaaaagcgtgggttggagatacagcgacgaagaggaagatctgcgcacagagcttaacctgctccgtaagtattctttccacaaaaacattgttagcttttacggcgcattttttaagctctctcccccaggccagaggcatcagttgtggatggtcatggagctgtgcgccgctggttcggtgacggacgttgtcagaatgacaagcaaccaatccctcaaggaagattggatcgcttatatttgtcgggagatattgcaaggacttgcgcacctgcacgctcacagagtgatccatcgcgacatcaaggggcagaatgttctgctcactcataacgccgaagtcaagttggttgacttcggtgtcagtgcccaggtgtctaggacgaatggacgtaggaactcgtttattggtacgccctattggatggccccagaggtaattgactgtgatgaagacccccgtcggtcgtatgattaccgcagcgacgtgtggtctgttgggatcacggcaatcgaaatggctgaaggcgctccacctctatgtaatctccagcctctggaagcactgttcgtaattttgcgcgagtcagcccctacagtcaagagcagcgggtggtcacgcaaattccataacttcatggaaaagtgtaccataaagaacttcctgttcagacctaccagtgccaatatgttacagcatccatttgtgcgtgacatcaaaaatgaacgccatgtagtggagtctttgactcggcatctaactggcatcattaagaaacggcaaaagaaaggcattccactgatattcgaacgtgaggaagccatcaaagaacagtatactgtacgcagattccgaggtccttcatgtacccacgagctgctgaggttacctacgagctcccggtgtcggccacttcgggtactgcatggcgagcctagccagccgagatggcttccagacagggaagagccacaggtgcaggctttacagcagcttcagggggcagcccgagtcttcatgccacttcaagcgctagattcggcgccaaaacccctgaagggacaggcccaggcccctcagcgtcttcagggagcagccagggtcttcatgcctcttcaggctcaggtaaaggccaaggcctccaagcctctccagatgcagattaaggccccacctcgcctaagacgggctgctagggttctcatgcctctgcaagcccaggtgcgggcacccagacttctccaggttcagagccaggtctccaagaaacagcaggcccaaacgcagacctcggagcctcaagacctcgaccaggtgccagaggagtttcagggtcaggatcaagtacccgaacagcagcggcaggggcaggcccctgagcagcagcagagacacaaccaggtgccagagcaagagcttgagcagaatcaggcacccgagcagccagaggtccaggagcaggccgctgaacctgcgcaagccgagaccgaggccgaggaacctgaaagtttgcgggtcaatgctcaggtcttcctgccactgctgtcacaggaccatcatgtactgttacctctgcatctggatacccaagttctgatccccgtggaaggacagacagagggctccccccaagctcaggcctggaccctggagccacctcaggcaatcgggtcggtgcaggccctaatcgaggggctttctcgcgaccttcttagagccccaaactctaataatagcaaaccactcgggcctctccagactttaatggagaatctgagctctaacagattctatagccagcctgagcaggccagggaaaaaaagtccaaagtgagcacactccgtcaagcgttagccaaaaggttgtctcctaaacggtttcgggctaaaagttcctggcggcctgagaaactcgagctttctgaccttgaagcgagacgtcagcgacgacagcgcaggtgggaggatatctttaaccaacacgaagaagagctcagacaggttgacaaggataaagaagacgagtcctcagacaatgatgaagtattccactccattcaagccgaggtccagattgagccactcaagccttacatttctaaccctaagaagatcgaagtgcaggagcggtcaccctctgtacccaacaaccaagaccacgcacaccacgttaagttttcaagcagcgtcccacagcgttccctgctcgaacaggcccagaagcccattgatattaggcaacggtctagccagaaccgccagaactggttggcagcttccgaatcctcaagcgaggaagagagtccagtcaccggccgtcggagtcaatcttccccaccctattctaccatcgaccagaagttgctagttgatattcacgtccctgacgggttcaaagtgggcaaaataagcccaccagtctatttgaccaacgagtgggtagggtacaatgctttaagcgagatcttccggaacgattggttgacaccagcccctgtgattcagcctcctgaggaggacggagattacgtggagttatacgatgcttctgcagacactgacggggacgatgacgatgagagcaatgacaccttcgaggacacgtatgatcacgctaatggcaatgacgatctggataatcaggttgaccaggctaacgatgtgtgtaaggaccacgacgacgacaataataagttcgtggatgacgtcaacaataactactacgaggctccaagttgtcccagagcttcgtatgggagagatgggtcatgtaaacaggatggatacgatgggtcccgcggtaaggaggaggcctatagaggctatggaagccacacagcaaatcgttcccatgggggttccgctgccagtgaggataatgctgctattggagatcaggaagaacacgcagctaatatcggatcagagagaagaggatctgagggcgacggaggaaagggtgtggttaggacaagcgaagaatcaggtgccctgggccttaacggcgaagaaaattgtagcgagaccgacggtcctggattgaagcgacctgcctctcaagatttcgagtatttacaggaggagcccggtggaggaaacgaggccagtaacgcgattgatagtggagccgctccatccgcacctgatcacgaatccgacaacaaggatatcagcgagagcagcacacagagcgacttttcagctaaccactctagcccctcaaaagggtcgggtatgtccgccgacgcgaacttcgctagtgcaatactgtatgcgggtttcgtggaggtgccagaagaatccccaaagcagccatcagaagttaacgtgaaccccttgtacgtctcccccgcttgcaagaagcccttgatacatatgtatgagaaagagttcactagtgaaatctgctgtgggagcctctggggagttaatttattgcttggtaccagatctaacctctacctgatggacagatctggcaaggctgatataaccaagttgatcaggagacgtccatttcgccagatacaggtgctcgagccattaaacttgctgattactatctctggccacaagaacagattaagggtctatcatctcacatggctaagaaacaaaatccttaacaacgaccccgagtcaaaaagaaggcaggaggaaatgctgaaaactgaagaagcgtgtaaagccatcgataagctgacaggatgcgaacacttttccgtccttcagcacgaagagaccacgtatatagcgattgcattgaagtcctccatacacctgtatgcctgggctcccaaatctttcgatgaatccactgctattaaagtgtgcatcgaccagtccgctgattccgagggcgactacatgtcataccaagcgtacatcaggatattggccaagatccaggccgcagatcccgtaaacaggtttaaacgccctgacgaattgctgcacctgctgaagcttaaagtgtttcccacacttgatcataagccagtgaccgttgacctcgcaattggctctgagaagcggctcaaaattttcttcagcagcgcggatggctatcatttgatcgatgccgagtcagaggtgatgtcagacgtaaccctgccgaaaaatccactagaaattattataccccagaacatcattattctgccagattgcctgggaatcggtatgatgttgacgttcaatgccgaagctcttagtgtagaagccaacgaacagctattcaaaaaaattctagagatgtggaaggatataccatctagcatcgcattcgagtgtacacaacggaccacagggtgggggcagaaggctattgaggttcggtccctgcagagtcgagtcctggagtcggagctaaagaggagatctatcaagaagctgcgcttcctctgcacacgaggggataagctattttttacctccaccttacgaaatcaccacagtagagtgtatttcatgacattgggtaagctcgaggagctgcagtctaattacgatgtctat

SEQ ID NO: 232715 - DNA, 4751 bp, synthetic construct
  misc_feature 1..4751: note = Description of Artificial Sequence: Synthetic coding sequence
  source 1..4751: mol_type = other DNA
atggcaggtcctggaggatggcgcgatagagaggtgacagacctggggcacctccccgatccaactggcatttttagtcttgacaaaactatcggattgggcacctatggtcgaatctacctcgggctgcatgagaaaacgggagcgtttaccgcggtgaaggtcatgaacgccagaaagacaccactcccggagatcggcagacgcgtccgcgtcaataagtatcagaaaagcgttggatggagatacagcgacgaggaggaagatctacgcaccgagctgaacctcctaagaaagtacagctttcacaagaacattgtaagtttctatggagctttcttcaagctgagccccccaggccagagacatcagctgtggatggtcatggagctgtgtgctgccggtagtgtcacagacgtggtgaggatgacatctaaccaaagcctcaaagaagactggattgcctatatttgtcgcgaaatactacaggggctagcccatttacacgctcatcgcgtaatccacagggatattaaaggccagaacgttcttcttacacacaatgcagaggtaaagcttgtggacttcggggtgtcagcccaagtaagtcgaaccaacgggcgtcgtaattccttcattggaacaccctactggatggccccagaggttattgactgcgacgaggatccacggagatcttatgactaccggagtgacgtctggagtgtggggatcacggccattgagatggctgagggagccccacctctctgcaatctacagccactggaggcactcttcgtcatccttagagagagtgccccaactgtgaaaagctctggatggtctcgaaaatttcacaattttatggagaaatgcacaatcaaaaacttcctatttaggcctacctctgctaatatgttacaacaccctttcgtccgcgacatcaagaacgagaggcacgtagttgagtctctaaccaggcatttgacggggattattaaaaagcgccagaagaagaaggggatcccccttattttcgaaagggaagaagccattaaagaacagtataccgttaggcggttcagggggccttcatgcacacatgaactgctcaggctgccgacatctagtcgctgccgcccactacgcgtgctccatggcgagccctctcagcctaggtggctgcctgacagggaggagccccaagtgcaggcccttcagcaactgcagggagccgcacgggtttttatgccactccaggccctggacagcgccccaaagccacttaaaggccaggcacaggcccctcagcgcctccagggtgcagcccgtgtgttcatgccactgcaagcgcaggtgaaggcaaaagcttcaaaacccctgcaaatgcagatcaaggcaccacctaggcttagacgcgctgctcgcgttttgatgccactgcaagctcaggtgagagctccccgactcctgcaggtgcaatctcaagtttctaagaaacagcaggctcagactcagacctctgagccccaagacctcgatcaggtccctgaagaatttcaaggtcaggaccaggttccggaacaacaacgtcaagggcaagccccagaacagcagcagcgacacaatcaggtgccagaacaggagctggagcagaaccaggcgcctgaacagccagaggtgcaggagcaggctgctgagcctgctcaggcggagaccgaagcggaggagccggagtccttacgagtgaacgcccaggtcttcctgccactgctgtcccaggatcatcacgttctgctgcctctccatcttgacacacaggtgctcattccagttgagggccagacagagggtagtccccaggcccaagcgtggactttggagcctccgcaagctatcgggagcgtgcaggctctcatcgagggcctttctcgggatctcctgcgagctccgaatagcaacaactccaagcccctcggtcctctgcagacattgatggagaacttgtcttcaaacaggttttacagccaacccgaacaggcacgggagaaaaagagcaaggtttcaactttaagacaggccctagcaaagcggttatccccaaagcgctttcgggcaaagagttcctggagaccagaaaaactggaactgtcagacctggaggcacgccgtcaaaggcgtcagcggaggtgggaggatattttcaaccagcacgaggaagaactcaggcaagttgacaaagataaggaggacgaatcttcagacaacgacgaggtgttccactcgattcaagcggaagtacagattgagcctctgaagccttacatttcaaaccccaagaagatagaggtccaagaacggagcccttctgtgccaaacaaccaggaccatgcccatcacgtgaaattttccagctctgttccccagcgcagcttgttggagcaggcacagaaaccaatagacatcaggcagcgcagcagtcagaatagacagaactggctggccgcatcggaatcctccagtgaggaggaatcaccagtgactggtagaaggtcccagtcaagccctccttattccacaattgaccagaagctccttgtcgatatccacgtccccgacgggttcaaggtgggaaaaatcagccctccggtgtatctcaccaacgagtgggtcggctacaacgccttatcagaaatttttagaaacgactggctgacacccgcacccgttattcagcccccagaagaagacggggactatgttgagttgtatgatgcctccgctgacactgacggggatgatgacgacgaatcgaacgacacttttgaggacacatatgatcacgcgaacgggaatgatgacctggacaatcaggtagaccaggcaaacgacgtatgcaaagaccacgacgacgacaacaacaaattcgtcgacgacgttaacaataattattatgaagctcccagttgccctagagcctcttacggtagggatgggtcttgtaagcaggacggatacgacgggtcccgcggtaaggaggaggcctatagggggtacgggtctcacaccgcgaaccgttcccacgggggaagtgccgcatctgaagataacgccgctataggcgaccaagaagagcacgccgcaaatattggatcagagcgccgagggagcgagggggatggcggaaaaggcgtggtgcgaacgagcgaagaatctggcgctctcggccttaacggtgaagaaaactgctctgagacagacggacccggtttaaaacgtcccgctagccaggattttgaatatctccaggaggagcccggagggggaaatgaggcttcaaacgcgatcgacagtggagcagctccctccgcacccgatcacgaatctgataataaggacataagcgaaagttcaactcagtcggatttctcagccaatcactccagtccaagtaagggaagcggcatgagcgccgacgctaatttcgcctctgctatcttgtatgcgggattcgtggaagttccagaggagtccccgaagcaaccttccgaagtcaatgtcaaccccctgtacgtaagtcccgcttgcaagaagcccttaatccacatgtatgaaaaggagttcacctctgagatttgttgtggaagtttgtggggcgttaatctgcttttaggaacacgatccaacctgtacctcatggaccggtcaggaaaagctgatatcaccaagctgattcgaaggagacccttcaggcagatacaagtgctagagccactgaaccttctcattaccatttcagggcacaagaatcgccttagagtgtaccatctgacttggctacgaaataaaatattaaataatgacccagaaagcaagaggcgccaggaagagatgctgaagaccgaggaggcatgcaaggccatagataagctaaccgggtgcgaacattttagcgtgctacagcacgaggaaacgacctatatcgctatcgccctgaaatcttctattcacctgtacgcatgggcacccaaatctttcgacgaatccacagctatcaaagtgtgtatcgaccagagtgctgactccgagggcgactatatgtcctaccaggcttatattcgtatattagccaagattcaagctgcggatcctgtaaacaggttcaaacggccagatgaactcttacatctcttgaagttgaaagtgttccccaccctggaccacaagcctgtcacggtcgatttggctatcggcagcgagaaaagactgaaaatattcttctcctctgccgatggctatcatctcatcgacgccgaatcggaggtgatgagtgacgtgacgctcccaaaaaacccgctggaaatcatcatcccccagaacattattattctcccagactgtctaggaattggaatgatgcttacttttaacgcggaagcattatcagtggaggccaatgagcaactcttcaaaaagatactggagatgtggaaggacatcccttcaagtattgccttcgagtgcacacagaggaccactggttggggacagaaggctatcgaggtgagaagtctgcagtctcgcgtattagagtcagaactcaagcggcgttctatcaagaagctccgtttcctctgcacccgaggcgataagctcttttttacatccacgctccgcaaccaccactcccgagtatacttcatgacgcttgggaagctagaggagcttcagagtaactacgacgtgta

SEQ ID NO: 232716 - DNA, 567 bp, synthetic construct
  misc_feature 1..567: note = Description of Artificial Sequence: Synthetic coding sequence
  source 1..567: mol_type = other DNA
atggctgggccaggagggtggcgggatagggaggtgaccgacctgggtcatctgcccgatcctactggtatatttagcctggataaaaccatcggcctcggaacatatggaagaatatacctggggctgcacgaaaagaccggggcttttaccgccgtgaaagtaatgaatgctcgcaagactcccctccctgaaattggtcgccgtgtgagggtcaataaataccagaagtctgtcggatggaggtattccgatgaggaggaagatcttcggacggagttaaatctgttgcgcaagtactctttccacaagaacatcgtgtctttctatggagcattttttaagctcagtcctccgggacaacgtcaccagttatggatggtgatggagctgtgcgctgccggatccgtcacagatgtcgtgcggatgacgtccaaccagtctctgaaggaggactggattgcatacatctgtcgcgagattctgcagcctaaggtaatatttctaggaacgggttgctctgacagctccctgaaaaaagagctttgcttgaagcaccagaactag

SEQ ID NO: 232717 - DNA, 492 bp, synthetic construct
  misc_feature 1..492: note = Description of Artificial Sequence: Synthetic coding sequence
  source 1..492: mol_type = other DNA
atgcaggtacctcgcgagcggataaaaattgccttccgcctgtggatccctatactcgtgattcggatagtcgtggccggaacatggccccaagccccaggactttcaaccttgggcctgaacattataattttgcctgactgcctcgggatcggaatgatgctgaccttcaacgccgaagctctctccgtggaagccaatgaacagttgttcaaaaagatccttgagatgtggaaagacatcccctcaagtatcgcctttgagtgcacccaacggacaacaggttggggtcagaaagccatcgaggtgcgaagccttcaatctcgcgtcctggagtctgaattaaaacggagatctattaaaaaactccgcttcctgtgtacccggggagacaaactgttcttcacaagtacgctccggaatcaccattctcgagtttatttcatgaccctggggaaactggaggagctccagtcaaattatgatgtgtag

SEQ ID NO: 232718 - DNA, 1449 bp, synthetic construct
  misc_feature 1..1449: note = Description of Artificial Sequence: Synthetic coding sequence
  source 1..1449: mol_type = other DNA
atgttgaaattccaggaggccgctaagtgtgtgtcagggtccacagccataagtacctaccctaaaaccctgattgccagacggtacgtcctgcaacagaagctggggagtggttcatttggaaccgtgtatctggtgagtgataagaaggctaaacggggagaagagctgaaggttctaaaggaaatctctgtcggggagctcaatcctaacgaaactgtgcaggccaaccttgaagctcagctactgagtaaactcgaccatcctgctatcgtgaagtttcatgccagctttgtcgagcaggacaacttttgtatcatcaccgagtattgtgaagggagagacctcgatgataaaatacaggagtacaagcaggcaggtaagatatttcctgagaatcaaatcatcgaatggtttatccaattgctcctgggcgtggattacatgcatgagaggagaatcctccaccgggacctgaaatccaagaatgtcttcctcaagaataacctactgaagattggggacttcggcgtcagcaggctgctgatgggatcctgcgaccttgccacgacactaaccggcacgccacactatatgtctccagaggctttgaagcatcagggatatgacaccaagtctgacatatggagcctggcctgcattctgtatgagatgtgctgtatgaaccatgcctttgctgggtcaaacttcctcagcattgtgctaaagatcgtggagggggacacgccttctctacctgaacgctacccaaaagagctaaacgctattatggaatcaatgcttaacaagaatcccagcctcaggccctccgctatcgaaatcttgaaaatcccttacctggatgaacaactccagaatcttatgtgccggtacagcgaaatgaccttagaggataagaatctggattgtcagaaggaagccgctcatatcataaatgcgatgcaaaaacggatacatttgcaaacccttagagcgctcagcgaagtgcagaaaatgactccacgagagagaatgcgcctgaggaagctccaggccgctgatgagaaagccagaaagctgaagaagatagtggaggaaaagtacgaagagaactccaagaggatgcaggagctgcgctctagaaactttcagcaactgtctgttgacgtcctgcacgaaaagacccacctgaagggcatggaagaaaaagaagaacagccagaggggagactttcctgctcaccacaggatgaagatgaagaacgatggcaggggagagaagaggaaagcgacgagcccacacttgagaacttgccagagtcccaacccatccccagcatggacctccacgagctggaaagtatcgtcgaggatgcgaccagtgacctggggtatcacggcgactgtaacctgatctctcttgatgagtactggaaaaatgaaaaatag

SEQ ID NO: 232719 - DNA, 1938 bp, synthetic construct
  misc_feature 1..1938: note = Description of Artificial Sequence: Synthetic coding sequence
  source 1..1938: mol_type = other DNA
atgcttaaattccaggaggccgcaaagtgtgtatccggatcaacagctatttcaacatatcctaagaccctgatcgcccgacgttatgtgttgcagcagaagctcgggtccgggtcattcggtacggtatacctcgtttctgataaaaaggccaaaaggggcgaggagctgaaagtcctcaaagaaattagcgtaggtgagttgaatcccaatgaaaccgtgcaggccaatctcgaggcccagctcctctctaaattggaccatcccgctattgtgaagttccacgccagttttgttgagcaggacaatttctgtataataaccgagtactgcgagggtcgagatctggatgacaaaattcaggagtacaaacaggcgggaaagatctttcctgagaatcagattatcgaatggtttatccagctcttacttggagtggactatatgcacgaaaggagaattctacaccgggacttaaagtccaagaatgtgtttttgaaaaataacctgttgaagattggagatttcggagtgagccggcttctgatgggctcgtgtgatctggctactactctgaccgggacgccacattacatgagtcccgaggccctgaaacatcaggggtacgataccaaaagcgatatatggtctctggcttgtatcctgtatgaaatgtgttgcatgaatcacgcatttgctgggtctaacttcctgtccatagtgctgaagatagtagaaggtgatacaccctccctgcctgaacgatatccaaaggagctcaatgcgattatggaatctatgttgaataaaaacccctcgctgcgaccgtctgcgatcgaaattttgaagatcccgtatctcgacgagcagttgcaaaacctgatgtgcaggtacagtgagatgaccctcgaggacaaaaatctagactgccagaaggaagccgcacatatcatcaacgcaatgcagaagagaatccacctgcagaccctccgcgcactgtccgaagtgcagaaaatgacaccacgggaacggatgaggctgcgcaagctgcaggcggcagacgagaaagcacggaagctgaaaaagatagtggaggagaaatatgaggagaactcgaagcgtatgcaggaactgagaagcaggaattttcaacaactgagcgttgatgtattacacgagaaaacccacctgaagggaatggaggagaaagaagaacagccagaaggtaggctctcttgtagcccccaggacgaagatgaggagagatggcagggcagggaggaagagtcagacgaacccaccctggagaacctgcccgagtcacaaccaataccctcgatggacttgcacgagctagagagcatcgttgaggatgccacttcagatcttggctatcacgagatccccgaggaccccctggtcgcggaagaatactacgccgatgccttcgacagctactgtgaggagtcagacgaggaagaggaggaaatcgccctcgagcggcctgaaaaggaaatacgaaacgagggatcacagcccgcttatagaaccaatcagcaggactccgacattgaagcactcgccagatgtttggaaaatgttctgggatgtacttcacttgacaccaagacaattacaactatggccgaggatatgagtccaggaccccctatcttcaactcagtcatggcccgtaccaagatgaaacggatgagagaatccgcgatgcagaaactgggcaccgaagttttcgaagaagtttataattacttgaaacgggcaagacatcagaacgcaagcgaggcagaaatccgcgagtgtctagaaaaggtagttcctcaagcatcagattgtttcgaagttgaccagctgctctacttcgaggaacagcttctaatcactatgggtaaggagccgactcttcaaaaccacttatag

SEQ ID NO: 232720 - DNA, 1386 bp, synthetic construct
  misc_feature 1..1386: note = Description of Artificial Sequence: Synthetic coding sequence
  source 1..1386: mol_type = other DNA
atgcatgagcgccgaatcttgcatagagacttaaagtctaagaatgtatttctgaaaaataaccttctcaagattggggactttggagtgagccgcctgctgatgggctcatgcgatctggccacaacattgaccgggactccacactacatgagccccgaggctctgaaacatcagggctatgatacgaaatctgatatctggtcgctggcctgcatcctgtacgaaatgtgttgtatgaatcatgctttcgccggatccaatttcctgtccatcgtgctgaagatcgtggaaggcgatactcccagtttgccggaaaggtatcctaaggagctgaatgccatcatggaatctatgctgaataaaaaccccagcctaagaccctccgcgatcgagatactcaaaatcccgtacctagatgagcaactgcagaacctcatgtgtcgatacagcgaaatgacacttgaagataagaacttggattgccagaaggaagcagctcacatcatcaacgccatgcagaaaaggatccatttgcagactttgagagcgctgagcgaggtgcaaaaaatgactccacgggaacgcatgaggcttaggaaactccaggccgctgatgagaaagccagaaaacttaaaaagatcgtcgaggagaagtatgaagagaactctaagaggatgcaggagctgagatcccgaaacttccagcagctgtccgtggatgtcctccacgagagtgacgagccgactctggaaaaccttcccgaaagtcaacctatacccagcatggatctgcatgaactggagagcattgtggaagacgccacctctgacctaggctatcacgaaattcctgaggacccgctcgttgcagaggagtactacgcggatgcgtttgattcatattgcgaggagagcgacgaagaggaggaggagattgccctggaaaggcccgaaaaagagatccgcaatgaaggtagccaacccgcttatcgcactaaccaacaggattctgacatcgaggcactggccagatgccttgagaatgtactgggatgtaccagtcttgatacgaagaccattacgactatggccgaggacatgagccccggtccgccaatcttcaacagcgtaatggcacgcaccaagatgaagaggatgagagagtccgcaatgcagaaattggggacagaagtgtttgaagaggtctataattatctgaagagggctagacaccaaaatgccagtgaggcagaaatccgggagtgtctcgagaaagtcgttccacaggccagtgactgtttcgaagtagaccagctgctgtattttgaggagcaacttctgattactatgggaaaggaacctaccctccagaaccatctgtag

SEQ ID NO: 232721 - DNA, 1938 bp, synthetic construct
  misc_feature 1..1938: note = Description of Artificial Sequence: Synthetic coding sequence
  source 1..1938: mol_type = other DNA
atgttaaaatttcaggaagctgctaaatgcgtgagcggatctactgccatctctacatatcctaaaactctcatagcccgtagatacgttttgcagcagaaattggggtccggatcttttggaactgtctacttggttagcgataagaaggctaagcggggagaggagcttaaagtgctgaaggagatcagcgtaggcgagttaaacccgaacgagaccgtgcaggccaacctggaagctcagctgctatcaaaactggatcacccggctattgttaagttccacgcctcctttgttgagcaggataacttttgtatcataaccgagtattgcgaaggacgggatctagacgataaaatccaggagtataagcaggcgggtaaaatctttcctgagaaccagatcatcgagtggtttatacagctattgctgggagttgattatatgcatgaaagaagaattctgcacagggacctgaaatccaagaacgtctttctgaaaaataacctgcttaaaatcggtgacttcggagtcagtaggttgctgatgggtagctgcgacctggccaccacactgaccggtaccccccattatatgtctcccgaagccctcaagcatcaggggtatgacactaaatccgatatctggtctctggcatgcatactatacgaaatgtgctgtatgaaccacgccttcgccggatcaaatttcctatctattgtgctgaagatcgttgaaggagacacccctagtctgccagagaggtaccccaaggagctgaatgccatcatggagagcatgctgaacaaaaacccttccctgcgtccctcagctattgagatcctgaagatcccctacctggacgagcagctccagaacctgatgtgtcggtattctgagatgactcttgaggataagaatttggactgccaaaaagaagctgctcacattatcaacgcgatgcagaagaggattcatcttcagacattgcgtgctctctcagaggttcagaaaatgacacctcgcgagcggatgcggctgcggaaactccaagccgctgacgaaaaagccaggaagctaaagaagattgtcgaagagaaatacgaggaaaactctaaacgcatgcaggagctccgatcccgtaatttccagcagctgtctgtggatgtgcttcatgagaagacacacctgaagggaatggaagagaaggaggaacagcccgagggacggttgtcatgcagcccccaggatgaggatgaggagcggtggcagggcagggaggaggagagcgacgaacctacacttgagaatctgcccgagtcccagcctataccatctatggacctacacgaactcgagtctatcgttgaagacgccacttctgacctgggataccatgagatccctgaggaccctctggtggccgaggaatattatgctgatgccttcgattcttactgcgaagagtccgatgaggaggaagaggagatcgcactcgagcgccctgaaaaggagatcaggaatgaaggctcacagcctgcttatcggacaaatcagcaggattcagacatagaggccctggctaggtgtctggaaaatgtgctgggttgcacatcactggacactaagacgatcactacaatggctgaggatatgtcccccggacctcctattttcaactccgtgatggctcgcactaagatgaagcggatgagagagtcggcaatgcagaagctgggcacagaggtgttcgaggaggtttataattacctcaaaagggcaaggcaccagaacgcaagtgaagcagagatccgagagtgtctggaaaaagtggtgccacaagcgtctgactgcttcgaggtcgaccagctgctctatttcgaggagcagctgctaatcaccatgggcaaggagcctaccctgcagaaccatctttag

SEQ ID NO: 232722 - DNA, 1449 bp, synthetic construct
  misc_feature 1..1449: note = Description of Artificial Sequence: Synthetic coding sequence
  source 1..1449: mol_type = other DNA
atgttgaagttccaggaagccgctaagtgtgtgtcagggagtacagccatatccacctacccgaaaacactcatcgcgagacgttatgtgctccagcaaaaactgggttccgggtcattcggaacagtgtaccttgtgtctgacaagaaagcaaaacgtggtgaggaacttaaagtgctcaaagaaatatcagtaggcgagctcaatcccaacgaaactgtgcaagccaatttggaagcccagctcctgagcaagctggatcaccctgcgatagtgaaattccatgcgagctttgttgaacaggacaacttctgtatcatcacagaatactgcgaagggagggacctggatgataaaatccaggaatacaaacaagccggaaagatattccccgaaaaccagatcatcgagtggtttatccagcttctcttaggggttgattacatgcatgagagaagaatacttcacagggacctgaagtcaaagaacgtcttcctgaaaaataaccttctgaaaataggcgacttcggggtgagccgtctgctgatgggtagctgcgacctggcaacgaccttaactggaactccccactacatgtctccggaagctcttaaacatcagggatacgacaccaagtcagatatctggagtctggcgtgcatcctttatgagatgtgttgtatgaaccacgccttcgctggctctaacttcctcagcatcgtgctcaagatcgttgaaggcgatactccctcactgcccgagcgctatcccaaggagttgaacgccatcatggagagcatgttaaataaaaaccccagcctgcgaccctctgccatcgaaattctgaaaatcccatacctcgacgagcagctgcaaaacctaatgtgtagatactctgagatgaccctggaggacaaaaatctggactgccaaaaggaagccgcacacatcatcaacgccatgcagaaacgaattcatctccagacactcagggccttgtctgaagtgcaaaagatgacccctcgtgagcgtatgagattaagaaaactgcaagcggctgacgagaaagcgagaaagctcaaaaagatagttgaggagaagtacgaggaaaactctaaacgcatgcaggagttgcgctcccgaaactttcagcagcttagtgtcgacgtgctgcatgagaaaacccacttgaagggaatggaagaaaaagaagaacagcccgaggggagactctcctgctcaccccaggacgaagacgaagagcgctggcagggacgcgaagaggagtctgacgaaccaactctcgagaacctgccagagtctcagccgattccatctatggacttacacgagctcgagtctatagtggaggacgccacatccgatctcgggtatcacggcgattgtaacttgatctccctggacgagtactggaagaacgagaagtag

SEQ ID NO: 232723 - DNA, 1938 bp, synthetic construct
  misc_feature 1..1938: note = Description of Artificial Sequence: Synthetic coding sequence
  source 1..1938: mol_type = other DNA
atgctcaagtttcaggaggccgcaaagtgtgtgagcggttccaccgcgattagcacgtaccccaagactttaatcgctagaaggtatgtgctgcagcaaaagctcggtagcggaagctttggcacagtctacctcgtgagtgacaaaaaagcaaagcgcggtgaggagctgaaagtgctgaaagaaatctcggtgggcgaactgaatcccaacgagacagtgcaggcaaacctggaggcccagttgttgtcaaagcttgaccatccggctatcgttaagtttcatgcatccttcgtggagcaagataacttttgcatcattactgaatattgcgaaggcagagacctggatgacaagatccaagagtacaaacaagctggaaagatctttccggagaaccagataattgagtggtttattcagctgttgttgggggtagattatatgcatgaaagacgtatcctgcatagggatctcaagtcgaagaatgtgttcctgaaaaataacctcctcaaaattggtgacttcggcgtatcgagactcctgatggggtcatgtgacttggcgactactctgacgggtactccacactacatgagcccggaagcccttaaacaccagggctacgatacaaaatctgatatttggtctctcgcatgtatcctttatgagatgtgttgcatgaatcacgccttcgccggtagcaatttcctcagcattgtgcttaaaatcgtggagggagatacaccctcattgccagagagatatcctaaggagctgaatgcaattatggagagcatgctcaacaaaaatccctccctgcgtcctagcgccatagagatattgaagatcccctacctcgacgagcagcttcagaatctgatgtgtcgctactccgagatgactctggaagataaaaacttggattgccaaaaagaggctgcccacattataaacgcaatgcagaaacgaatccatctgcagacattgcgagcactgtccgaagtacaaaagatgacacccagagaaaggatgcggttgcgaaagctgcaggctgcggacgagaaagcccgtaaactcaagaaaattgtcgaggaaaagtatgaagaaaacagtaaaagaatgcaggagctgcgcagccgaaacttccagcagttatcagtggacgtcctccacgagaagactcacctgaagggtatggaggagaaggaggagcagcccgagggccgattgtcatgctctccccaagacgaggatgaggaaagatggcaaggtagagaagaggaatcagacgagcctacccttgaaaaccttcccgaaagccagcccattccgtcaatggatctgcacgaactggaaagtattgtagaggacgctacttcggatctcggctaccatgaaataccggaggatccactcgtggccgaggagtactatgcagacgctttcgactcctactgtgaggagagcgacgaggaagaggaagaaattgccctcgaacgcccagaaaaggagattcgcaacgagggctcccagcccgcttatagaacaaaccagcaggattcagacatcgaggccctggctcgctgcctcgagaatgtcttaggatgtacttctttggacacaaagacgatcaccacaatggccgaggatatgtcaccaggcccacctatcttcaacagcgtgatggccaggactaaaatgaagagaatgcgggagagcgcaatgcagaaactcggaacggaggtctttgaggaggtgtacaactatctgaaacgggcacgtcatcagaatgcgagtgaggcggagattagggagtgtttggaaaaagtggtgccccaggcctccgactgtttcgaagtggaccaacttctgtacttcgaggagcagctgctgatcaccatgggaaaggaacccacactgcagaatcatttatag

SEQ ID NO: 232724 - DNA, 1413 bp, synthetic construct
  misc_feature 1..1413: note = Description of Artificial Sequence: Synthetic coding sequence
  source 1..1413: mol_type = other DNA
atgcttaagttccaggaggctgcaaaatgtgtgtccggatctacagctatttcaacgtaccccaagaccctcattgccagacggtatgtcctccagcagaagcttgggagcgggagcttcgggacagtctacctggtgtccgacaagaaggctaagcggggtgaggagctgaaggttctcaaggagatttctgtcggcgagctgaatcccaacgagacagtgcaggccaacctcgaggcacagctgttaagtaagctcgatcaccccgctatcgtcaagttccatgctagctttgtagaacaggataatttctgtatcatcacagagtattgtgagggcagggatctcgatgataaaatccaagagtataaacaagcagggaaaatcttccccgaaaaccagataattgaatggttcattcaattactcttgggagtggattatatgcacgagagacggatcctgcaccgcgaccttaagtctaaaaatgtctttctcaagaataacttgctgaagattggcgactttggggtatcacgcctcttgatgggttcctgcgatcttgcgaccaccctaaccggtacaccccactacatgagcccagaagcccttaaacatcaggggtacgacactaaatccgatatctggtcacttgcttgcatactgtatgaaatgtgctgcatgaatcacgccttcgctgggagtaactttctctctattgtgctgaaaattgtagaaggggacactcccagcctgccagagcgctaccctaaagagttgaatgccatcatggagtccatgctgaataaaaatccttcccttcgcccaagcgctattgagattttgaagattccatatctggacgaacaactgcagaaccttatgtgccgatatagtgaaatgacactggaggacaaaaacttagactgccagaaggaagcagctcatattatcaatgcaatgcagaaacgtattcacctgcagacactgcgcgcactgagcgaagtgcaaaagatgaccccacgggaaagaatgcgcttgagaaagctccaggcagccgatgagaaagctcgaaaacttaagaaaatcgtggaagaaaaatacgaagagaactccaaaaggatgcaggaactgcggagccgcaactttcagcaactatccgtggacgtcctccatgaaaagactcacctcaagggcatggaggaaaaggaggaacagccggaaggacgcctctcatgcagcccccaggacgaagatgaagagcgttggcagggacgagaggaggagtctgacgaacctacattggaaaacctgccagagtcccagcccattcccagtatggacttgcatgagttggaaagtattgtggaggatgctacctccgacttaggttatcacgctactcattcctag

SEQ ID NO: 232725 - DNA, 2079 bp, synthetic construct
  misc_feature 1..2079: note = Description of Artificial Sequence: Synthetic coding sequence
  source 1..2079: mol_type = other DNA
atggagaagtacgagcgtatcagagtggtggggcgtggggctttcggcattgtacacctctgcttgaggaaggcagatcagaagttggtgattataaagcaaattccagtggaacagatgaccaaggaggaaagacaggcggctcagaacgagtgccaggtgctgaaactcttgaatcatcctaacgtaatcgagtattacgaaaattttttagaagataaagccctcatgatcgcgatggagtacgccccaggcggtactctggccgagttcatacagaaaaggtgtaacagtttacttgaggaggaaaccatccttcatttttttgtgcagatccttctagctctccatcacgtccatacacacttgatcttgcatagagatctgaaaactcagaacatccttctcgacaaacatcgaatggtggtgaagattggggattttgggattagtaagatactgagctctaaatcgaaggcctacacggtggtggggacgccatgctacatttcgccagagttgtgcgaagggaaaccatataatcagaagtctgacatctgggctctgggttgcgttctttatgaacttgctagtctaaagagagccttcgaagccgctaacctcccggcattagtactcaaaattatgagtggcacgttcgccccaatttcagatcggtattcacctgaactgcggcagctcgtgctctccctgctttctctagagccggcacagaggcctcctttgtctcatataatggcacagccgctgtgcatccgagccttgttgaacctgcatactgatgtgggttccgtgcggatgcgcagggcagaaaaatccgtagccccttctaacacaggtagccgtaccaccagcgtacggtgccgtgggatcccacggggacccgtgaggccggcaattcctcctccactctcaagcgtttacgcttggggcggaggcctgggcacaccgctccgactcccaatgttgaacaccgaagtagtgcaagtggctgccggacgcacccaaaaggccggagtaacaagatcaggacgtctgatactctgggaggcacccccactgggcgcaggtggcggttccctgttgcccggtgctgttgagcagccacagccacagtttatttccaggttcctggagggacagtcaggcgtcactatcaaacacgtcgcctgtggtgatttttttacagcatgcctaacagaccgcggaatcataatgactttcggcagcggcagcaatgggtgcctgggccacggttctctgactgatatctcacagcccacaattgtcgaggctctgttagggtatgagatggttcaggtcgcttgtggcgcaagtcacgtgctggccctttccaccgagcgcgagctatttgcctggggaagaggtgactcagggagacttggcttaggcacaagggagtcccattcttgtccgcagcaggtgcccatgcccccagggcaggaagcacagcgggttgtgtgcggaattgacagcagtatgattttaacagtgcctggccaggccctggcatgtggcagtaaccgcttcaataaattgggcctggaccacctgagcctcggcgaggagcccgtgcctcaccagcaagttgaagaagctctgtccttcaccttactcggtagcgcacctctggatcaggaacccctcttgagtatcgatcttgggactgcccactcagccgcagttacggcttctggggactgttatacttttggctctaatcaacatggccagctaggcacgaacaccagaagagggtccagggctccatgcaaggttcagggtctcgaaggaattaagatggctatggtggcttgcggggatgctttcacagtagctatcggtgctgaaagcgaggtctactcctggggtaaaggagccaggggacgtttgggtaggcgtgacgaagacgcaggtcttccccgaccagtgcagctggatgaaactcacccttacactgtcaccagcgtctcctgctgtcatggcaacaccctcctggctgttaggtcagtcacagacgagcccgtcccaccttag

SEQ ID NO: 232726 - DNA, 1383 bp, synthetic construct
  misc_feature 1..1383: note = Description of Artificial Sequence: Synthetic coding sequence
  source 1..1383: mol_type = other DNA
atggagaagtacgagagaatacgcgtggttgggagaggagcgtttggcatcgtacacctttgccttaggaaagctgatcagaagctggtgatcattaaacagattccggtggagcagatgacgaaggaggaaagacaggcagcacaaaacgaatgccaggtgctaaaactcctgaaccacccaaacgtcattgaatactacgagaattttcttgaggataaggctcttatgatcgccatggaatacgccccaggtggaaccctcgcagaattcatacaaaagagatgtaactctctgttggaggaggaaacaatcctgcacttcttcgtgcagattctattggccctgcatcacgtgcacacacacctaattctgcaccgagacctgaagactcaaaatattctcctcgacaaacaccggatggtggttaaaattggggattttggaataagcaaaatcctttctagtaaatcaaaggcttacacagtcgtggggacgccctgctacattagccctgagctatgcgaggggaagccttataaccaaaaatccgacatatgggccctcggctgcgtgctttatgaattggcttcacttaagcgcgcattcgaggccgcaaacctgccggctcttgtcctgaagataatgagcgggaccttcgctccaatttctgaccggtactcccctgaactccgccagttagtgctgagcctgctgtctttagagcctgcacagcgacctccgcttagtcacattatggcccaacctctgtgtatcagggcactgctgaatctgcacacggatgttggaagcgtcaggatgagacggcctgtacagggccagcgggctgtgttgggcggtagagtgtgggcgccttccgggagtactgggggactgagacaaagggagacatggggcaagagctcactcccagcgtgcagaaacgtgcgaagggtgttcgtactacgtcccccaagcgtcctccaggggcgagaagtgagaggcccacagcaacatagagagcaggaccaccaatgcccactgcaacggtacccaccaggtacttgcgaagcatctcaccccaccaccactgtagttagcgtatgcctgggatggtgggccggtcaccctcctgccgctgccaacgcccaacaccggggagggcctggtggaagctgggcacatgcggaatcccggagacacgccctgtgggctagccatcccgttggaggaccgactccccgatgcagacgccgtcagagtccctcttggggctcaggcgctgcgaccgcccctgttcacctggcctttcccggtggtcctgttggctgcgaccatcaggcgaggggattatggggtttgctccactgcctccccgattag

SEQ ID NO: 232727 - DNA, 2940 bp, synthetic construct
  misc_feature 1..2940: note = Description of Artificial Sequence: Synthetic coding sequence
  source 1..2940: mol_type = other DNA
atgagcgtgctcggcgagtacgaacgacattgcgatagcattaactctgatttcgggtctgaatcaggaggctgtggcgattcaagcccaggacccagcgcgtcccaaggtccgagggcgggagggggagctgccgagcaagaagaacttcactatatacctatcagggtcttgggcagaggcgctttcggagaggcaacactgtataggagaaccgaggatgattccttagtcgtgtggaaggaagttgatctgactcggctgtccgagaaggaacggcgagacgccctgaacgagattgtcatcttggccttgttgcagcacgataatatcattgcctactacaaccatttcatggacaatacaactttgctcattgaattggagtattgcaacggagggaacttgtacgacaaaatactccgtcagaaggacaagctgtttgaggaggagatggtcgtatggtacctattccagattgtctcagctgttagctgtatccataaagcaggtatactgcatcgtgacatcaaaacactgaatatattcctgaccaaagcaaacctcatcaagctgggcgactacggactagcaaagaagctcaacagcgagtacagcatggcagagacactggtcggtaccccatactacatgtctcctgaattgtgccagggggtgaagtataatttcaagagcgacatctgggccgttggctgtgtgattttcgagttgctgacactgaagcggactttcgacgcaactaacccactgaatttgtgtgtgaaaatcgtgcaggggatccgggcaatggaagtggatagttcccaatacagtctcgagttgattcagatggtgcacagttgtctagaccaggaccctgagcaacggccaactgccgacgagctgctggacagacccctgctgcgcaaacggcgtagggagatggaggaaaaagtgaccctgcttaacgcacccactaaacggcctcggagctctacggttacggaagctccaatcgcggtggtgacatcacggacttctgaagtctacgtgtgggggggaggcaaaagcactccccagaagctcgacgttattaaatctggctgcagcgcacgccaagtctgtgccggaaatacacactttgccgtggtgactgtagagaaggagctttatacgtgggtaaacatgcagggaggaacaaagttgcacggacagcttgggcacggggacaaagcatcctatcggcagcccaagcacgtggagaagctccaaggaaaagctatccgccaggtatcatgcggtgacgactttaccgtctgtgtgacagacgaaggacagctttatgcatttggtagcgactattacggttgcatgggcgtggacaaagtggcgggtcctgaggtgcttgagcccatgcagctgaatttcttcctatctaatcctgtggagcaggtttcctgcggtgataaccatgtagttgtattaaccagaaacaaagaagtgtactcctggggatgtggagagtacgggcgactgggcctggacagtgaagaggattactatactccacagaaagtggatgttccgaaggcgttaataatagtggcggtccaatgtggctgcgatggtaccttcttgcttacgcagtccgggaaagtcctggcttgtgggctcaatgagttcaacaaacttggcttgaatcaatgcatgagtggcataatcaaccatgaagcctaccacgaagtgccttacaccacctctttcacattggctaagcagctgtcattttataagatacgcacaatcgcacctggcaagacccatacagcagccatcgatgaacgcggacggctgctaacttttgggtgtaataagtgtgggcaacttggagttggaaactataagaagagattgggcattaacctgttaggtgggccactgggtggcaaacaggtgatcagggtctcttgcggcgatgagttcaccattgccgcaacagacgataatcatatcttcgcttggggaaatggtggaaatggcaggttagctatgacacccaccgaacgtccacatggctccgacatctgcactagctggccaagacctatcttcggatcgttgcatcatgtgcccgatctttcctgccgcggatggcacacgatactaatcgtcgaaaaggttctgaatagtaagaccataaggtctaactccagcggcctttccattgggactgtgttccagagttcttctccaggcggaggaggcggtggcggtggcggagaggaagaggactcacagcaggaatcagagaccccggatccctctggagggttccgaggcacgatggaggccgacaggggcatggagggcctgatctctccgaccgaggccatgggcaattctaacggagccagcagctcttgtcccggatggttgcggaaggaacttgaaaatgcggaattcatacctatgccggacagcccgagccctttgtctgccgcattctccgagtctgagaaagacacactgccctatgaagagctgcagggacttaaggtggcatccgaggctccactcgagcataaaccccaagtagaagccagctccccacggcttaaccctgccgtgacatgcgccggaaaagggactccactgactcctccagcctgtgcatgctcttcactccaggtggaggtagagagacttcagggactggttctcaaatgtctcgccgaacagcagaaattacagcaggaaaacctccagatctttactcagctccagaaactgaataagaagctcgaaggcggtcagcaggtcggtatgcatagtaaagggacccagaccgctaaagaggagatggagatggaccccaagccagacctggattcagatagctggtgtttactggggacagacagctgtaggccatctctctag

SEQ ID NO: 232728 - DNA, 1545 bp, synthetic construct
  misc_feature 1..1545: note = Description of Artificial Sequence: Synthetic coding sequence
  source 1..1545: mol_type = other DNA
atgagcgtgctaggcgagtatgaaagacactgcgactctattaacagcgacttcggctccgagtcaggcggatgtggggattcctccccaggaccaagcgccagtcaaggacctagagcgggtgggggtgcatttggggaagctaccctgtacaggcgcaccgaggacgactcccttgtggtgtggaaggaggtggatcttacccgactctcagaaaaggagcgacgcgacgcattgaacgaaattgtgattttggctctacttcagcacgataatattatcgcatattacaatcatttcatggacaatactacgttgctcatcgaactggagtactgcaatgggggtaacctttatgataaaattctgaggcaaaaggacaagttgtttgaggaggagatggtcgtttggtatctgtttcagatagtgtctgctgtctcctgtattcataaggccggaatcctgcaccgagacattaagaccctgaacattttcctcacaaaggccaatctaatcaagcttggcgattatggcttagctaaaaagttgaattcagagtatagcatggctgagacactggtgggcacaccctattacatgagccctgaactgtgtcagggggtgaagtataatttcaaatccgacatttgggccgtcggatgcgttatcttcgaacttctcacgctgaagaggacctttgacgctaccaatcccctcaacctctgtgttaagatcgttcagggtatccgtgccatggaagtcgattccagccaatacagcttggaactcatccagatggtccatagttgtctggaccaagaccctgaacaacggcctacggccgacgaactgcttgataggccattgttacggaaaagacgtcgggagatggaagagaaagtaacccttttaaacgctcctaccaaacgtcccaggagttccactgtcaccgaggcgccaattgcagtcgtgacttcgcgaacttcggaagtgtacgtatggggtggagggaagtctactcctcagaagctcgatgtcatcaaatctggctgctcggcaaggcaggtgtgtgccggaaacacacactttgccgtggtgactgtcgaaaaggaactctacacatgggtgaatatgcagggcggtacaaagctgcacggtcaactgggacatggcgataaggcatcttaccggcaacccaagcacgtagaaaaactgcaggggaaggccatacgtcaagtgtcctgcggggacgattttactgtgtgcgtcacggacgagggtcagttgtatgcatttggatcagattactacggttgtatgggagtagacaaagtcgccggtccagaagtgctggagcctatgcagcttaacttcttcctttcaaaccccgtcgagcaggtttcatgtggtgataaccacgtcgtagtactcactagaaacaaggaagtgtactcttgggggtgcggggagtatggcaggggtagcctggtgagcgtgcacttcttcacgggtattcagcctgacttcaaagtggtgtgcatttag

SEQ ID NO: 232729 - DNA, 3777 bp, synthetic construct
  misc_feature 1..3777: note = Description of Artificial Sequence: Synthetic coding sequence
  source 1..3777: mol_type = other DNA
atggagaaatacgtcaggctccagaaaatcggggaaggctcattcggtaaagccattctggtgaaaagtacagaagatggtcgtcagtatgtgataaaggaaatcaatatatctcgtatgtcctccaaggagcgcgaggagagccggcgtgaagtcgccgtgctggcgaacatgaagcaccccaacatcgtgcagtaccgcgagtccttcgaggagaacggaagtctttatatcgttatggactattgcgaaggaggagacctgttcaaacggattaatgcgcagaaaggcgtcctctttcaggaagatcaaatcctggactggtttgtacaaatttgtttagcactgaagcatgtccatgacagaaagattctgcacagggacatcaaatctcagaatatctttctgactaaagatggaactgtgcaactgggggactttggcatcgcgagggtgctgaattccacggtagaactggccaggacatgcattggcacgccctactatcttagcccagagatctgcgagaataagccatacaacaacaaaagtgatatttgggcgctcggctgcgtcctctacgagctgtgtactctgaaacatgctttcgaggccggtagcatgaagaatctggtgctcaaaatcatttcaggaagcttccccccagtgtcgttgcattactcatatgatcttcgtagtcttgtgtcacagctgttcaagcgaaacccgagagatcgaccgtccgtgaactcgatacttgaaaaaggtttcatagctaagcgcattgaaaagttccttagccctcagctcattgctgaggagttctgcttaaagacatttagcaagtttggctcccagcctatccctgccaaaaggccagcttccgggcagaactcaatctcagtgatgccagcccaaaagattaccaaaccagctgccaagtacggaattccgcttgcttataaaaaatacggtgacaagaaactccacgaaaaaaaacctttacagaaacacaaacaggcacatcagacacccgaaaagcgggttaacacaggggaagaacgtagaaagatcagtgaggaagcggcaaggaaaagacggctggagtttatcgaaaaagagaaaaaacagaaagatcagatcatctcattaatgaaggcagagcagatgaaacgccaggagaaggagaggttggagagaatcaacagagcccgagaacagggctggagaaatgttttaagtgccggtgggtctggcgaagtgaaggcgcctttccttggctccgggggtaccattgctccgagcagcttttccagccggggtcaatatgagcactatcatgccatcttcgaccagatgcaacagcagagggccgaggacaacgaggccaagtggaaacgggaaatctatggaagagggttgccagagaggggtattctgccgggagtcagaccaggattcccgtacggcgcagcagggcatcaccactttcccgatgctgatgatattcgcaaaacactgaagcgccttaaggcggtctctaagcaggccaatgcaaatagacagaaaggtcagttagccgtcgagcgggctaagcaggtcgaagagtttctgcagaggaaacgcgaagccatgcagaataaagctcgtgccgaaggacatatggtctatctagctcgattgaggcagatacgcctgcagaactttaacgagcggcagcagataaaggcgaaacttcgaggcgagaagaaagaggccaatcactccgaaggccaagaggggtccgaggaggctgacatgagacgcaagaagatagagtctctgaaagcccatgctaatgccagggccgctgtgttgaaggagcagcttgagagaaaaagaaaagaggcttacgaacgtgaaaaaaaagtgtgggaggaacacctggtggccaaaggtgtgaaaagtagcgatgtgtcccctcctctgggacagcatgagactggagggtcaccatctaagcagcagatgcgctccgtcatttctgtgacctcagccctgaaggaggtcggcgtcgatagcagcctgaccgatactcgggagaccagcgaagaaatgcagaaaaccaacaacgcaatcagttccaaacgtgaaatccttcggaggctgaacgagaatctgaaggcacaggaggacgagaaagggaaacagaacctttcggacacatttgagattaatgtgcacgaagatgcaaaagagcacgagaaggagaagagcgtttccagcgatcgcaaaaaatgggaggcaggcggacagcttgtgattcccctggatgagctgacactcgacacatccttcagcacaacagagcgccacaccgtgggagaggtgattaagttgggaccaaatgggtcccccagaagggcatggggcaagtcaccaactgattctgtgctgaagatattgggagaggctgagctacagttgcagaccgagctcctcgaaaatactactatccggagcgagatcagtccagagggtgagaagtacaaaccgctgatcactggggagaaaaaggtgcagtgcattagccatgagattaacccctccgccatcgtggactcgcctgtcgagacaaaaagccccgagttctcagaggcaagtccgcagatgtcgctgaaactggaaggaaaccttgaagaacccgatgatcttgagactgaaattctgcaggaaccatccgggaccaacaaggatgagtcgctcccctgcaccatcactgatgtatggatatctgaggagaaggaaaccaaggagacacaatccgctgacaggatcaccatccaggaaaatgaggtgtccgaggacggtgtaagtagcacagtcgatcagctgtcagacatccatattgagcccggaacaaacgattcacaacattccaaatgcgatgtggacaaaagtgtgcagccagagccctttttccacaaagtcgtacattctgaacacctcaatttagtaccgcaggtccagtccgtgcaatgtagtcctgaagaaagtttcgcgttccgctctcattcgcatttgccgccaaagaataagaacaagaattccttactcatcggactgtccaccggcttgttcgatgctaataaccccaaaatgttgagaacttgcagcctgcccgacctgtctaagctcttccgaactctaatggacgtgccaaccgtgggagatgtgagacaagacaacctggagatagatgaaattgaagacgaaaatatcaaagaagggccaagcgatagtgaggacattgtgttcgaagaaacagatactgatctccaggagttgcaggccagcatggaacagctattgagagaacaacccggtgaggaatacagcgaggaagaggaatcagttctgaagaactctgatgtcgaacccactgccaatgggacagacgtggccgacgaggacgataatccttcctcagagagcgctttaaacgaagagtggcactcagataactcagatggggaaatcgcctccgagtgcgaatgtgacagtgttttcaaccacctggaagagctgaggcttcacctagagcaggaaatggggttcgagaaattttttgaggtgtacgagaaaattaaagcgattcacgaggatgaggatgagaatattgaaatttgtagcaagattgtgcagaacatcctgggaaatgagcaccagcacctttacgccaaaatcctgcacctggtgatggcagatggagcctatcaggaagacaatgatgagtag

SEQ ID NO: 232730 - DNA, 3861 bp, synthetic construct
  misc_feature 1..3861: note = Description of Artificial Sequence: Synthetic coding sequence
  source 1..3861: mol_type = other DNA
atggaaaagtatgtgcggctgcagaaaatcggggagggtagtttcggaaaagcaatcctggtgaagtctacagaggacggcaggcagtatgtgataaaggagattaacatatctagaatgagttctaaagagcgggaggaatcaaggagagaggtggcggtgttagccaacatgaagcaccctaacatcgtgcagtatagggagagcttcgaagagaatgggtctttgtacatagtgatggactactgcgaaggcggagatttgtttaaaaggattaacgcccagaagggtgtgctctttcaggaagaccagatactagattggttcgtccagatatgtttagcgctaaaacatgttcacgatcggaagattctgcacagagatataaagtcccaaaacatattcctgacaaaagatggcacagtccagctgggggatttcggcatagctcgggtgctgaatagcaccgttgagctggccagaacgtgcattggcaccccatactacctatctcccgaaatttgcgaaaacaaaccctacaataacaagagtgacatctgggctctgggatgtgtcttgtatgagctctgtacattaaagcacgcttttgaggcagggtcaatgaagaacctagttctgaagataatttctggatcctttccacccgttagtctccattactcttacgacctacggtctttagtgtctcagctgttcaagaggaaccctagagacagacctagtgttaattcaatccttgagaagggctttatcgcaaaaagaatcgagaaattcctcagtccacagctcatagctgaagagttttgcctaaagacctttagtaaattcgggagtcagcccatccctgccaaaagaccggcttctggccagaacagtatatccgttatgcctgcacagaagatcactaaacccgcagccaagtatggtattcccttagcttataaaaaatacggtgacaagaagcttcacgagaagaaaccactccagaaacacaaacaggcacatcaaacccccgagaagagagtgaataccggagaggagcgccgaaaaattagcgaagaggcagcccgaaagcggcgactagaattcattgagaaggaaaagaaacaaaaagaccaaataatcagtctaatgaaggcagaacagatgaagcggcaggagaaggaaaggctggaaagaatcaatcgggctcgggagcaaggatggcggaacgtgctgtctgccggtggctcaggtgaggtgaaagctcctttccttggctctggtggtacgatcgccccaagcagctttagttctcggggacagtatgagcactatcacgcaatcttcgaccagatgcagcagcaaagagcagaagacaacgaagcaaagtggaaacgggaaatatatggcagagggctgccggagagaggaattctccccggtgtgcgacccggatttccttatggtgccgctggccaccaccattttccggatgctgatgatatcagaaaaactttaaaacgactcaaagccgttagcaagcaagcaaacgccaatcggcagaagggccagctggccgtagaacgtgcaaagcaggtggaagagttcttgcagcgcaaacgagaggccatgcaaaataaagcacgagctgagggccacatgggcattcttcaaaatctggcggctatgtatggcggtaggcctagctctagccgcggtgggaaaccgcgtaacaaggaagaagaggtgtatttggcccgactgagacagattagacttcagaatttcaacgaaagacagcaaattaaagctaagctgaggggcgaaaaaaaggaggccaaccattccgagggtcaagaggggagtgaggaggcagacatgagaagaaagaagatcgaaagcttgaaggctcacgccaacgctagggccgcagtgctgaaagagcagcttgaacgcaagagaaaagaagcctatgaacgcgagaagaaagtctgggaagaacaccttgtagcaaagggggtgaaatccagcgatgtgtccccaccgctgggccagcatgagaccgggggttccccctcgaaacagcaaatgaggagcgtgataagcgtgacatctgccctgaaggaagtgggcgtagattctagcctaacagacactcgggagacaagcgaagagatgcagaagactaacaatgccatcagcagcaaaagggagattctccggaggctgaatgagaacctcaaggcccaagaggatgagaagggtaagcagaatctctctgatacgttcgaaatcaatgtgcacgaagatgccaaggagcacgagaaagagaagtccgtgagctccgatcgtaaaaaatgggaggccggaggtcaattggtgatccctttggacgagttaaccctggacacctcatttagcactacagagcgtcataccgtgggcgaagtgattaagcttggcccaaatggatccccaaggagggcgtgggggaagtccccaacagatagcgtgctgaagattttaggtgaggcagaactccagctgcagaccgagctgctggagaatacaactatacgatctgaaatcagcccagaaggcgaaaaatataaaccactcattacgggcgagaagaaggtccagtgcataagccatgagatcaacccaagcgccatcgttgacagtcccgtggaaaccaagtcccccgaattttccgaggcgtcaccacagatgtctcttaagttggaaggaaatcttgaagaacctgatgatctagagacagagatcttgcaggaacccagcggcacaaacaaagatgagtctctgccttgcacgattacagacgtttggatatcagaagagaaagagactaaggagacccagtctgctgatcgcattacgattcaggagaacgaggtgagtgaagatggcgtgtcctccaccgttgatcagctttcggacattcacattgaaccagggaccaacgatagccaacatagtaaatgcgacgtggacaagtcagtccagccagaaccattctttcataaggtggtgcatagcgaacatttgaacctggtgcctcaagtgcagagcgtccagtgcagtccagaggaatctttcgcctttaggagtcattctcatctaccacccaagaataagaataaaaattcactgctcataggtctttctacaggactgtttgatgcaaacaaccctaagatgctgcgtacttgcagcttgcccgatttatccaaactgtttaggacgctgatggacgtgccaactgtaggggacgtgagacaagacaatttagagattgatgaaatcgaggatgagaacattaaagaaggcccaagtgattccgaagacatcgtcttcgaagagaccgatactgaccttcaggagctccaagcttccatggaacaactcctccgcgagcaacccggagaggaatactctgaggaggaggagagcgtgctcaaaaactctgatgtggaacccacagctaacggaaccgatgtcgctgacgaggacgacaacccatccagtgagagtgcattgaatgaggagtggcactctgataattcagacggcgaaattgccagtgagtgtgaatgcgacagcgtgtttaatcacctggaggaattgcgcctgcatctggagcaagaaatgggctttgagaaattcttcgaggtgtatgagaagattaaggctatccatgaggacgaagacgagaatatagagatctgcagtaagatcgtgcagaacatactgggaaacgagcaccaacacctgtacgccaaaatcctgcatctagttatggccgacggagcctatcaggaggacaatgatgaatag

SEQ ID NO: 232731 - DNA, 3645 bp, synthetic construct
  misc_feature 1..3645: note = Description of Artificial Sequence: Synthetic coding sequence
  source 1..3645: mol_type = other DNA
atggaaaagtatgtcagactgcagaaaataggcgagggatccttcgggaaagcaattctggtaaagagtaccgaggatgggaggcaatatgtgattaaggagattaacatttctagaatgtctagtaaggagcgagaggaaagtcggagggaggttgccgtgctggccaacatgaagcatcccaatatcgtccagtacagggaatcgttcgaagaaaacggatctctgtacatagtgatggattactgcgaaggtggcgaccttttcaaaagaatcaacgctcagaagggcgtgctgttccaggaggaccagatacttgattggttcgtccagatttgcctcgcgctgaagcacgtgcacgaccggaaaatactccacagggatattaagagtcagaatatctttctgaccaaagatggaaccgttcagctgggagatttcggcatcgcccgtgtgctgaactcaacggtagagttggccaggacctgtattgggaccccgtactacttgagccctgaaatctgtgagaataagccctataataataagtcggatatttgggcattaggatgcgtcttatacgaactgtgtacccttaaacatgccttcgaggcaggctctatgaaaaatcttgtgttgaaaattatatcggggagcttccctcccgtgtctttacattactcctacgatctgaggagcctggtgtctcagctgtttaaacgaaatcccagagatagaccaagtgtcaattcaattctagagaagggatttattgctaaacgcatcgaaaaattcctctctcctcagctcattgcagaggagttttgcctcaaaacatttagcaagttcggatcacagcctattcctgccaaacgtcctgcctcgggccagaacagtattagtgtgatgccggcacagaagatcaccaagcccgcagcaaagtacgggatcccccttgcttacaaaaagtacggcgacaaaaaactgcatgagaagaaacccctacagaagcataagcaggctcatcaaacccctgaaaaacgggtgaataccggcgaggaaaggcgcaagatttctgaggaggctgccaggaagaggcgcttggagtttattgagaaagagaaaaaacagaaggatcagatcatcagccttatgaaagctgagcaaatgaagagacaagaaaaagaacgcttagagcggatcaaccgggctcgagaacaggggtggcgaaatgtcctaagtgctggtggcagtggcgaagtcaaagcccctttcctcgggtccggcggaaccatcgctccaagttcattttcttctaggggtcaatatgagcattaccacgctatattcgaccagatgcagcagcaacgggcagaagacaacgaggccaagtggaaacgagaaatttacgggagaggtctgccggagcggcaaaagggccagttggccgtggagagagccaagcaggtcgaggaatttctccaaaggaagagagaggcgatgcagaataaagcaagggccgagggtcacatggtgtatttggccagacttcggcagatccgcttgcagaattttaatgaacggcagcagatcaaggccaaattgcggggagaaaagaaagaggccaatcacagcgagggccaggaaggatctgaggaagcagatatgcgcaggaaaaagatcgaatctctgaaggcccatgccaatgccagggcagccgtgttgaaagagcagctggagcgcaagcggaaagaggcctatgaaagggagaagaaagtgtgggaagaacatctcgttgccaagggagtgaagtcctccgacgtttctccacctctaggacagcacgagaccggaggttccccctcaaagcagcagatgagatccgtgattagcgtgacttctgcgctgaaagaggtgggggtcgactctagtctcactgacacacgggagacaagcgaagaaatgcaaaagactaacaacgccatttctagcaagagggagatactacgacgtctgaacgagaacctaaaggcccaggaggatgaaaagggcaagcaaaacctctcagacacatttgagatcaacgtccatgaagatgcaaaggaacatgaaaaagagaaaagtgtgtccagcgaccgtaaaaaatgggaagcaggcggtcagctggtcattcccctagacgagctgacactggacacatccttctccactactgagagacacaccgtaggcgaagtgataaaacttggccctaacggaagtccaaggcgggcttgggggaagagcccgaccgactcagtcctcaaaattctaggggaggccgaacttcagttgcagaccgaactgctggagaataccacgataaggtcagaaatctcccccgagggcgagaagtacaagcctcttatcactggagaaaagaaggtgcagtgcatatcacacgagattaacccctccgcaattgtggactcgccagtggagaccaaatcacctgaattttcagaggcttctcctcaaatgtccctcaaactggaggggaacctggaagaaccagacgacctcgagacggagatacttcaggagcccagcgggaccaacaaggatgagtctctcccctgtaccattaccgacgtgtggatttccgaggagaaggaaacaaaagagactcagtccgctgaccgcatcaccatccaagaaaatgaagttagcgaagatggggtgagcagtacagtggaccagctgagcgacatacatatcgaaccagggaccaacgactcccagcattccaaatgtgacgtcgacaagtctgtgcagcctgagccgtttttccacaaggtggtgcactcagagcatctcaacctggtcccgcaagtccagagcgtacagtgctcgcctgaggaaagcttcgcattccgtagccattctcatctcccacccaagaataaaaataagaatagcctactaattggcctctcaactgggttgttcgatgcaaacaacccgaagatgttgcgtacctgttccctccctgacctatctaagctctttcgaactctcatggatgtacctacggttggtgacgtcaggcaggataacctggagatcgacgaaatagaagatgaaaacataaaggaaggccctagcgacagcgaggatatcgtctttgaggaaacagacactgacctccaagaactacaggcctcaatggagcagctgttgcgggaacagcccggagaggagtactctgaggaggaggagagcgtactgaagaattcagacgtggagccaactgccaatgggaccgatgtggcagatgaggacgacaatcccagctctgaatctgcacttaacgaagagtggcattctgacaattccgacggcgagatagccagcgaatgtgagtgtgattctgtgtttaaccacctggaggagctgaggctgcaccttgaacaggaaatgggttttgaaaaatttttcgaagtgtatgaaaaaatcaaggccatccacgaggacgaagatgagaacatcgaaatctgttcgaagatcgttcagaacatactgggaaacgaacaccagcacctttatgccaagattctgcatttagtgatggccgacggtgcataccaggaggataatgatgaatag

SEQ ID NO: 232732 - DNA, 3570 bp, synthetic construct
  misc_feature 1..3570: note = Description of Artificial Sequence: Synthetic coding sequence
  source 1..3570: mol_type = other DNA
atggagaagtacgtgaggctgcaaaagatcggcgaggggtcattcggtaaggcaattctcgttaagtccactgaggacggaaggcagtacgtgatcaaagagatcaatatttctagaatgtctagcaaagagcgggaggagtccagacgggaagtggccgtattagctaacatgaaacaccctaacatagtccaataccgcgagtcgttcgaggagaatggaagcttgtacatcgtgatggactactgtgaaggcggtgacctgttcaaacgcattaatgcgcagaagggagtactgttccaagaggaccagatactggattggttcgtacagatctgtctagcccttaaacacgtgcacgataggaagatcctccaccgtgacattaagtcgcagaacatattcctgacaaaggacggaactgttcagttgggcgacttcggcatagcccgtgttttaaacagtaccgtagaattggcacgaacttgtataggaaccccttattacttgtcaccagaaatatgcgagaacaaaccctacaacaataagagtgatatctgggcgctgggctgtgtgctttatgaactgtgcactttaaagcacgccttcgaggctggctcaatgaagaacctggtgctaaagattatctctgggtccttcccccctgtgtctcttcattactcatacgatctgcgctctctcgtgagccagctgttcaaacggaatcccagagataggccatcagtgaatagcatactcgagaaaggctttatcgccaagaggatcgaaaaattcctgtccccccagctcatcgctgaggaattctgcctgaagacattttctaaattcggctcacagcctatccctgccaaacgacctgcttccgggcaaaattcaatatccgtgatgcccgcacagaagatcaccaagccagctgctaagtatggaatcccactggcgtataagaagtacggcgacaaaaagctgcacgagaagaaacccctgcagaaacacaaacaagcccaccaaactcctgagaagagagtgaatactggggaagaacggagaaagatatccgaagaggccgcacggaagcgacgtctagagtttatcgagaaggagaaaaaacagaaagaccaaatcatttcccttatgaaggcagagcaaatgaaaaggcaagagaaggagagagctcctttcctgggtagtgggggaactatagccccttccagcttttcatctcgtggtcagtacgaacattatcatgccatattcgaccaaatgcagcagcagagagctgaagacaacgaggctaagtggaagcgcgaaatctatgggaggggactcccagagcggcaaaagggacaactggccgtggagcgtgccaagcaagtcgaagaatttttgcaaagaaagcgggaagctatgcaaaataaggctcgtgcagaggggcacatggtctacctggctaggctgcgccaaatccggctccagaatttcaacgagcggcagcagatcaaagccaagctgcgaggcgaaaaaaaggaggctaaccacagcgagggccaggagggcagcgaggaggccgacatgaggaggaaaaagatcgaatcactgaaggctcacgcgaatgcccgagccgctgtacttaaagagcagctggagagaaagagaaaggaagcatacgaacgtgagaaaaaggtctgggaggagcatctggtcgcgaagggagtgaaaagtagcgatgttagccctccgttagggcagcacgagacagggggatcgccatccaaacagcagatgcgttccgttatatccgttacttcagccctgaaagaggtgggagtcgacagcagtcttacagacacaagggaaacctcagaagagatgcagaagacaaacaatgccatttcctcaaagcgcgagatcctgcgacgccttaatgagaacctgaaagctcaggaagacgagaaaggaaagcaaaatctctcagatacattcgagattaacgtacacgaggatgccaaggaacacgagaaggagaaatcggtcagctcagataggaagaagtgggaggccggaggccagctggtgatcccactcgatgaattgaccctcgacacctcatttagtaccacggagaggcacacagtcggggaggtcattaagctggggccaaacggcagtccccgtagagcctggggtaaatcccctactgactctgtcttaaagattctcggtgaggccgaactccagttgcagaccgagctgctggagaacacaactattagatcagagatctcccccgaaggagagaagtacaagcccctgatcactggcgagaagaaagttcagtgtataagccacgaaataaatccttccgctattgtagattctcctgtggagacaaagtctcccgagttcagtgaggcttcaccccagatgagcctaaagctcgagggcaacctggaggagcccgacgacctggaaaccgagattctgcaggagccttcggggacgaacaaagatgagtccctgccctgtacgatcaccgacgtgtggatcagcgaagagaaagaaacaaaggaaacccagtccgccgaccgaatcaccatccaggaaaacgaggtttcagaggatggagtgagttctacagtcgatcagctgagtgacattcacatagaaccaggaacaaatgatagccagcacagcaagtgcgacgtggacaaatctgttcagcccgagcccttcttccacaaagtggttcacagcgaacacttaaacctggtaccgcaggtccagtccgttcaatgttccccagaagagagctttgctttccggagccattcccacctcccccctaaaaacaagaacaagaactctttactcatcggattatcaactgggcttttcgatgccaacaatcccaagatgctgaggacctgctccctacctgacctgtctaagctcttccggactttgatggatgttcccacagtcggggatgtgcgccaggataacctggagatagatgagatcgaagatgagaacattaaagaaggaccttccgatagcgaggacatcgtgttcgaagagaccgacactgacctgcaggagctgcaggcctctatggaacagctccttcgggaacaacctggtgaggagtatagtgaggaggaagagagcgttctcaaaaacagtgacgtggagcccacagcaaacgggactgacgtggcggatgaggacgataacccctcatccgagtctgcactgaatgaagagtggcactccgacaactcagatggtgagatcgcctccgagtgtgagtgcgattccgtctttaaccacctggaggagctgaggttacatctggaacaggaaatgggctttgagaaattctttgaggtgtacgagaagattaaggcaatccacgaagatgaagatgaaaatatcgagatttgtagtaagatcgtgcaaaatatccttggcaacgagcatcagcacctttatgcaaaaatcctgcacctagtgatggcagatggagcataccaggaggacaacgacgagtag

SEQ ID NO: 232733 - DNA, 1155 bp, synthetic construct
  misc_feature 1..1155: note = Description of Artificial Sequence: Synthetic coding sequence
  source 1..1155: mol_type = other DNA
atgcctagcagagccgaggactacgaggtcctctatactataggaacaggaagctacgggagatgtcaaaagatcaggcgcaagtctgacggaaagatcctggtgtggaaagagctggattatggtagcatgacggaagccgaaaaacagatgctagtttcggaggtcaacttgctccgggaacttaaacatcctaacattgtgcggtattacgacaggattatagacaggacaaacaccacactgtatatcgttatggaatattgcgagggcggagacctggcttccgtgataactaaaggcaccaaagagaggcaatacttggacgaggagttcgtgctgcgagtgatgactcagctaacccttgctcttaaagagtgccaccgaagaagcgacggaggtcatacagtgctacaccgggacctcaagcctgcgaatgtgttcctggacggcaaacagaacgtcaagctaggagactttggccttgcccgaatactcaatcatgatacatcctttgctaagacgttcgtcgggaccccgtattatatgtcacccgaacagatgaacaggatgtcctataacgaaaagtccgatatttggagtctggggtgtctcctctatgagctctgcgcactcatgcccccattcaccgcgttctcgcagaaagagttggccggtaagattcgggaaggcaagttcagacgcatcccctacagatatagcgacgaactgaatgagattattactagaatgctgaatctgaaggattaccaccggccttctgtggaggagattctggaaaaccccctcattgcagacctcgtggctgacgaacaacgaagaaacctggaacggcgaggcagacagttaggtgaacccgaaaagtctcaggactcttccccagtgctcagtgaactgaaacttaaggagatacagctccaagagcgggaacgtgcactgaaggccagggaagagcggctggagcagaaggagcaggaactatgcgtccgtgaaaggctagccgaggacaagctggcccgagctgaaaaccttctgaagaattactctctgttgaaagagaggaaattcttgtcacttgcgagcaacccaggcatgagaatcaaccttgtgaacaggagctggtgttataagtag

SEQ ID NO: 232734 - DNA, 1338 bp, synthetic construct
  misc_feature 1..1338: note = Description of Artificial Sequence: Synthetic coding sequence
  source 1..1338: mol_type = other DNA
atgccaagtagggcagaagactacgaggtgctttacacaatcggaacgggtagctacggaagatgccagaaaattcggaggaaatcagacggaaagattctggtgtggaaagaactcgactacggctcgatgacggaggctgagaaacaaatgctcgtgtcagaggtaaatctactgagagagttaaaacaccccaatatcgttcgttactacgaccggatcatcgatcgcaccaacactaccctctacatcgtgatggagtactgcgaaggcggtgatctggcaagtgtgattacgaaaggcacaaaggagcggcaatatctcgacgaggagttcgtgctgcgtgtcatgactcagctaacgctggccctgaaggaatgccatagaagaagcgacgggggacataccgtcctccaccgggaccttaagccagcaaacgtgtttttggacggcaagcaaaatgtcaaacttggtgatttcggactggctaggattctgaaccacgacacaagctttgctaaaaccttcgtgggtacaccttactatatgtctcctgaacagatgaacagaatgagctacaatgagaaatccgatatctggtccctcgggtgtttgctctatgaattgtgcgcgctcatgccacccttcacagcattcagccagaaagagttagcgggtaagatacgggaaggaaaattcagacgcataccgtacagatatagcgatgagctcaacgaaattatcacccgaatgctgaatctcaaggattaccacaggccctctgttgaggagatacttgagaaccctttgatcgcagatttggttgccgacgagcagcgcaggaatctggaacgtagaggtaggcaacttggcgagccagagaaaagtcaagatagctccccagtgctgtctgaattgaagctcaaggagattcagctgcaggaacgcgaaagagctttgaaagccagggaggagcgtttggaacaaaaggaacaggagctttgtgtgagggagagattggcggaggacaagttagccagggctgaaaacttgctgaaaaactatagcctactgaaggagaggaaatttctctccttggcctccaatcctgagctgctgaacctgcctagttccgtgatcaagaagaaggtgcacttttcaggcgagtcaaaagagaatattatgagatccgagaacagcgaatctcagcttacaagcaaatccaagtgtaaagaccttaaaaaacggcttcacgctgcacagctcagggcacaagcactgtcggatatcgaaaagaactaccagttgaaaagcaggcaaatcttaggaatgcgctag

SEQ ID NO: 232735 - DNA, 1209 bp, synthetic construct
  misc_feature 1..1209: note = Description of Artificial Sequence: Synthetic coding sequence
  source 1..1209: mol_type = other DNA
atgacagaggctgagaaacaaatgctggttagcgaagtcaacctcttgcgggaactgaaacacccaaatatcgtccgctactacgatcggataattgataggactaacactaccttgtacatcgttatggaatattgcgaaggaggcgatcttgcatcagtgatcaccaagggaactaaggaacgacagtatctggatgaggagttcgtgttacgcgtcatgactcaactaacactggcactgaaggagtgtcaccgcaggtctgacggcggacacactgtcctccacagagacctgaaacctgccaatgttttcctggatggaaagcagaacgtcaagctgggtgactttggactggcccgaattctcaatcacgacacaagtttcgccaagactttcgttggcaccccctattacatgtctcctgagcagatgaataggatgagctacaatgaaaagagcgatatctggtccctgggctgtctgctatatgagctctgcgccttaatgccacctttcacggcgttttcacagaaggagctggccggaaagatcagggagggaaagttcagacgaatcccgtacagatattccgatgaacttaacgaaatcatcactcgaatgctgaatttaaaagactatcatcggccttctgtagaggagatcctggaaaacccgctcattgccgatctggtcgctgatgagcagcggagaaacctggagaggaggggccgtcagcttggcgagccagaaaagagccaggactcgtctccagtcctgtccgagctgaagttgaaggagattcagctgcaagagcgggaaagggccctaaaagcaagggaggagagactggagcagaaggaacaggaactctgcgtaagagagcgcctggctgaggacaaactagctcgagccgagaacctgttgaaaaattacagcctgctaaaggagcggaagtttttgtccctagcttccaaccccgaacttttgaatcttccatcgtcggtgattaagaagaaagtgcacttttcgggcgagtccaaggaaaacatcatgaggagcgaaaactcagaatctcagctgacatccaagagtaagtgcaaagatctcaaaaagcgcctccatgccgcacagctaagagctcaggctctttcagatatcgagaaaaactatcagctcaagagcagacagatcttgggaatgaggtag

SEQ ID NO: 232736 - DNA, 1521 bp, synthetic construct
  misc_feature 1..1521: note = Description of Artificial Sequence: Synthetic coding sequence
  source 1..1521: mol_type = other DNA
atggacgactatatggtcctgcgcatgattggcgagggctccttcgggcgagccctgttggtgcagcacgaaagcagcaatcaaatgtttgccatgaaggaaatcagattacctaagtcattttctaatacccaaaacagtcgcaaggaggctgtgctgttggccaagatgaagcaccccaacatcgtcgcctttaaggaatcctttgaagccgaaggccatctgtacatcgtgatggagtattgcgacggcggagacttgatgcagaagattaaacagcaaaagggcaaactgttcccagaggatatgatcctcaattggtttacacagatgtgtttgggggtcaaccatattcataaaaagcgcgtgcttcacagagacattaagtccaagaacattttccttactcagaatgggaaagtaaaactcggtgacttcggttcggccaggctgctcagcaatccaatggcgtttgcctgcacgtatgtggggactccgtactacgtcccgcctgaaatttgggaaaacctcccctataataataaatccgatatttggtctttagggtgtattctgtacgagctttgcaccctaaaacaccctttccaggcaaatagttggaagaatctcatcctgaaggtgtgtcagggatgtatcagtccactgccctcccattacagttatgaattacagttccttgttaagcaaatgtttaagaggaatcctagccacaggcctagtgccaccaccctgctcagtcggggtatagtggccagactcgtgcagaagtgccttcctcctgaaattatcatggaatacggcgaagaagtgttagaagagattaaaaacagcaaacacaatactcctaggaaaaaggcaaacccatctaggatccgaattgctttaggcaacgaagcatctaccgtgcaggaggaggaacaggatcggaaagggtcccatactgacctggaaagcatcaatgaaaacctggtggagtcagctttacgtagagtgaaccgggaggagaaaggcaacaagtccgtgcacttgcggaaagcaagttcacccaatctgcaccgacgacagtgggaaaagaatgtcccaaataccgcgttaacggccctggaaaatgcttctatccttacatcttccctaaccgccgaagacgatcgcggaggcagcgtaatcaaatactctaaaaatactactcggaagcagtggctcaaagaaaccccagatacccttttaaacattttgaagaatgccgacctttcccttgcattccaaacatatacaatttacagaccaggttctgaggggtttctcaaggggcctctgagcgaggagacggaagcgagtgacagcgtggatgggggtcacgatagtgtgattttagaccctgagaggctggaacctggcctagatgaagaggatactgattttgaggaggaggacgataatcctgactgggtttctgaactgaagaagcgagcaggctggcaaggactatgtgatcgatag

SEQ ID NO: 232737 - DNA, 1521 bp, synthetic construct
  misc_feature 1..1521: note = Description of Artificial Sequence: Synthetic coding sequence
  source 1..1521: mol_type = other DNA
atggacgactacatggtgctacggatgatcggcgaaggctcctttggcagagctttacttgtacagcacgagtcatcgaaccagatgttcgcaatgaaagaaatccgactacctaagagctttagtaatactcaaaactcccggaaggaggccgtgctgttggcaaaaatgaagcacccaaacatcgtggcattcaaagagtccttcgaagcagaaggccatttgtacatcgtgatggagtactgtgatggaggagacctcatgcagaagattaagcaacagaaggggaaattattccccgaagatatgatcctgaactggttcacacaaatgtgcttgggagttaaccacatccacaaaaaacgcgtgcttcaccgcgatatcaagtccaagaacatcttcctcactcaaaatggcaaggtaaagctgggagactttggcagcgccagactgctgtccaacccaatggcgttcgcatgtacttatgtgggtaccccttattatgtgcctccagaaatttgggagaatttgccttataataacaagtcagatatttggtcactgggttgtattttatacgagttatgtacactgaagcacccattccaggccaatagctggaagaatctgattttgaaggtgtgtcagggatgtatcagccccttgcctagtcactacagttatgagctgcagttcctggtgaagcaaatgtttaaacgaaatcccagccatcggccttcagcgaccaccctgctgagtagaggtattgtggccaggctcgtgcagaaatgtctgcctccagagatcatcatggaatatggagaggaggtgctggaggagataaagaacagcaagcataacactccccgtaagaaagccaacccttcccgaatcaggatagcactcggcaacgaggcatctacagtgcaagaggaagaacaggaccgtaaaggatctcacaccgacttggagtccattaatgagaacctggtcgagtcggccctcagaagggttaatagagaggagaagggcaacaagtccgtgcatttaagaaaagctagctctcccaacttacaccgtaggcagtgggagaaaaatgttccaaataccgcattaacagccctggagaacgccagcattctgaccagttctctaactgctgaggatgatcgcggagggagcgtgattaagtatagtaagaatacgacacggaaacagtggctgaaagaaacccccgacaccctattgaacattttgaaaaacgcggatctgtctctagcatttcagacatacacaatctatagacctggcagcgaagggtttctcaagggcccattatccgaagaaacggaagcaagtgactccgtcgatggcggacacgattccgtgatcctggatcctgagagacttgaaccgggactggatgaggaagatacagattttgaagaagaagatgataatcccgactgggtttccgaattgaaaaagagggcaggatggcaaggtctttgtgatcgctag

SEQ ID NO: 232738 - DNA, 1470 bp, synthetic construct
  misc_feature 1..1470: note = Description of Artificial Sequence: Synthetic coding sequence
  source 1..1470: mol_type = other DNA
atggatgactacatggtcctgaggatgataggagagggctcattcgggagggcactgctggttcaacacgagagcagcaaccagatgttcgctatgaaggaaatacgacttcctaagtccttttctaatacccagaactcccgaaaagaggccgtgttactcgcgaagatgaaacatcctaatatagtggccttcaaggagagcttcgaggccgaaggccatctttacatcgttatggagtactgtgacggtggggacctgatgcaaaaaattaagcagcagaaagggaagctgtttccggaggatatgatacttaactggttcacacagatgtgtctgggcgtgaatcacattcacaaaaaacgggtactacacagagatatcaagtcgaagaacattttccttacccagaatggcaaagttaagctgggagatttcggcagtgctaggctcctgtctaacccaatggcttttgcctgcacctacgttggaacgccttactacgtcccccctgagatatgggaaaatctcccttacaacaacaaaagtgacatttggtcactgggctgcatcttgtacgagctgtgtaccctcaaacaccctttccaggcaaactcttggaagaaccttatactgaaagtctgtcaaggctgcatcagccctctcccctctcactactcgtacgagcttcagttcctcgtgaagcaaatgtttaagcgcaaccctagccacaggccctctgcgacaaccctgttgagtcgtggaatagtagccagactggtacagaaatgccttcccccagaaattattatggaatatggagaggaggtgctggaagagattaaaaactctaaacacaacacaccacgtaagaagcaagaggaggaacaagacaggaaggggagccacacagacctcgagtcaatcaacgagaacctcgtagagtccgcattgcgcagggtgaatagggaggagaagggcaataaaagcgtccacttgcgcaaagctagctctccgaacttgcacagacgccagtgggaaaaaaacgttcctaatactgcattaactgccttggagaatgctagtattcttacctcatctctgaccgctgaggacgatcggggtggctccgtgattaagtactctaagaacaccactcgcaaacagtggctgaaggaaacaccagacactttgctgaatatccttaaaaatgcagacctctcactcgcatttcagacgtacacgatctatcgacctggaagcgagggctttctcaaggggcctcttagtgaagaaacggaagcctctgactctgtagatggtggtcacgattccgttatcctggacccggagagattagagcctggcctggacgaagaagatacagattttgaggaagaagacgacaaccctgactgggtaagcgaactgaaaaagcgagccggttggcaaggcctgtgtgatcgctag

SEQ ID NO: 232739 - DNA, 1533 bp, synthetic construct
  misc_feature 1..1533: note = Description of Artificial Sequence: Synthetic coding sequence
  source 1..1533: mol_type = other DNA
atgcagttcgggagggctcacggcgattgtgtttctggcgcacagctgtgcgggtgcccctccatggacgactatatggtgcttcggatgatcggcgagggcagttttggccgagccctgttggttcagcatgaaagcagcaaccagatgtttgctatgaaagaaatacgccttcctaaaagtttttctaatacacagaattcccggaaagaagcagtactactcgccaagatgaaacatcccaacatcgtcgcattcaaagaatctttcgaagctgaagggcacctttacatagtgatggagtattgtgatgggggagatctgatgcagaaaatcaagcagcagaaaggcaaactgtttccagaagacatgatactcaactggtttacacagatgtgcttaggagtaaatcacatccacaagaaacgcgtgctgcatcgggacatcaagagtaagaatatcttcctaacccagaacggcaaagtcaagctgggggacttcggtagcgccagactcctgagtaatccgatggcctttgcttgtacctacgtgggtacaccttactacgtgcccccagagatttgggaaaatcttccctacaataataaatcagacatatggtctcttggatgtattctgtatgagctgtgcaccctcaagcatcccttccaggctaactcttggaagaatctgatactaaaggtttgccaggggtgcatcagtccgctgccgtcacattactcgtacgaactgcagtttttagtgaagcagatgtttaagcgcaatcctagccaccgcccttctgcgacgaccctcctttctcgtgggattgtggcacggctggtccagaagtgcttgcctcctgaaatcatcatggagtacggcgaggaagtattagaagagatcaagaattcgaagcataacacacccagaaagaagcaggaggaggaacaggatcgcaaggggagtcatacagacttagagagtattaacgagaatctcgtggagagtgcccttcgccgagttaatagagaagagaagggcaacaaatccgtccacctgcgaaaagcctcttctccaaatttgcacagacgtcagtgggagaaaaatgtacctaatactgcactgacagcgctcgaaaatgcctccatcctaaccagctcactgactgcggaggacgatagaggcggatcagtcatcaaatattctaaaaacacaactagaaagcaatggctgaaagaaacgcctgatacacttctcaatatactgaaaaacgcagacctttctctagcttttcagacctacaccatctaccgcccaggctcagaaggttttctgaaaggccctctctcagaagaaacagaagcctccgattctgttgacggtggacacgatagtgtgatcttagaccctgagcgactcgaaccgggtctcgatgaggaagataccgatttcgaggaggaggacgataaccctgattgggtctccgagttaaagaaacgagcaggctggcaggggttgtgtgacaggtag

SEQ ID NO: 232740 - DNA, 177 bp, synthetic construct
  misc_feature 1..177: note = Description of Artificial Sequence: Synthetic coding sequence
  source 1..177: mol_type = other DNA
atggacgactacatggtgctacgcatgataggagagggatcctttggacgcgcactgctggtccagcacgaatcttcaaaccagatgttcgctatgaaagaaatcagactgcctaagtcttttagtaacacccaaaatagccgcaaggaagctgtgttattggccaaaatgaaatag

SEQ ID NO: 232741 - DNA, 510 bp, synthetic construct
  misc_feature 1..510: note = Description of Artificial Sequence: Synthetic coding sequence
  source 1..510: mol_type = other DNA
atggcacgcggaggcgacaccgggtgcacaggtccttcagagacatctgcttccggagccgcagccatagctttgcctgggttagaagggccagctacagacgcacagtgtcagactctgccccttacagtcctgaagagcagatctccctcaccacggtccctgccgcctgctctttcatgtcctcctccccaaccagcaatgttggaacacctgtcttctcttcccactcagatggattacaagggacaaaagctcgcggagcagatgttccaggggattattctgttctctgccatcgtcgggttcatctatggttacgttgcggaacagtttggctggactgtatatatcgttatggctggcttcgcctttagctgcctactaactctgccaccttggcctatttacaggcggcaccctttaaaatggctaccggtacaggaatcctccacggatgataaaaaacctggggagcgaaaaattaaaagacacgccaagaataactag

SEQ ID NO: 232742 - DNA, 2259 bp, synthetic construct
  misc_feature 1..2259: note = Description of Artificial Sequence: Synthetic coding sequence
  source 1..2259: mol_type = other DNA
atgccactggccgcatactgttacttgcgggtggttggcaaaggatcatacggggaggtgactcttgtaaagcaccggagggacggcaagcaatacttgcatgaaaagcacattcttcatcgggatctgaagacacagaacgtctttcttaccaggaccaacatcataaaggttggtgaccttggcattgcacgggtcctggagaatcattgcgatatggcatcaacccttattggtaccccatactatatgtcccccgagctgttcagcaataagccatacaactataaatctgacgtctgggcgttgggatgttgcgtgtacgaaatggcaacattgaagcacgcttttaatgccaaagatatgaattccttagtctaccgaataattgaaggcaagttgccaccaatgcctagggattatagtcctgagctagctgaactcattaggactatgttatcaaagagacccgaggagcgcccatccgtccgaagcatcctgcgacagccttatattaagcggcagatatctttcttcttggaggcaaccaaaatcaaaacatctaaaaacaatatcaagaacggtgattcgcagagcaagccctttgctacggtggtgagcggggaagccgaaagcaatcatgaggttatacacccgcagcctctgtcaagcgaaggaagccagacatatatcatgggagaggggaagtgtctgagtcaggagaagcccagagcttccggactcctcaaatccccagcttctcttaaagcccatacttgtaaacaagacctgtctaacacgaccgagctggctacgatttcaagcgtcaacatcgacattctgccggctaagggcagggacagcgtttctgatggcttcgtgcaggagaatcagcctagataccttgatgcttcaaatgaattgggtggcatttgcagcattagccaggtcgaggaggagatgctccaagataacacaaagtccagtgcacagcccgaaaatttgattcccatgtggagctcagatatagtcaccggtgaaaaaaatgaacctgtaaagccattgcagcccctgattaaggagcagaagcctaaggaccagagtctggccttatcccctaagctggaatgctcagggacgatactcgcccatagcaacctgaggctgctgggtagctccgacagccccgcatcagctagccgcgtcgcaggcataacaggcgtgtgtcaccatgcccaagaccaagtggccggtgaatgcatcatcgagaaacaaggaaggattcaccctgacctgcagccccataactcgggaagtgaaccctccctgtcccgccagcgccgacagaaaagaagagagcaaaccgagcatcggggagaaaaacgacaggtccgcagagatctctttgcctttcaagaatctcccccaagatttttaccctctcaccctattgtcggcaaggttgacgtgacgtctacacagaaggaagccgagaaccagcgccgagtcgtgaccggttcagtgtccagttctcgcagtagtgaaatgagctcaagcaaagaccggcctctctctgccagagagcggcgacgactgaagcagagccaggaagagatgagctcctctgggccatcagtgcggaaggccagtctctccgtcgccggaccgggaaagccacaagaggaggatcaacctctgcctgcccgtcgcctgagttccgattgtagtgtgacccaggaacggaagcaaatacactgcctgagcgaggacgagttgagctcctccaccagcagtacggacaagagcgatggcgattacggtgagggtaagggccagacgaatgagattaatgccctagtgcagctgatgacccagaccttgaaactcgattcaaaggaatcctgtgaggacgtgcccgtcgccaatccagtcagcgaatttaagctccatagaaaatacagggataccctcattttgcacggcaaggtggcagaggaagctgaagaaattcattttaaggaacttccatctgccatcatgcctggctccgaaaaaattaggcggctcgtggaggtgctgcgaaccgacgtaatccggggacttggagtccagcttctggagcaggtgtacgatctgttagaggaagaagatgaatttgatagagaagttagactgcgtgaacatatgggcgaaaagtataccacatacagcgtgaaggctcggcagctgaagtttttcgaggaaaacatgaacttttag

SEQ ID NO: 232743 - DNA, 942 bp, synthetic construct
  misc_feature 1..942: note = Description of Artificial Sequence: Synthetic coding sequence
  source 1..942: mol_type = other DNA
atggcgggacaaccgggacatatgcctcacgggggaagctcgaacaacctgtgccacaccctgggtccagtgcatccaccggacccccagaggcacccaaacaccctgagctttagatgcagtttggcggactttcagatagagaaaaaaattggccgagggcaatttagcgaagtctataaggccacctgcctacttgatcgaaagactgttgccctgaagaaggtacagatattcgagatgatggatgctaaggcgagacaggattgcgtgaaggagatcggcctgctgaaacagctcaaccatccgaacattatcaagtacctcgatagctttatagaagacaatgagctgaatattgtcctggagctagcagacgcaggcgatctgagtcaaatgatcaagtacttcaaaaagcagaaaaggctgatcccagaacggactgtctggaagtacttcgtgcagttatgctctgctgtcgaacacatgcactctcggagggtgatgcatcgggacatcaaacctgccaatgtattcataacagccacaggggtagtgaagttgggcgatcttggactgggaaggttcttctcatccgaaacgacagccgcacactcactggtgggcacaccctactatatgtcacccgagaggatccacgaaaatggctataacttcaagtccgatatatggagtcttggatgtcttctttacgagatggccgctttgcaatcccccttctatggtgacaagatgaacctcttctccctatgccagaagatagagcagtgtgactaccctcctctgcctggggaacactactccgaaaagttaagggagctggtgagtatgtgcatttgccccgacccccaccaacgtcctgatatcggctatgttcatcaagtcgctaagcaaatgcacatatggatgagttccacttag

SEQ ID NO: 232744 - DNA, 624 bp, synthetic construct
  misc_feature 1..624: note = Description of Artificial Sequence: Synthetic coding sequence
  source 1..624: mol_type = other DNA
atggctggtcagccaggacatatgccccacggaggatcctctaacaatctttgccatactctcggcccagtacacccacccgatccacaaagacaccctaataccttgagcttccgttgctctttagccgatttccaaatagagaagaagatcgggcgaggtcagttctccgaagtgtataaagcaacctgtctgctcgatcggaaaactgtcgctttgaagaaggttcagatctttgaaatgatggatgccaaagcacgacaagactgtgttaaggaaattggactactgaaacagcttaaccatccaaacatcatcaagtatctcgattcatttatcgaggataacgagctcaacatagtcctcgagttggccgacgctggtgacctgagtcagatgatcaaatacttcaagaagcagaagcgtcttattcccgaacgaaccgtgtggaaatacttcgtccagctttgctcagctgtggaacacatgcactcccggcgagtaatgcaccgcgatatcaaacccgcaaacgtcttcataactgctactggtgttgtgaaactgggggacctgggtctcggtaggttctttagcagtgaaactaccgccgcacatagcctgtag

SEQ ID NO: 232745 - DNA, 1044 bp, synthetic construct
  misc_feature 1..1044: note = Description of Artificial Sequence: Synthetic coding sequence
  source 1..1044: mol_type = other DNA
atgcctcgcagagaggtctgctgggaagccgcacatttcagacaagaggagcagtcgctgcctcggccaagggttagggctttagtgcggctcgcttgtaggatggcgggtcagcccggacacatgcctcacgggggttcttcaaataacctctgccatacactcggcccagtacacccacctgacccacagcgccatcccaacacattatcctttcggtgcagtctggcagattttcagattgaaaaaaaaatcggtcggggacagttctctgaagtatataaagccacatgtctacttgaccgtaagacggtcgccctcaaaaaagtccaaatcttcgaaatgatggacgccaaagcgcgacaagattgtgttaaagaaatcggactgctgaaacagctaaaccatccgaatatcatcaaatacctcgactcatttatcgaagacaatgagctaaatatagtcttagagctcgcagatgccggtgacctgagccagatgattaaatattttaagaagcagaagcggctgataccggagcgcacagtgtggaagtattttgttcagctctgttccgcagtggagcacatgcacagtcggagggtgatgcaccgggacattaaacccgcaaacgtgttcattacggctacaggcgtcgtgaaactcggtgacctgggcctcggcaggttcttctctagcgaaaccactgctgcccattctttagttgggacaccgtattatatgtctcccgagagaatccacgaaaatggatacaactttaagtcagacatctggtctctgggctgtctgctctatgaaatggctgccctgcagagccccttttatggggataaaatgaacttatttagtttatgccagaagatagaacagtgcgactaccccccacttcctggtgagcattattcagaaaagttgcgcgaactggtaagcatgtgtatctgtcccgatccgcaccagcgccctgatattgggtacgtccaccaagtggccaaacagatgcacatctggatgtcatctacgtag

SEQ ID NO: 232746 - DNA, 738 bp, synthetic construct
  misc_feature 1..738: note = Description of Artificial Sequence: Synthetic coding sequence
  source 1..738: mol_type = other DNA
atggctggccagcccggacacatgccgcacggcggtagctcaaataacttgtgccacacactgggaccggtccatcccccagatccgcaacaactaaatcacccaaacatcatcaaatatctggatagttttattgaggacaacgagctcaacatagtgctggagctagcggacgcgggtgatctgtctcagatgattaagtatttcaagaagcaaaaacgtcttatccccgagcgcacagtgtggaaatattttgtgcagctgtgctctgctgtggagcacatgcatagcagaagggtgatgcacagggatattaaaccagcaaacgtctttattactgccacaggcgtcgttaaactcggagatctgggcctaggtagattcttttcttccgaaaccacagccgcacactccctggtgggcaccccatactacatgagtccggaaaggatccacgagaacggctacaatttcaagagcgacatttggagtctagggtgcctcctctatgagatggcggctttgcaaagcccattttatggcgacaaaatgaatttattttcactgtgccagaagatcgaacaatgtgattatcctccgttgcctggggaacactacagcgagaaactgcgggagttagtgagtatgtgtatctgcccagacccccatcaacgcccagacatagggtacgtgcatcaagtggccaaacaaatgcatatctggatgtcttccacctag

SEQ ID NO: 232747 - DNA, 942 bp, synthetic construct
  misc_feature 1..942: note = Description of Artificial Sequence: Synthetic coding sequence
  source 1..942: mol_type = other DNA
atggcaggacagcccggtcacatgcctcacggcggtagctccaacaatctgtgccatactttaggccctgtgcatccccctgacccccagcgtcatccgaacacacttagtttccggtgtagcttagcagactttcaaatcgagaaaaaaattggtagaggccagtttagcgaggtgtacaaggccacctgtctgctcgacagaaagactgtcgccctgaagaaggtgcagatattcgagatgatggacgcgaaggccagacaggactgcgttaaggaaatagggctgttgaagcagctgaatcacccaaatataatcaagtatcttgatagctttatagaagataatgagttgaacatcgtcttagagctagccgacgctggtgacctttcacagatgatcaaatatttcaaaaaacagaagagactcattcctgagagaactgtctggaagtattttgtgcaactatgcagcgcagtggagcacatgcattcccggagggttatgcacagggacattaagcctgccaatgtgtttatcacggcaacaggcgtggtaaagcttggagacctcggactaggacggttcttctcatccgagactacagcagcacattctctggtggggacaccatattacatgtctcctgagagaatccatgagaacggctacaactttaaatccgacatctggtctctgggttgccttctgtatgagatggcggcattgcagtcccccttctatggtgacaagatgaatttattttcgctatgtcaaaaaattgagcaatgtgactaccctcctttgcccggagagcactatagcgaaaaactgcgcgaactggtctctatgtgtatctgccccgacccacatcagcgtcctgacatcggctatgttcatcaggtggctaaacagatgcacatttggatgtctagcacatag

SEQ ID NO: 232748 - DNA, 1044 bp, synthetic construct
  misc_feature 1..1044: note = Description of Artificial Sequence: Synthetic coding sequence
  source 1..1044: mol_type = other DNA
atgcctcgtcgcgaagtatgctgggaggctgcccattttcgacaggaggagcaaagtttgccccgaccgagggtgcgggctctggtgaggctggcttgccgtatggctgggcagcccggacacatgccccatggaggctcctccaacaacctgtgtcacacacttggtcccgtccaccccccagacccacaaaggcaccccaacacactgtcctttcggtgcagtctcgccgacttccagatagagaagaagatcggacgcggacaatttagcgaggtgtataaagcgacctgcctgctggatagaaagactgtggcactgaagaaggtccaaatcttcgagatgatggatgcaaaggcgagacaggattgcgtgaaggagattgggctgctgaagcagctgaaccatcccaatattatcaaatatctggactctttcatagaggataatgaattgaatattgtcctagagctggccgatgcaggggacctgtcccagatgatcaagtattttaaaaaacaaaagcgactgatccccgagagaaccgtctggaaatactttgtgcagttgtgttccgccgttgaacacatgcattctagacgagtgatgcatagggatatcaagcctgctaacgtgtttatcaccgctacaggtgttgtgaaactgggtgatctgggcttgggtagatttttctcctctgaaaccacggctgctcacagtctagtaggcacaccatactacatgtccccagagaggatccatgaaaacgggtataactttaagtcggacatttggagcctggggtgtttgttgtacgaaatggcagcactgcaatctccattctacggagacaagatgaatctcttctcgctgtgccagaagatcgaacagtgcgattatccccctttacctggagaacattacagtgagaagctgagagagctggtttctatgtgcatttgccccgaccctcaccagcgacccgacatcggctatgtacatcaggtggcaaagcagatgcatatctggatgtcctccacatag

SEQ ID NO: 232749 - DNA, 663 bp, synthetic construct
  misc_feature 1..663: note = Description of Artificial Sequence: Synthetic coding sequence
  source 1..663: mol_type = other DNA
atggccggtcagcccggacatatgccacacgggggatcatcgaataacctgtgtcatacactggggccagtccatccccctgacccacagagacatcccaacaccctgtcattccgctgctccctcgccgactttcagatcgagaaaaagatcggccgaggacagttcagcgaggtgtacaaagcgacctgtcttctggaccgcaagactgttgcactgaagaaagtccagattttcgaaatgatggacgctaaggccaggcaggactgcgttaaggaaatagggctgctcaagcagctgaaccacccaaacatcatcaagtacctagactctttcatagaggataacgaacttaatattgtcttggagctggcggatgcgggagacctgagtcagatgatcaagtatttcaagaaacagaaaagattgataccagagaggaccgtgtggaaatattttgtccagctatgttcagccgttgagcacatgcatagccgtagagtaatgcatcgcgatattaagccggctaatgtgttcatcactgccactggtgttgtgaagctaggagaccttggtctgggtcggtttttttccagtgagaccaccgctgcacactccctcgtagggaccccctattacatgtctcccgagagaatacactag

SEQ ID NO: 232750 - DNA, 585 bp, synthetic construct
  misc_feature 1..585: note = Description of Artificial Sequence: Synthetic coding sequence
  source 1..585: mol_type = other DNA
atgccaaggagagaggtttgttgggaggccgcacatttccgacaggaagaacagagtttgcctcgccctcgggttcgggctctagtgaggttagcctgcaggatggccggtcagcctggccatatgccccacggcggatcatctaacaatttatgccacacattgggccctgtgcatccccctgacccacaacgccatccaaacactctttcgtttcgctgctctctggcagacttccagatcgaaaagaaaatcggccgtggccaattctccgaagtgtacaaggccacctgcctcctggacaggaagaccgtggctttgaagaaggtgcagatctttgagatgatggatgcaaaggcgaggcaggactgcgtgaaagagatcggactattaaagcaattgaaccacccaaacattatcaagtacttggattcattcatagaggacaacgaattaaatatcgtgctagagttagcagacgcaggcgatctctctcagatgattaaatatttcaaaaaacagaagcggctgatcccagaacgcactgtgtggaaatatttcgtgcagctgtgtagtgcggtgtag

SEQ ID NO: 232751 - DNA, 669 bp, synthetic construct
  misc_feature 1..669: note = Description of Artificial Sequence: Synthetic coding sequence
  source 1..669: mol_type = other DNA
atggcaggacagccaggtcatatgccacacggcggttcatccaataatctgtgccacaccctggggccagtgcatcccccagatccacaacgccatcccaatacattgagtttccggtgctctttggccgacttccagattgagaaaaaaatcggaagaggccagttctcagaagtgtataaggctacttgcctcctcgacagaaagacagtagccctgaagaaagtgcaaatcttcgagatgatggacgccaaggccagacaggattgtgtgaaggagatcggactactgaagcagttgaaccatcccaatatcattaagtacctggattctttcatcgaggacaatgagctgaacattgtacttgagctggcggatgccggagatcttagccagatgataaagtactttaaaaagcagaagcgactgatcccagagcggaccgtgtggaaatattttgtgcaactttgttctgccgtcgagcatatgcacagccgacgagttatgcacagagatattaaaccagccaatgtattcatcactgccacgggagtggtgaaactaggcgatttagggctggggaggtttttttctagtgagacaacagccgcacacagccttgtaggcaccccctactatatgagccctgaacggatccatgagaactag

SEQ ID NO: 232752 - DNA, 660 bp, synthetic construct
  misc_feature 1..660: note = Description of Artificial Sequence: Synthetic coding sequence
  source 1..660: mol_type = other DNA
atggcaggccagcctgggcatatgccccatgggggtagttccaataatttatgtcatacgctggggcctgtccaccccccagacccccagcggcaccctaataccctgagttttagatgtagtctggctgacttccagatcgaaaaaaaaattggtcgcggacagttttccgaagtttataaagcgacatgccttctggaccggaagacggtggcgctgaaaaaggttcaaatctttgagatgatggacgcaaaagcccgacaggactgcgtgaaggagatcggactgttgaaacagttaaaccacccaaacatcatcaagtatttggatagttttatagaagacaacgagctgaacattgtgctggaactcgctgatgcaggcgacctgagccagatgatcaaatatttcaagaaacagaagcgactgatacctgaaaggactgtttggaaatacttcgtccagctttgtagcgctgtggagcacatgcacagccgtagggtgatgcatagggatatcaagcccgctaatgtattcattacggccactggtgtcgtgaagcttggcgacctcggacttggaaggtttttctcaagcgagacgacggcagcccattccttggtcggcaccccgtactacatgagcccagagaggatttag

SEQ ID NO: 232753 - DNA, 516 bp, synthetic construct
  misc_feature 1..516: note = Description of Artificial Sequence: Synthetic coding sequence
  source 1..516: mol_type = other DNA
atggccggacagcctggtcacatgcctcacggcggatccagtaataatttatgccacaccttagggccagttcaccccccagatcctcagcggcatccgaacaccctctcatttcggtgctctttagctgacttccagatcgaaaaaaagatcggccgagggcaattcagtgaggtatacaaagcaacctgtttgctggaccgcaaaaccgtagctttgaagaaagtgcagatttttgagatgatggatgccaaggcaagacaagattgcgtgaaggaaatcgggctcctcaagcagctcaaccaccctaacattatcaagtacctcgattctttcatcgaagataatgagctgaatattgtgctcgagctggcagatgcaggtgatctttctcagatgatcaaatatttcaagaagcaaaaacgtctgattcctgagcgcaccgtatggaagtactttgtgcagttgtgtagcgctgtcgaacatatgcacagccgtagggtgatgcaccgctag

SEQ ID NO: 232754 - DNA, 606 bp, synthetic construct
  misc_feature 1..606: note = Description of Artificial Sequence: Synthetic coding sequence
  source 1..606: mol_type = other DNA
atggccggtcaacccggacacatgccccacggcggatcttccaacaatctttgccataccctcggacccgtacatccacctgatccacagcagctgaatcatccaaatattatcaagtatctggattcatttatcgaagataatgagctgaacatcgtgctggagctcgcagacgctggggatctatctcagatgattaagtactttaagaagcaaaagcgcctcataccagagaggacggtgtggaaatactttgtgcagctctgttcggctgtggagcatatgcatagccgtcgggtgatgcatcgggacatcaagccagcgaatgtgtttattacagccactggggtggttaagcttggagatctgggactgggcaggttcttttcctcagagacgacagccgcacattcactggtgggaaccccctattacatgtcccctgaacggatccacgagaatggttataatttcaaatccgacatttggtctttggggtgcttattgtacgaaatggccgcacttcagtctccgttttatggcgacaaaatgaacctattcagcctctgtcagaagatagagcaatgcgattaccctccactgtag

SEQ ID NO: 232755 - DNA, 1017 bp, synthetic construct
  misc_feature 1..1017: note = Description of Artificial Sequence: Synthetic coding sequence
  source 1..1017: mol_type = other DNA
atggaggctaccgggtgggacagcagatgttcccccggtacccaagtccgcgctctggtgaggttagcatgcagaatggccggtcagcccggacacatgccccacggcggtagctcaaacaacctgtgccataccctgggcccagtacaccccccagacccacagcgtcacccaaataccctgtccttcaggtgctctctggccgattttcagatcgaaaagaagattggcaggggtcagttttctgaagtttataaagcaacctgcctgctcgatagaaaaactgtagccctaaaaaaggtccagattttcgaaatgatggatgccaaagcgaggcaggactgtgtcaaagagatcggcttgctcaaacagctgaaccaccccaacataataaaatacctggattcctttatcgaggacaacgaactgaacatagtgctagagctggcggatgccggagatttatcccaaatgatcaagtactttaagaagcagaaacggcttatcccggaaagaaccgtttggaagtacttcgtgcaattatgctctgccgtggaacatatgcacagcagacgagttatgcaccgagatatcaagccagccaatgtcttcattaccgccaccggcgtcgttaaactgggcgatttgggcctcggcagatttttcagttccgagacaacagccgctcactcattggttgggaccccgtactatatgtcccctgaacggatccacgagaacggctataacttcaagtcagacatttggtccttgggttgcctgctgtatgaaatggctgctctacagtctcccttctacggggataaaatgaatctttttagcctctgccagaagatcgagcagtgtgactaccctccactgccaggcgaacattacagtgaaaagctcagggagctggtaagtatgtgcatctgcccggacccccaccagcggcctgatattgggtacgtgcatcaggtcgccaaacagatgcacatttggatgtctagtacctag

SEQ ID NO: 232756 - DNA, 996 bp, synthetic construct
  misc_feature 1..996: note = Description of Artificial Sequence: Synthetic coding sequence
  source 1..996: mol_type = other DNA
atgggaagacggaggccagctccattcagagccttggtccggctggcctgtcgcatggcagggcaaccaggtcacatgccccacgggggaagttctaataacctctgtcatacccttggtcctgtgcaccctcccgacccccagcgacacccaaatacactgagctttaggtgctccctcgcagacttccagatcgagaaaaagattggccgtggacagttttcagaggtttacaaagctacatgcctgctcgaccgaaaaacagtcgcccttaagaaggtccagatttttgagatgatggacgcaaaggccagacaggattgtgttaaagaaattgggctgttaaagcagctaaaccacccaaatattattaagtacctcgactcatttattgaggacaacgagttgaatattgtgctcgaattggccgatgctggcgacctcagccagatgatcaagtattttaaaaagcagaagaggctcatacctgagcgtacagtatggaaatactttgtacagctgtgttccgctgtggaacatatgcactccagaagggtgatgcaccgggacattaagcctgcaaacgtatttatcacggccacaggagtggtgaagctgggcgatctaggcctgggacgttttttttcaagcgaaacgactgcagcccatagcctcgtggggactccttactacatgtctccggagcgaatccatgagaatggatacaactttaaaagcgacatttggagcctgggctgcctgctgtacgaaatggctgcgctacaatcgccattttacggcgataagatgaacctattcagcctgtgccagaagattgagcagtgcgattacccacctctccctggcgagcactattcagagaaactgcgggagcttgtttcaatgtgtatatgccctgaccctcaccagaggcctgatattggctacgtgcatcaggtcgccaaacagatgcacatttggatgtcatccacctag

SEQ ID NO: 232757 - DNA, 942 bp, synthetic construct
  misc_feature 1..942: note = Description of Artificial Sequence: Synthetic coding sequence
  source 1..942: mol_type = other DNA
atggcaggtcaacctggacacatgccccatggcggatccagtaacaacctctgtcacaccctgggcccagtacacccccctgatcctcagcgtcaccctaatacgttgtcttttaggtgcagtctcgccgacttccaaatcgaaaagaagattggcagggggcagttctctgaggtatacaaagcaacatgtttactcgatcgcaagacagtcgccctgaagaaggtgcagatttttgagatgatggacgccaaggctaggcaagactgcgttaaagagatcgggctgctgaagcagctcaaccatcccaatatcattaagtatctagacagctttatcgaagacaacgagttaaacatcgtcctggaattagctgacgctggggatctgtcccagatgattaaatacttcaagaaacagaagagactcatccccgagcgtacggtgtggaagtacttcgtacaactctgctccgcagtcgagcacatgcactcaaggcgggtgatgcatcgggatatcaagccggctaacgtcttcataaccgctaccggcgtcgtcaaactgggggacctgggcctcggcaggttctttagctccgagaccacagccgctcattccttggtaggaactccctactatatgtcccccgagcgcattcatgagaacgggtacaacttcaagtcagatatatggtcactggggtgtctgctgtatgaaatggctgctttgcagtccccattctatggagataaaatgaacctcttctccctttgtcagaagatcgagcagtgtgattatcccccactaccgggagaacattattctgagaaacttagagagctggtgtcaatgtgcatttgtcccgacccccaccagcgacctgacatcggatatgttcatcaggtcgcaaagcaaatgcatatttggatgtccagtacatag

SEQ ID NO: 232758 - DNA, 942 bp, synthetic construct
  misc_feature 1..942: note = Description of Artificial Sequence: Synthetic coding sequence
  source 1..942: mol_type = other DNA
atggccggacagcccggacatatgccccatggcggttctagcaacaacctgtgccacacgctggggcctgtgcacccaccggatccccagcgacaccctaacaccctctccttcaggtgtagtctcgctgatttccaaatcgagaaaaagattggcaggggacagttttccgaggtctacaaagcaacctgcctcttagacaggaagactgtggccttgaagaaagtgcagatcttcgagatgatggacgccaaggcaaggcaggactgtgtcaaagagattggcctccttaagcaactgaaccacccgaatattatcaagtatttagattcgttcatcgaggacaatgagctcaatatagtgctcgagttagccgacgctggagatctgagtcaaatgatcaaatacttcaaaaaacagaagagacttataccagaacgaacggtgtggaagtatttcgtacaactgtgctccgctgtggaacatatgcattccagacgcgttatgcatagagatatcaagcctgcgaacgtgtttataaccgccacgggggtcgtgaaactgggagacctgggtctgggacgattcttttcatccgagacgaccgccgcacactctctggtggggactccctactatatgtcccccgagaggatccacgaaaatggctacaacttcaagtccgacatttggtccctaggttgtctgctttatgagatggccgctctgcaatctccattctacggagataagatgaacctattcagcttgtgccagaagatcgagcagtgcgactacccccctctgcctggcgagcactattccgagaaactgagggagttggtatctatgtgtatttgcccagaccctcaccagcggcctgacattggatatgtgcatcaggtggccaaacaaatgcatatttggatgtcttcaacatag

SEQ ID NO: 232759 - DNA, 909 bp, synthetic construct
  misc_feature 1..909: note = Description of Artificial Sequence: Synthetic coding sequence
  source 1..909: mol_type = other DNA
atggatgaacagagtcagggaatgcagggtcctccagtgcctcagttccagccccagaaagcccttcggcctgacatgggctacaacactctggcgaacttccgtatagaaaaaaaaatcgggcgtggacagttttccgaagtgtaccgggctgcttgtctgcttgatggagttccagttgccctgaagaaagtgcaaatctttgatctgatggacgcaaaggctagagccgactgcattaaagagattgatctgctcaagcagctgaaccatcccaacgtcattaaatactacgctagcttcatcgaagacaacgagctgaacatagtgcttgaactggcagacgctggggatctgtccagaatgattaagcacttcaaaaagcagaagcggttgatcccggagagaaccgtgtggaaatattttgtccagctatgttcagccctggaacatatgcactctaggcgggtgatgcaccgagatatcaagcccgctaatgtgttcataactgccacaggggtcgttaagttaggggatctcgggctgggcagattctttagctccaagactaccgctgcccactctctcgtcggcaccccttactacatgtctcctgaacgcattcacgaaaacggctataactttaagagcgatatctggtccttagggtgtctgctgtatgaaatggctgccctccaaagcccattttatggggacaaaatgaacctatatagcctctgtaagaagatcgagcagtgcgactacccacctctgcctagtgaccactacagcgaagaacttcggcaactggttaacatgtgcattaacccagaccccgaaaagcggccagacgtcacttatgtgtatgatgtcgccaaaagaatgcatgcatgtactgcctcttcttag

SEQ ID NO: 232760 - DNA, 249 bp, synthetic construct
  misc_feature 1..249: note = Description of Artificial Sequence: Synthetic coding sequence
  source 1..249: mol_type = other DNA
atggacgaacagtcccagggcatgcagggacccccagtaccacagttccaacctcagaaggcactgcgacccgatatggggtataacactctagcaaactttcgcattgaaaaaaagattggacggggacagttcagtgaagtataccgagcagcatgtctgctagacggcgtgcctgtggctctgaaaaaggtccagatctttgatttaatggatgccaaagcgcgagccgactgtataaaggagtag

SEQ ID NO: 232761 - DNA, 99 bp, synthetic construct
  misc_feature 1..99: note = Description of Artificial Sequence: Synthetic coding sequence
  source 1..99: mol_type = other DNA
atggacgagcagagccagggcatgcagggccctccagtgccccaattccagccccagaaagcactgcggcctgatatgggatacaacactctggcttag

SEQ ID NO: 232762 - DNA, 909 bp, synthetic construct
  misc_feature 1..909: note = Description of Artificial Sequence: Synthetic coding sequence
  source 1..909: mol_type = other DNA
atggatgagcagagccagggtatgcagggcccaccggtcccacagttccagccccaaaaggcactgcgaccggacatgggttataacacacttgccaattttcgcatagaaaaaaagattgggcgaggccaattctcagaagtctatcgcgctgcctgcctgcttgacggcgttcccgtagccctcaagaaagtgcagatcttcgacttgatggatgcgaaggcaagagccgactgcattaaggaaattgacttgctgaagcagttaaatcatcctaacgtgattaaatattacgcttccttcattgaagataatgagctgaacattgtccttgaattagcagacgccggtgatctatccagaatgattaaacacttcaagaagcagaaaagactgattcctgaaagaacagtgtggaaatacttcgtgcagctgtgcagtgcactcgaacacatgcacagccgcagagtcatgcatcgagatatcaagccggcaaatgtgtttattacggctactggagtggtgaaactcggagacctgggcctagggaggttcttcagctctaaaaccactgcagctcactcgctggtcggcactccctactacatgtctcctgagcgaatccatgagaacggatacaacttcaaatcagacatatggagtcttggttgcctcttatacgagatggccgcactgcaatcccctttctacggcgataagatgaatttgtattccctctgcaaaaaaattgaacagtgcgattaccctcctctgccatccgatcattacagcgaagagctgcggcagctggtcaacatgtgcatcaatccagatccagaaaagaggcctgatgtaacatacgtgtacgatgttgccaaaagaatgcatgcctgtaccgcctccagttag

SEQ ID NO: 232763 - DNA, 189 bp, synthetic construct
  misc_feature 1..189: note = Description of Artificial Sequence: Synthetic coding sequence
  source 1..189: mol_type = other DNA
atggatgagcagagtcagggcatgcaggggcctcccgtgccccagtttcagccccaaaaggctctccggccagatatggggtacaacacactggcaaattttcggatcgagaagaagatcggaaggggacagttctccgaggtgtatcgcgcagcatgcttactagacggcgtgcctgtggccttgtag

SEQ ID NO: 232764 - DNA, 3729 bp, synthetic construct
  misc_feature 1..3729: note = Description of Artificial Sequence: Synthetic coding sequence
  source 1..3729: mol_type = other DNA
atggaaaagtacgtgcgtctacaaaagattggagagggaagtttcggtaaagccattctggtgaagtctactgaagacggcaggcagtacgtaattaaggagattaacattagtcgaatgtcaagcaaggagcgggaagaatcccggagggaggtggcagtcctcgccaacatgaagcatcccaatatcgtccagtatcgtgaatcgttcgaagagaacggttcactctatatagtgatggattactgcgaaggcggagacctgtttaagagaattaatgcacaaaagggagtgctgtttcaggaagaccagatcctcgattggttcgtgcagatatgcttggcactgaagcacgtccacgaccgtaaaattctgcaccgagacattaagtcccagaacatttttcttacgaaagacggcactgtgcagttgggcgactttggaattgccagggtgctgaattcaacagtcgagctggcacggacctgtattggtacaccctattacttaagccccgagatttgcgaaaacaagccttacaacaacaagagtgatatatgggcgcttggctgcgtcctatacgagttgtgcacattgaagcatgcttttgaggctggcagtatgaagaacctggtgctcaagataatatcagggagttttccccctgttagcctgcactattcatacgatttgcgttcactggtcagtcagctgttcaagcgaaatccccgtgatcgcccatcagtgaatagcatcctggagaagggattcatcgccaaacgcattgaaaagtttctcagtccccaactcattgccgaggaattctgcctcaaaaccttttcaaagttcggttcccagccaatcccagccaaacgccctgcatccggccagaactctatttctgtgatgcccgcacaaaaaataacaaagccagccgctaaatacggcattcctctcgcctacaagaagtatggtgacaagaagctgcacgagaaaaagcccctccaaaagcataaacaagctcaccagaccccagaaaagagggtgaacaccggtgaagaacggcgtaaaatctctgaggaagctgcacggaagaggaggctggagtttatcgagaaggagaagaagcagaaggatcagatcattagtctaatgaaggccgagcagatgaaacgacaggaaaaagaacgacttgagcgcatcaatcgagcgagagagcagggctggcgcaatgtcttatcagctgggggatcaggcgaggtcaaggccccattcttggggtctggaggaactatcgctccttcaagttttagctcgagaggacagtatgagcattaccatgccatatttgatcaaatgcagcagcagcgggcagaagataatgaagctaagtggaagagagaaatatacggccgaggtttgccggagcggcaaaaagggcagctggcagtcgagcgggctaaacaagtcgaggaatttctgcagcgaaaaagggaagccatgcagaataaagcgagggccgagggacatatgggcatcctgcagaacttagcagcaatgtacggtgggagacctagcagttccagaggagggaaaccccgtaacaaggaggaggaggtttatctcgcccgtctgaggcagatcagactgcagaacttcaacgagcggcaacagattaaggccaaactccggggtgagaaaaaagaggcgaaccattccgagggccaagagggcagcgaagaagccgacatgagaagaaaaaaaattgaatcactcaaagcacacgccaatgctcgtgccgctgtattaaaggaacagctggagagaaaacgcaaggaggcctatgaacgcgagaaaaaggtatgggaggagcatctggtcgccaaaggtgttaagtcttctgatgtgtcgccacccttaggacaacatgaaactggtggctccccctctaagcagcaaatgcgatcagttatctcagtcacgagcgccctcaaggaggttggggttgactcttccttgaccgatacgagagaaacgagtgaagagatgcagaaaactaacaatgctatttccagcaaacgtgaaattctacgtaggttaaatgagaatctcaaagcacaggaagatgaaaaaggcaaacagaacctgtccgatactttcgagattaatgtgcatgaagacgccaaggagcatgaaaaggaaaagagcgtcagcagcgaccgcaaaaaatgggaagccggaggtcagctagtgatcccgttggacgagctgaccttggacacctctttttctaccaccgagaggcacacagtcggtgaggtgattaagctgggacctaacggcagccctagacgcgcatgggggaaaagccctactgattctgtgctcaaaatccttggcgaagctgagctgcagcttcagactgagctgctagaaaacacaacaattaggtccgagatatcgcctgaaggcgaaaaatacaagcccttaatcactggcgagaagaaggtgcaatgtatttcacacgaaattaaccccagtgccattgttgacagtcccgtagaaactaagtccccagagttttcagaggccagtccccagatgtcacttaaactggaaggcaacctagaggagcccgatgatctcgaaaccgaaattctgcaggagcctagtggaaccaacaaggatgagtcactgccttgtacaatcactgatgtatggatatcagaggaaaaagagactaaagaaacccagtcagctgatcgtatcacgatccaggaaaatgaggtgtctgaagacggagtgtcatctaccgtcgatcagctgtcagatattcacatagaaccaggtactaacgactcacagcatagcaaatgcgacgttgacaaaagtgtccagcccgaacctttttttcataaagtggtgcactcagagcaccttaacctggtgcctcaggtgcaaagcgttcagtgctcgcccgaggaaagtttcgcatttagaagccatagccacctccctcccaaaaataagaataaaaatagccttttaatagggttatctaccgggctgttcgatgcaaataatcccaaaatgctccggacttgctcccttcctgatctgagcaaattattcagaaccctgatggatgtgccgacagtgggagacgtgcggcaggacaacctcgagatcgacgagattgaggatgagaacattaaagaagggccttcggacagtgaggatatagtgttcgaggaaactgacaccgatctgcaggagctgcaagcttcaatggagcagttgctgcgtgagcagcctggtgaggagtactcagaggaggaggaaagtgttctgaaaaactccgatgttgaacccactgccaacgggactgacgtggctgatgaggatgataaccccagctctgagtccgctctcaatgaggaatggcattccgataacagcgatggtgaaatagccagcgaatgcgagtgtgatagcgtgttcaaccatctggaggagctgagacttcacttggagcaggagatgggttttgagaagtttttcgaggtgtatgagaaaattaaagctattcacgaggatgaggacgagaacatagaaatttgttccaagatcgttcagaacatcctggggaacgagcatcagcacctgtacgcgaagatcctccatctcgtgatggccgatggcgcataccaggaagacaacgatgaatag

SEQ ID NO: 232765 - DNA, 1800 bp, synthetic construct
  misc_feature 1..1800: note = Description of Artificial Sequence: Synthetic coding sequence
  source 1..1800: mol_type = other DNA
atgttgaagttccaggaggctgcaaagtgtgtgtcaggatctaccgccatcagtacatatcccaaaacactgatcgcaaggcgatatgtcctgcagcagaagttaggatctggctcattcggaaccgtttatcttgtttccgacaaaaaagcaaaaaggggagaggagctaaaagtgcttaaagaaatcagtgtgggagagctgaatcccaatgagaccgtgcaggctaatctcgaagcacaactgttgagtaagcttgaccacccggcaatcgttaagtttcacgcgtcatttgtcgaacaagataacttttgcattataaccgagtactgtgagggcagagacctggatgataagatccaggagtataaacaggcgggaaagatcttcccagagaaccagatcatcgaatggttcatccagctgctcctaggagtggactacatgcatgagagacgaattttgcaccgtgacttgaaaagtaaaaacgtgtttctgaagaataaccttttaaagatcggagacttcggcgtctcccggcttttgatgggttcctgcgatctggcaacaaccctgacagggactccccattacatgtcccctgaagcattgaagcaccagggctacgatactaagagtgacatatggtcactggcatgcattctgtatgagatgtgctgtatgaatcacgcatttgccggttccaatttcctgtccattgtgctgaagatcgtggagggagacaccccctctctgcctgaacgctatcccaaggagctgaacgctatcatggagtccatgctcaataagaatccctcgctacgccctagcgcaattgagatactgaaaatcccatacctggacgaacagctccagaacttaatgtgcagatactctgaaatgacactagaggacaagaaccttgactgccagaaggaagctgctcatataatcaatgcaatgcagaagaggattcatcttcagaccctgcgtgccctaagcgaggtgcaaaagatgacccctagggagcggatgagattgcggaaattacaggccgctgatgagaaggctcgcaaactgaaaaaaatagtagaggagaagtacgaagaaaattctaagcgcatgcaggaactgagaagtcggaatttccagcagctctctgttgatgtgttgcacgaaaaaacacacctaaaaggaatggaggagaaagaggaacagccggaaggcagactcagttgcagcccacaagatgaggatgaggagcggtggcagggtagggaagaggaatcagacgaacctaccctggaaaatttacctgagagtcagccaatccctagcatggacctccacgaattggaaagcatcgtcgaggatgccaccagtgatctggggtaccatgagatccccgaggatcccctcgtcgctgaagaatactacgccgacgctttcgattcctactgtgaggagagtgacgaggaggaggaggagattgcgctcgaaaggcccgagaaggaaatccgcaacgagggctctcaaccagcctacagaaccaaccaacaggacagtgatattgaagccttagcaaggtgtctcgaaaacgtgcttggctgcacgagtctagaccaaccttgtcgaagttgggggcagaaatacttgaaaaggagcatcattacaagccgggaacagggaatcaggatgcttgccaaacagcgcagcgctagtgtgtggaagaagtggtgcttaaaaccagcaaccgtcctaaaatggacctcatcttgtaccctgaaatcttcttgctag

SEQ ID NO: 232766 - DNA, 459 bp, synthetic construct
  misc_feature 1..459: note = Description of Artificial Sequence: Synthetic coding sequence
  source 1..459: mol_type = other DNA
atggacagcggaacggaagaatatgaacttaatggcggactcccgccagggacccccggatcccctgacgcaagcccggctcgatggggctggagacacggccctattaacgttaatcactacgcatccaaaaagagcgcggcagagtcaatgctggatatcgctctgctgatggccaatgcatcacagctgaaggctgttgtggaacagggtcctagtttcgccttctacgtgccacttgtcgtgttaatcagcatctccttggtactgcagatcggggtgggagtacttctgatcttcctggtaaaatatgatctaaacaaccccgcaaagcacgcaaagctcgactttctgaataacttagctacaggcctcgtgttcattatcgtggtggtgaacattttcatcactgccttcggagtgcagaagccccttatggacatggccccacagcagtag

SEQ ID NO: 232767 - DNA, 567 bp, synthetic construct
  misc_feature 1..567: note = Description of Artificial Sequence: Synthetic coding sequence
  source 1..567: mol_type = other DNA
atggctggtctatctagacaattgtgcgccctgtctcacccgaagaaagcggcagaaactcagacagccgaacccggaggggctcatgccgtgtgctctcggcaccccgtaagagtgaagggactggagggctccgagatggagagtgccagggaaaatatagatttacagcccggatcttctgatccacggagccaaccaattaatctaaatcactacgcaacaaagaagtctgtggcagaatccatgctcgacgtggcgctgttcatgagtaacgcgatgcggttgaaagcggtgctggaacaagggccaagctcccactactatacaacattagtgaccctcatttccctaagcctactgctccaggttgttatcggtgtgctgctagtggtcatagccagattgaatcttaacgaggtagaaaagcagtggcgccttaatcaactcaataacgctgccacgatcttagtgttcttcaccgtggtgatcaacgtgtttatcacggcgttcggagcacacaagaccggctttctcgccgctcgtgcatcgaggaaccccctctag

SEQ ID NO: 232768 - DNA, 273 bp, synthetic construct
  misc_feature 1..273: note = Description of Artificial Sequence: Synthetic coding sequence
  source 1..273: mol_type = other DNA
atgcttgacgtcgcgttgttcatgtctaacgctatgcgtttaaaagctgtgcttgagcagggaccaagtagccattactataccactctcgtgacactcattagtttatctttgctgctccaggtcgtcatcggggttctcctcgtggtgattggagaggaaccaagtcttcagagtgacttgctccctcgccatccctggctggcagaacgccctcacgtgagcccgggacctccatgcatcggaaccggatcctttgcaaccacccggtag

SEQ ID NO: 232769 - DNA, 1401 bp, synthetic construct
  misc_feature 1..1401: note = Description of Artificial Sequence: Synthetic coding sequence
  source 1..1401: mol_type = other DNA
atgccaggcgacagctctcccggtacacttccgctatgggacgcttccctgagtcccccactgggcccagatcccggaggattttcacgggcaagtcatgccggtgataaaagtcgaccccctgccccagagttgggctctcccggtgccgtccggccaagagttggttcgtgcgcacccggtccaatggagttaagagtttccaacacatcatgtgaaaatggttcactgctgcacctatattgctctagtcaggaggtgctgtgccagattgtgaatgatctcagtcccgaagtgccttccaacgccacttttcattcctggcaggaaaggatacgacagaattacggtttttacattggactaggactggcatttttgtcttcttttcttatcgggagctccgtaatcctgaaaaagaaggggctactgcgcttagttgccactggcgcaacgcgggctgtggacggtggcttcgggtatctgaaagacgcgatgtggtgggcgggattcctaacaatggccgctggtgaggttgccaattttggtgcgtacgccttcgctcccgctactgttgtcacgcccctgggagcattgagcgtcctaatcagtgccattctgtccagttatttcttgcgagaatccctgaatcttctggggaaactgggatgtgtcatttgcgtggcgggatcaactgtgatggtaatacatgccccagaggaggagaaagtcaccactattatggagatggccagcaagatgaaggacacgggcttcattgtgttcgcagttctgttgctcgtcagctgtctgatccttatcttcgtgatcgcccctaggtacgggcagcgcaacatccttatttacatcattatctgttccgtgatcggcgcattctccgtggccgctgttaagggcctcgggattaccataaagaatttttttcagggccttcctgtagtgcgacaccccttgccgtatattctgtctcttattttggcgctgtctttgagtactcaggtgaattttttaaatcgggctctcgacattttcaatacatccctagtgtttcccatttactatgtttttttcaccacagtggttgtgacaagctctatcattctgttcaaagaatggtattccatgagcgccgtggacatcgcaggcacactctccggcttcgtcacaattattctgggggtctttatgctgcatgcctttaaagatctggacatctcatgcgcctcactgccccacatgcataagaaccctcccccaagccctgctcccgaaccgactgtgatccgtctggaggacaagaatgtcttagtggataacatcgagctcgcctccacctcaagtcctgaagagaagcctaaggtttttattattcactcctag

SEQ ID NO: 232770 - DNA, 1344 bp, synthetic construct
  misc_feature 1..1344: note = Description of Artificial Sequence: Synthetic coding sequence
  source 1..1344: mol_type = other DNA
atgcccggagacagttctcctggaactctcccactctgggacgcaagtttatctcccccacttggtcccgatccaggcggattctcacgcgctagccacgcaggcgacaagtcccggcctccagccccagagctggggtccccgggtgcagtcaggcccagggtcggcagctgtgcaccgggtccgatggagctccgggtgagcaacacctcatgtgaaaatggctccctgctgcatctttactgttcctcccaggaggtgctttgccagattgttaatgatttatcaccagaagtaccaagcaacgccaccttccatagttggcaagagcgtatccgccagaactacggcttctatatcgggctgggcctggcatttttaagctccttcctgataggcagttccgtgattcttaagaagaaaggcctgcttagacttgtggccaccggcgcaacccgggcagtggcagcaggggaagtcgcgaactttggcgcttacgccttcgcccctgccaccgtggtgaccccgcttggcgcattgtcagtcttgatttcagcaattcttagctcctattttttgcgagagtcactgaatctattggggaagttgggctgtgttatttgcgtagcagggagcaccgtgatggtaatccatgctcctgaggaggagaaggtgacaacaatcatggaaatggccagcaaaatgaaggacactggatttattgttttcgccgtcctgctactcgtaagctgccttatcctcatatttgtgatcgcaccccgatatgggcagcggaatatcttaatttacattatcatctgctcagtcataggcgctttcagtgttgccgctgtgaaagggcttggcattacaataaagaatttctttcagggcctccctgtggtcaggcaccccctgccctacatcctgagtttaatcctggctctatctctgtccactcaagtcaatttccttaatcgggcattggacatttttaatacttcccttgtcttcccaatttactacgtctttttcaccactgtggtggtgaccagctcaattatcctgtttaaagagtggtattccatgtctgctgttgatattgccggaactctaagcggtttcgttacgatcattctcggtgtgttcatgctgcacgcattcaaagatctcgatatctcctgtgcatcactccctcatatgcataagaacccaccaccttcccccgctccagagcccacggtgatccgccttgaggacaagaatgtgctcgttgacaatattgaactcgcctccacttctagccctgaagaaaaacccaaggtgtttataattcactcctag

SEQ ID NO: 232771 - DNA, 8415 bp, synthetic construct
  misc_feature 1..8415: note = Description of Artificial Sequence: Synthetic coding sequence
  source 1..8415: mol_type = other DNA
atgaatggggacatgcctcacgtcccaattacgacacttgccggtatcgccagtctgaccgatctgctgaaccagcttcccttgccctccccccttccagccacgaccacaaaaagcctccttttcaatgctaggatcgccgaggaggtgaactgtctgttggcttgtcgcgatgacaacctagtgagtcaactcgttcacagtctgaaccaggttagtaccgaccacatcgaactgaaggataatttaggttctgatgatccggaaggtgacatccccgtgctgctccaggcggtgctcgccaggtcacctaacgtctttcgggaaaaatccatgcagaaccgatatgtccagtcaggtatgatgatgagtcagtacaaattgagccagaattcaatgcattcctcgccagctagttccaactaccaacagacgacaatcagccattctccttcatctcgcttcgtccctccacagacttcctccggtaaccgtttcatgccacagcagaactctcccgtacctagcccatatgcccctcaaagcccagctggatatatgccgtattcgcaccctagctcctacaccactcatccacaaatgcagcaggcctcggtgtcatcccccattgtggcgggaggcttacggaatatccacgacaataaggtgtccggacccctctcaggtaactcggcaaaccaccacgcagataaccctcgtcacggaagttcggaggattatctccacatggtgcacagactgtccagcgatgatggggactcctccactatgcgcaatgctgcctcatttccacttcgaagccctcagccggtctgttctccagcaggaagcgagggcacacccaaaggcagtcgacctccactgattttgcagtcacagtccttgccctgttcctcacccagagacgttccccctgacatcctgttggattctcccgaacggaaacaaaagaaacaaaagaagatgaaattaggaaaggacgaaaaggagcagagtgagaaagcggcaatgtacgatattatttcaagtcctagtaaggatagtacgaaactcaccctcaggctgagcagggtgaggtcctcggacatggatcagcaggaggatatgatttccggggtggaaaatagtaacgtgagtgaaaacgacattccgttcaacgttcagtatcccggacagacatccaaaaccccgattacccctcaggatatcaatcggcctctgaacgccgcacaatgtctgtcgcagcaggagcagaccgccttcctccccgcaaaccaggttccggttttgcagcagaatacttccgtggcggcaaaacagccacagaccagcgtggtccagaatcagcagcagatctcacagcagggtccaatatatgatgaagtggagctcgatgcccttgcggagatagaacgaatcgaacgagagtcggctatcgagcgtgaaagatttagtaaagaagtacaggataaagataaacccctgaaaaagagaaagcaggattcctaccctcaagaggctggcggagctacaggcggaaataggccagcctcccaagaaaccgggtctacgggtaacggttcacggcctgccctgatggtgagcatagacctgcatcaggctggtcgcgtggattcacaagccagcattacacaagattcagactctatcaaaaaacctgaggaaatcaagcaatgtaatgacgccccagtcagcgtcctgcaagaagatattgtcgggagtcttaaatccacccctgaaaatcaccccgagaccccgaagaaaaagtcggatcccgagctgtcaaaatcagagatgaagcagtctgagagtcgccttgctgaatccaaacctaatgaaaaccggctcgttgagactaagtcctccgagaataagctcgagaccaaggtcgagacacaaacggaagagctgaagcagaatgaatccagaacgaccgagtgcaagcaaaacgaatccaccattgttgaacccaaacagaatgagaataggttatctgacacaaagccaaacgataacaagcagaacaatggccgatccgagactacaaagtcccgtccagaaactccaaaacaaaagggggaaagccgcccagaaactccaaagcagaaatctgacggtcaccctgaaacaccaaagcaaaaaggagacggaagacctgagacgcctaaacaaaagggagaaagccgcccagaaacaccaaaacagaagaacgagggccgtcctgaaacgcctaaacaccggcacgataacagacgcgactcaggaaaaccctcaactgagaagaaaccagaggtgtccaagcataagcaggacaccaaaagcgattcccctaggttaaagtccgagagggcggaggcgttaaagcaacgccctgacgggagatctgtgtctgagtccttgcgccgtgatcacgataataaacagaaaagcgacgaccgcggagaaagtgagcggcacagaggcgaccagtcccgagtgaggcgccctgaaaccctcagaagcagttcccgcaatgagcacggcatcaaaagcgattcatcaaagacagacaaactggaacggaagcaccggcacgagagcggagactcgagagaacggccttcatctggcgagcagaagagtagacctgattcgcccagggttaagcagggagatagcaacaagtctaggagcgacaagctggggttcaaatcgcccacttctaaggatgataagcgtacagagggcaataagagcaaggtggacactaacaaagcacatcctgacaacaaagcagagtttccttcataccttcttggcggtcgcagcggagccctaaagaactttgtgatccccaaaattaaaagggataaggacggcaatgtgacacaagaaactaaaaaaatggagatgaagggtgagccgaaggacaaagtggagaagattggacttgtggaagatctcaacaagggcgctaaaccggtggtggtgttgcaaaagctgtcactggacgatgtgcagaagcttattaaagatcgtgaggacaaaagtcggtcttcccttaagccaatcaagaataaaccatccaagtcgaacaagggcagtatcgatcagtcggttctaaaggaactgccgccagagctgctggctgaaatcgagtcaacgatgccactatgcgagcgagtgaaaatgaacaagcgcaagcggtcaacagttaacgagaaacctaaatatgctgaaatttcatctgatgaggacaatgattccgatgaggcctttgagtcaagcaggaagcgccataaaaaggatgacgataaggcctgggagtacgaggaacgagaccgaagatccagtggcgaccacagacgatccgggcattcacacgaaggcaggaggagcagtggcggtggacgatacagaaaccggagtccatctgatagcgacatggaggactacagtcctcctcccagcttatcagaggttgcaaggaaaatgaaaaaaaaggaaaaacagaaaaaaaggaaagcttatgaaccgaagctcacacccgaagaaatgatggattcaagtactttcaagagatttactgcctctattgagaacattttggacaatttggaggacatggattttacagctttcggcgatgatgatgagattccccaggagttacttctgggaaaacatcagctcaatgaactgggctcagagtccgctaagattaaagcgatgggaatcatggataaactgagcacagacaagactgtgaaggtactgaacatactggaaaaaaacattcaggatggaagtaaactgtccaccctcttgaatcacaataatgacaccgaggaagaggaacggctctggagagatctcattatggaaagggtgactaagtctgccgatgcttgtctgacaaccatcaacatcatgacctcccctaacatgcctaaggctgtgtatattgaggatgtaatcgaaagagtgattcagtacactaagttccacctacagaatacattatacccccagtatgaccccgtttacaggctagatccccacggagggggtctcctgagttctaaagccaagcgagcaaaatgcagtacccataaacagagagtgatagtcatgttgtataacaaagtatgcgatatcgtctcaagtctcagcgaactgctcgagattcaattactcaccgacacgaccatcctgcaggtgtcttctatgggcattactcccttttttgttgaaaacgtgagcgagctgcaactgtgcgccattaagctggtcacagccgtcttctcccggtatgaaaaacatcgccagctgattctcgaggagattttcacctcactcgctagactacccaccagcaaaagatcactgaggaattttagattgaacagttctgacatggacggcgagccaatgtatatacagatggttaccgccctcgtgctgcagctgattcaatgcgtcgtccacctcccatcttctgaaaaggattccaatgcagaagaggattccaataaaaaaatagaccaggatgttgtgatcaccaacagttacgagacagcgatgaggactgcgcagaactttctaagtatcttcctgaaaaaatgcggcagcaaacaaggggaagaagactacagaccgctgttcgaaaactttgtccaagatctcctctcaactgtgaacaagccagagtggcctgcagctgaattgctgctttcccttctgggacggctgcttgtacaccagtttagcaacaaaagtactgaaatggccctgcgtgtggcctccttggattacctcgggactgtggctgcccgtctgagaaaggacgcagtgacttccaaaatggaccaggggtccatagaacgaatcctgaagcaagtttcaggaggggaggatgagatccaacagctgcagaaagcattactggattatctagatgaaaacaccgagaccgatcctagcctcgtgttctcccggaagttttatatagcacagtggttcagggacacaaccctcgagacagagaaagctatgaaatcccagaaggacgaggagtcttcagagggaacccaccacgcaaaggaaatcgaaactacaggacagattatgcatagagcggagaacaggaagaagtttctcaggtccattataaagaccaccccaagccagtttagcacactcaaaatgaactccgacaccgtggattatgacgacgcttgcctcattgttagatacctggcctctatgcgcccttttgcccagtcctttgatatctatcttacccagattctgagggttctcggcgagaatgctattgctgtccggaccaaggccatgaaatgcttgtctgaagtggtggccgttgacccttcaatcctggctcgcctggacatgcagcggggagtgcatggacgactcatggacaacagcacttccgtgagggaagcagccgtggaattgctgggacgattcgtgttgtgtcgacctcagttagcagaacagtactacgatatgttaatagagcgcatactcgataccgggatttccgtgcggaagagagtgattaagattcttagagatatttgcattgaacagcccacattcccaaaaattactgaaatgtgtgtcaagatgatccggagggtcaatgatgaagagggaataaagaaacttgtgaacgagaccttccagaagctctggttcactcccaccccacataatgataaagaagccatgactcgcaaaatcttgaatatcaccgatgttgtggccgcttgcagggacaccgggtacgactggttcgagcagctcctccagaatctgctcaagtcagaagaggacagctcctataaacccgtaaagaaggcctgtacccagctggtagacaatctcgtggagcacatcttgaagtatgaagaaagcctcgctgactcggacaataaaggggtgaattcgggaagattggtggcctgtataaccactctctttttgttcagtaaaattagacctcagctgatggtcaaacacgccatgacaatgcagccttacctgacaactaaatgcagtactcagaatgacttcatggtaatctgtaacgtggcaaagatcttagagctcgttgtgcctctgatggaacatccaagcgagacattcctagcgaccattgaggaggaccttatgaaacttattataaaatacggcatgacagtggttcaacactgtgtgagctgtctcggagccgtcgtaaacaaagtgacacagaatttcaaattcgtctgggcatgcttcaatcgctactacggcgcaatttccaagctgaaatctcagcatcaggaggatccgaataatactagtctactgacaaacaagcctgccttactcaggtcactcttcactgtcggtgccttatgccggcatttcgactttgatctcgaggatttcaagggaaacagcaaggtgaacatcaaggataaagtgctggagttactcatgtactttactaaacactccgacgaggaagtgcaaactaaggccatcatagggctgggattcgcattcatacagcatccatccttaatgttcgagcaagaggtcaaaaacctgtacaacaacattctgagcgataagaattcatccgtaaatctgaagatccaggtgctgaaaaaccttcagacttatttacaggaggaagacaccagaatgcagcaggcagatcgggattggaagaaagtggcaaagcaggaggacctaaaggagatgggggacgtgtcttctggcatgtctagcagcatcatgcagctgtacttaaaacaagtactcgaggccttctttcatacgcagagtagtgttcgtcattttgccctcaatgtcatcgccctgacgctgaaccagggcctgatccacccagtgcagtgtgtgccttacctgattgccatggggactgatcccgagcccgcaatgagaaataaggcagaccaacaattggtagagattgataagaagtacgccggtttcatccatatgaaagctgttgccggaatgaaaatgagttatcaggtacaacaggcgatcaacacttgtctgaaggaccctgtccgcggattccggcaggacgaatcttcgtcagcactgtgttcccatttgtacagtatgatcagaggtaacaggcagcataggagagccttcctcataagcctcctgaacctctttgatgatactgctaaaaccgatgtgaccatgctgctgtatattgcagataacctcgcgtgttttccctatcagacgcaggaggagcctctgttcataatgcaccacatagatatcacattgtctgtctccggttccaatcttctgcaaagctttaaagaatctatggttaaggataaacgcaaagagcgcaagtcctcacccagcaaggaaaacgaaagttcagactctgaggaagaggttagtagaccacgcaaaagccggaagagggtagatagtgattcggattccgatagcgaggatgacatcaatagcgtaatgaaatgccttcccgaaaattctgcgcctctgatcgagtttgcgaacgtgtctcagggcatcttgcttcttctgatgctcaagcagcacttgaaaaatctttgcgggttttcggattctaagattcaaaaatactcaccatccgaaagtgctaaagtgtatgacaaggccattaaccggaagacaggagttcacttccaccctaagcaaactcttgactttcttcgctcagatatggccaattctaagatcaccgaggaagtgaaaaggtccattgttaagcagtacttggattttaaattacttatggagcatttggaccctgatgaggaggaagaagaaggagaggtatcagctagtactaatgctagaaacaaggccatcactagcctcctcggcggtggctcacccaagaacaatacagcagccgagacagaggacgacgagtcagacggagaggatagaggtggtggcacatccggatcactgcgcaggtccaagaggaacagcgatagtaccgaactagcagcccaaatgaacgagtctgtagacgtcatggatgtaatcgccatctgctgcccaaaatataaggaccggcctcagattgccagagtggtacaaaagacatcctctgggttttctgtccagtggatggcaggatcttatagtgggagctggacagaagccaagcgcagggatggtcggaagctggtgccttgggttgatacaatcaaggagagcgacataatctacaaaaaaatcgcgctcactagcgctaataaactgactaacaaggtggtgcagactctgcgatccttgtacgccgcaaaagacgggactagctcgtar

SEQ ID NO: 232772 - DNA, 8093 bp, synthetic construct
  misc_feature 1..8093: note = Description of Artificial Sequence: Synthetic coding sequence
  source 1..8093: mol_type = other DNA
atgaacggcgatatgccccacgtgccaatcaccaccctggccggtatagcctcactgacagacctcctgaatcaactgccactccctagtcctcttccggctacgaccaccaaatccttgttatttaacgcgagaatagcggaggaggttaactgtctcctcgcctgtagagacgacaacctggtgagccagttggtgcattccctgaatcaggtgtcaacagaccatatcgagctgaaggacaatttgggtagcgacgaccccgagggcgatattccagttctgctgcaggccgtgttggcccgatctccaaatgtgttccgggaaaagtcaatgcagaatcggtacgttcagagtggcatgatgatgtcccagtataaactgagtcagaattcaatgcatagcagccccgcttcttctaattaccagcaaaccactatttctcactcaccatccagtcgtttcgttcctcctcagaccagcagcggcaacaggttcatgcctcaacaaaattctcctgtcccaagtccctacgcacctcagagtccagccggatacatgccttactcacatccctcctcttataccactcacccacagatgcaacaggcctccgtctcaagccccatcgttgccggtggactgcgcaacattcacgataacaaagtgagtgggcctttatcaggtaattcggctaaccatcacgctgacaatccaagacacggctctagcgaagattatctgcatatggtgcatcgcttgagctctgacgacggcgactcaagcaccatgcgtaacgccgcatcctttcctctgcgttcgccccagcccgtctgttctcccgctggctcggaaggtacacctaagggatctagaccccctctgattctgcagagccagtccttgccgtgttccagtcccagagacgtccccccagacatcctcttggattctccagagcggaagcaaaagaagcaaaagaagatgaaactcgggaaggatgagaaggagcagagtgagaaagctgccatgtacgatatcattagctcgccatctaaggacagcaccaagctcacccttcggctctccagggtgaggagttcagacatggaccaacaggaggacatgatttctggcgtggaaaactctaacgtgtccgagaatgatatcccgttcaacgtacagtacccaggacaaacgagcaagacccctattacaccccaagatattaatcgcccactcaacgctgcccaatgcctaagccagcaggagcagaccgcgtttctgccagctaatcaggtaccagtattgcaacagaacacatcggtagcagcgaagcagccacaaacatcagtcgtgcaaaatcaacagcagatttctcagcaaggccctatctacgatgaggttgagctggatgcactggccgagatcgagagaatcgaaagggagtccgctatcgagcgcgagaggttttctaaagaggtgcaagataaagacaagcccctgaagaaaagaaaacaggactcatatccccaggaagctggcggagcaacaggaggaaaccgcccagcctcccaagagacggggagtaccggcaatggtagtaggcccgctctgatggtgtccattgacttgcaccaggccggacgggtcgattcacaggccagtatcacacaagactcagacagcataaaaaagcccgaggaaattaagcagtgtaatgatgctcccgtgagcgtgctgcaggaggacatagttgggtctctgaaatctacccccgagaatcatcccgagacacctaagaaaaagtcagatcctgaattatctaagtctgagatgaaacagagcgaaagccgactggccgagtctaagcctaacgagaacaggttagttgaaacaaaatcatccgagaataagctggagactaaagtcgagacacagacagaggaattaaagcagaatgagtcccgcaccaccgaatgtaagcagaatgaatcgacgattgtcgaacccaagcagaatgagaataggctgtccgatacaaagcctaacgataacaaacagaacaatggcagatcggagactactaaatcccgccctgagactccaaaacagaagggcgagtctagaccggagacgcccaagcaaaagagcgacggccatcctgagaccccaaagcagaaaggagatgggaggcctgagactcctaagcaaaagggtgaatcgcgtcccgagacgcccaagcagaagaacgaggggaggcccgagaccccaaaacaccgtcatgataatcgtcgcgactccggcaagccaagcaccgaaaagaaaccagaggtatctaagcacaagcaggacacaaaatctgacagtcctagacttaaaagcgaaagagccgaggcccttaagcagcgaccagacggacggagtgtaagcgagagcctgagacgggaccacgacaataagcagaaaagcgacgaccggggtgaaagcgaacggcacagaggagatcagagtagggttcgacggccagaaacattgcgaagcagctccaggaacgagcacggcataaagtctgacagctctaagactgacaaactggagagaaaacacaggcatgaaagcggcgactcaagggaaagaccctcttccggagagcagaaaagtcgcccagactcccccagggtcaagcagggcgactcaaataagagccgatctgacaagctcggtttcaagtcccctaccagcaaagacgataagcgcaccgaggggaacaagtctaaggtagatacgaacaaagcacacccagataacaaggccgagttccctagctatttgctggggggtagaagcggcgctctaaagaacttcgtcatccccaagattaaaagggacaaggatggaaatgtcacacaggagaccaagaagatggagatgaaaggagaaccgaaagataaggtcgaaaagattgggctcgttgaggaccttaacaagggagccaaacctgtggttgtcctacaaaaactgagcctggatgacgttcagaaactgattaaagaccgggaagacaagtcgcggtcaagtcttaagcccatcaaaaacaaaccatccaagagtaataaagggagtatagaccagtcagtcctgaaagaactcccacctgagctcctggcagagatcgaaagcacaatgccactgtgtgaaagggtgaagatgaacaaacggaagcgcagcaccgtgaacgagaaaccaaaatatgcggagatatccagcgacgaggataacgattcagacgaagctttcgagagctccagaaagcgacataaaaaagatgatgacaaagcttgggaatacgaagagcgggacaggagatcctccggcgatcatcgcaggagtggtcactcacatgaagggagacgcagcagcggaggtggaagatatagaaaccgaagtccatccgatagcgacatggaggactattctcctccgccttctctctctgaggttgcaagaaagatgaagaaaaaagaaaagcaaaagaagcgaaaagcatacgagcccaaacttacccctgaagagatgatggactcctctactttcaaacggtttacggcctcaattgaaaacatcctggacaacctggaggacatggactttacagcttttggcgacgatgatgaaattccacaggagctcttgctgggaaagcatcaacttaatgagctgggttctgagtccgcaaagataaaagccatggggatcatggacaaattgtcaaccgataagactgtaaaggtcctgaacattctggagaagaacatccaggatggtagcaaactgtctacattgctgaatcacaataacgacaccgaggaggaggaacgactctggcgggatctaatcatggagagggtcaccaaaagcgccgacgcctgcctgacaacaattaacatcatgactagtcctaatatgccgaaggcagtttacatcgaggacgtcatcgagagagttatccagtacaccaagtttcatctacagaacaccctgtacccgcaatatgatccagtgtaccggttggaccctcacggaggaggcctgctgtcttctaaagctaaacgcgcaaaatgctcaacacataagcagagagtaattgtaatgctttataataaagtctgcgacatagtgagcagtctaagcgaactgttggaaatacagctgctgacggatacaaccatcctgcaggtgagttcaatgggcatcacacccttctttgtcgaaaacgtaagcgaattacagttatgtgctattaagcttgtcacagcggtgttctccagatacgagaagcacagacaactgatcttggaagagatctttacctccctcgctcggcttcccactagtaagcgctcgcttaggaatttcagactgaactcatccgacatggatggggagcccatgtacattcagatggtcaccgcattggtcttgcagttgattcagtgtgtggtccacttgccgtcaagtgaaaaagactccaatgctgaggaagactcaaataagaaaatcgatcaagacgttgtgattactaactcatacgagacagcaatgcggacagcccagaattttctgtctattttcctaaaaaaatgtggctccaaacaaggcgaggaggactatagacccctctttgagaactttgttcaagacctgctgagcactgtgaataagcccgaatggccggctgcagaactgctgctgtccttactgggcaggctgctggtgcaccagttttctaataagtcgactgagatggccttgcgcgttgcgtcactggactacctgggaactgttgccgctcgcctgaggaaggacgcagtgacctcaaaaatggaccaagggtccatagagcgcatcttgaagcaggtgagtgggggagaagacgagatacagcagctccagaaagcactgctggattaccttgacgagaatacggaaacagatccgagcctggttttcagtaggaaattctacatagcccagtggtttagggatacaacactggagaccgagaaggccatgaaatcccagaaggatgaggagtcatcagaaggcacacaccacgcaaaagaaatcgaaacaaccggtcagatcatgcatcgcgcagagaaccgtaagaaattcctgaggtctatcatcaaaaccaccccttcccaattctccaccctgaaaatgaactctgacacagtcgactacgatgatgcttgcctcattgtaagatacctggctagtatgagaccatttgctcagtccttcgatatctacctgacccagattctgagagtgctgggcgaaaatgcaattgccgtacggaccaaagccatgaaatgtctgtccgaggttgtggccgtggatccctctattttggcccgactggatatgcaacggggtgttcatggaaggcttatggataactcgacttctgttagagaggccgctgtcgagttacttggcaggtttgtactctgccgcccacagctggccgagcagtattacgatatgctgatagagcggatcctagatactggaatcagcgtgcgaaaacgtgtgattaagattctccgcgatatttgtatcgagcagcccacatttccaaaaatcacagaaatgtgtgtgaaaatgatccgacgggtaaatgacgaggagggcattaagaagttggtgaacgagacttttcagaaactctggttcacaccgactccccacaacgacaaggaagctatgacccgcaaaatactgaacatcacggatgttgtggccgcatgccgggataccggctatgactggtttgagcagcttttgcagaaccttctcaaaagcgaggaggactcttcttacaagcccgtaaaaaaagcttgcactcagctggtcgacaatctggttgagcacattctcaagtacgaagagagcctagccgactcggataataaaggggtgaattctggaagactggtcgcctgtatcacaacgctctttctgtttagtaagatccgaccccaattgatggtgaagcatgcgatgaccatgcagccctatctcacgactaagtgttccacccaaaatgactttatggtgatttgcaacgtggctaaaatcctagagctagtggtgccactgatggagcacccctcagaaaccttcctcgctaccatagaggaggacctgatgaagttgattattaaatatgggatgaccgttgtgcagcactgcgtgagctgtctgggggcagtggtcaacaaggtgacccaaaatttcaaattcgtctgggcttgcttcaatcgctattacggtgctatcagcaaactgaagagccagcatcaggaggaccctaacaacacctcgctgctcacaaataaacctgcactgctcaggtcactcttcactgtcggggcactgtgccggcatttcgacttcgatttagaggactttaaaggtaatagtaaagtcaacattaaggataaagtgctggaattgctgatgtacttcacaaaacatagtgacgaagaagtgcagactaaggccattatcgggttggggtttgctttcatccaacaccctagtctgatgttcgagcaagaggtcaaaaacttatataacaatatactgagtgacaaaaatagcagcgtgaatctcaagatccaggtgctgaaaaacttgcaaacatacctacaggaggaggatacacgcatgcagcaagccgatagggattggaaaaaggtggccaagcaggaggacctcaaggaaatgggggacgtgtcttccgggatgtcctccagcatcatgcagctgtacttgaagcaggtgctggaggcgttttttcatacccaatcttccgtaaggcatttcgctctgaacgtgatagctttgaccttgaaccaggggctcatacaccctgtccagtgtgtgccgtacctcattgcaatgggtaccgaccctgaacctgcaatgcgcaataaggccgaccaacagctggtggagatcgacaagaagtatgcgggtttcatccacatgaaggctgtggctggaatgaaaatgagttaccaagtgcagcaagccattaacacctgtttgaaggatcctgttcgcggatttcggcaggacgaaagttcttccgccctctgctcgcatctgtatagcatgattagaggcaacagacaacatcgcagagcattcctgatcagcttgcttaatcttttcgacgacacagcaaaaaccgatgtgactatgctgctttatattgcagataatcttgcttgcttcccctaccagactcaggaggaacctttgtttatcatgcatcacatcgatataactctgagcgtgtccggctccaatttactgcaatcctttaaggagagtatggtcaaagataagaggaaggaaagaaaaagtagcccaagtaaagagaacgagtcatcggactccgaagaggaagtctcccggccacggaagtccaggaagcgcgttgacagcgactctgattctgattctgaagacgatatcaactcagtgatgaagtgtctgcccgaaaattccgcacccctcatcgagtttgccaatgtgagtcagggcattctgcttttgctgatgctcaagcagcacctgaaaaacttgtgcggcttttccgattctaaaatccagaagtatagcccttccgaatcagccaaggtctacgataaagccatcaatagaaagacaggtgtgcactttcaccccaagcagacattggactttttaagaagtgacatggccaattcaaaaatcaccgaagaagtgaagcgatctatcgtcaagcagtatctcgactttaagctgctaatggagcatctggacccagacgaggaagaagaggaaggggaagtttctgcaagcacaaatgctcggaataaggcgattaccagcttactcgggggtggctcacccaagaataacacggccgctgagactgaggacgatgaatctgacggcgaggatcgcggtggaggcactagtggcgtaagacgtcggagaagccagagaatatctcagcgaatcacata

SEQ ID NO: 232773 - DNA, 867 bp, synthetic construct
  misc_feature 1..867: note = Description of Artificial Sequence: Synthetic coding sequence
  source 1..867: mol_type = other DNA
atggagcgccctcagccggatagtatgcctcaggatttgtctgaagccctgaaggaggctaccaaagaggtacacacacaagctgagaatgctgagtttatgcggaattttcaaaagggacaggtgacacgggacggcttcaaacttgtaatggcatctctttaccatatctacgtggctctcgaagaggaaatcgaaagaaacaaagagtcccccgtattcgcccctgtgtactttcccgaagagctgcataggaaggcagccttggaacaggatctcgctttctggtacggcccacgctggcaagaggttatcccttacaccccagccatgcagcgatacgtgaagaggctgcacgaggttggcaggaccgaacctgaactgctcgtcgcacacgcctatactagatacctgggcgacctaagtggtggtcaggtgctgaagaagatcgcacaaaaggccctcgacctcccctcgtcaggtgaaggcctcgctttcttcacattccctaatatcgccagcgccaccaaattcaagcagctctacaggagtagaatgaacagccttgaaatgaccccggctgttcgccagagggtgatcgaggaggcgaagaccgcttttctgctcaatattcaattgtttgaggagctgcaggagctgctgacccatgacacaaaagaccagagcccttcaagggcacccggtctccggcagcgggcaagtaataaagtgcaggacagtgctccagttgagactcctcggggaaagccaccactgaatacaagaagccaggcaccactgttgaggtgggtgctgactttgagctttttggtggctactgtcgccgtcggactgtatgccatgtag

SEQ ID NO: 232774 - DNA, 4304 bp, synthetic construct
  misc_feature 1..4304: note = Description of Artificial Sequence: Synthetic coding sequence
  source 1..4304: mol_type = other DNA
atggaagaccacatgttcggagtccagcaaattcaacccaacgtgatatcggttcgtctgttcaagcggaaagttgggggacttggattccttgtgaaggagcgagtgtctaagccgcctgtgattattagcgacctgattagggggggagccgctgagcagagcggcctgatccaggctggggacatcatcctcgcagtgaatggccgacctctggtggacctgtcatatgattcagctcttgaggtattacgtggtatcgctagcgagacgcacgtagtgcttatccttaggggaccagagggattcacaactcacctggagaccaccttcaccggcgacggtactccaaagaccatacgcgtgacacagccacttgggcctcctactaaggccgttgacctatcacatcagccacccgcagggaaggagcagccactggctgtggatggagcatctggccctggaaatggtcctcaacacgcctatgatgatgggcaggaggcgggatccctgccacatgcgaacggcctggccccacgccctcccggacaggatccagcgaaaaaagctacccgagtttccttacagggcagaggtgaaaataacgaactcctaaaggagatcgagcccgtgctctctctgctgacttcggggagccgtggggttaaggggggagcccctgcaaaggccgaaatgaaggacatgggtatacaggtggaccgggatctggatggtaagtctcacaagccattgccactcggagtcgaaaatgacagggtgttcaacgacctctggggaaagggcaacgtcccagttgttttaaacaacccatactccgaaaaagaacagccacctacctctggcaaacagagccccactaagaatggaagtccaagcaaatgccccagattcctgaaagtgaaaaattgggaaacggaggtggtgttaactgacacactgcacctgaagtctactttggagactggctgcacagagtatatatgtatgggatccatcatgcacccgagccagcatgccaggagacccgaggatgttcgaactaaaggccagctgttcccattagctaaggagttcattgatcaatactactccagcatcaagaggttcggtagcaaggcccatatggaacgtctcgaggaagtgaataaagaaatcgacaccactagcacctaccaactgaaagataccgagctcatttacggagcgaaacacgcttggagaaatgccagcaggtgcgtcggccgaatacagtggtcaaaactccaggtcttcgacgcaagagattgtacaactgcacatggcatgttcaactacatctgcaatcatgtgaagtacgctacaaataagggcaatcttcggtcagcgattaccatatttcctcagcgcactgatggaaagcatgattttagggtgtggaattctcagctgattcgttatgcaggctataagcagccagatggaagcacactaggagatcctgccaacgtacaatttaccgagatttgcatccagcagggctggaagccgccaagaggtcgattcgacgttttgcccttacttcttcaggccaacgggaatgacccagaacttttccagatccccccagaactggtcctggaggtacctatcagacaccctaagttcgagtggttcaaagatttggggctgaagtggtatggtctgcccgctgtttccaacatgcttcttgagattggaggcttagaattctccgcctgtccttttagtgggtggtacatggggaccgaaattggggttcgcgattactgcgataattcacgatacaatattctggaggaggttgcaaaaaaaatgaacttggatatgcgtaagacatcttcattatggaaggatcaggcactggtggagatcaacatagccgtgctgtatagctttcagtctgacaaagttaccatcgtagatcatcactccgcgactgaaagctttattaagcacatggagaatgagtaccggtgtcggggaggttgtcctgcagattgggtttggatcgtacctcccatgtctgggtcaatcacacccgtgtttcatcaggagatgctgaactatcgactgactccatcattcgaatatcaacccgacccctggaacacacacgtgtggaaggggactaatggaactcccactaaacggagagcaataggatttaagaagctcgccgaggccgtcaagtttagtgcgaagctgatgggccaggcgatggcaaaacgggtgaaggcgaccatcctgtatgctacagagacagggaagtcccaggcgtatgccaagacactgtgtgagatatttaagcatgcatttgatgctaaggtcatgagcatggaagagtacgacatagttcatctcgaacatgaaacccttgtgttggttgtgacaagcacatttggcaatggcgatccccctgaaaatggggagaaattcggctgcgccttgatggaaatgcggcatccaaattccgtgcaggaggagcggaagtcatataaggtccgctttaactccgtgagctcctatagcgatagccagaagagtagcggagatggaccagacttacgggacaatttcgagagcgctggtcccctcgccaacgtcaggttttcagtcttcgggcttggttctcgggcttacccccacttctgtgctttcggacacgccgtggacactctgctggaggaactgggaggcgagaggattcttaagatgagagagggggacgagctgtgcggccaggaggaggcgtttcggacatgggcgaagaaggtttttaaagcagcctgtgatgtgttttgcgtgggggacgacgtgaacatcgagaaagcaaacaattctctgatcagtaacgacagaagctggaagcgcaacaaattccgactcacctttgtagcagaagcccctgagttgactcaggggttgtcgaacgtacataagaagagagtgtcggctgcgaggttattgtctcgccagaacttacaaagccctaagagctcaagaagtaccatatttgttcggttgcacaccaacggctcccaggagctgcagtaccagcccggagaccacttaggagtttttcctggcaaccacgaagacctcgtgaacgcattaattgagcgcctggaggacgcccctcctgttaaccaaatggtcaaggtggaattgcttgaggagagaaatacagcgctgggcgtgattagtaactggacagatgaactgagactgccgccatgtacgatcttccaggctttcaagtactatctggacattactaccccgcctactccacttcaattacaacagttcgccagccttgctacctcagagaaagaaaaacaacgattgctggttctgtctaagggattacaggaatacgaggagtggaagtggggtaagaatcccaccatcgtggaggtcctggaggagttccctagtattcaaatgccagcaaccctccttcttactcagttaagcctgcttcagccccgttactactcaattagtagttcaccggatatgtatcctgacgaagtccatctgacagtggctatcgtatcttatagaactcgggacggcgagggaccaattcaccacggggtctgttcctcttggctcaaccgcatccaggcggatgagcttgttccatgttttgtgaggggagccccatcttttcatctccctcgcaacccccaggtgccctgcatcctggtgggaccagggacaggcatcgcaccgtttcgcagcttttggcagcagaggcagttcgacattcagcacaagggaatgaacccatgtcctatggtgttggtgtttgggtgtagacaatcaaagatcgaccacatataccgagaggagacacttcaggccaagaacaagggcgtgttccgagaactgtacacagcttatagtagggagcccgataagcctaagaaatacgtgcaggacatcctgcaggaacagttagctgaatctgtttatagggccttaaaggagcagggaggccacatctatgtgtgtggtgacgtgaccatggccgctgacgtcctgaaggccatccagcgcattatgacacagcaggggaagctgagtgcggaggatgccggagtcttcatctctcggatgagagacgacaacagataccacgaggacatcttcggtgtcacccttaggacctatgaggtcaccaaccgactgcggtccgaatctattgcttttattgaggagagcaagaaggataccgacgaggtcttcagcagtta

SEQ ID NO: 232775 - DNA, 4407 bp, synthetic construct
  misc_feature 1..4407: note = Description of Artificial Sequence: Synthetic coding sequence
  source 1..4407: mol_type = other DNA
atggaagaccacatgtttggggtgcagcaaatacagcccaatgttatatcagtcaggttgttcaagaggaaagtgggagggcttggatttctcgtaaaggaaagggtttctaagcctcccgtcattatatccgacctaatcagaggcggagcagccgagcagtctggccttattcaggctggcgatattatactggcagtgaacggaaggcctctcgtcgacctgtcatatgactccgcccttgaagtgctacgcggaatcgcgagcgaaactcacgtggtcctgatcctcaggggccctgagggctttaccactcatctcgagacaactttcaccggagacgggactccaaagaccattagagtgacacagcctcttggcccacccaccaaggcggtggacctgtcacaccaaccccctgcagggaaggagcagccactggccgtcgacggtgcttccgggcctggcaatgggccacagcatgcatacgatgacggccaagaagccggatcactccctcacgctaatggactggcccctagaccgccaggccaggatcccgcaaaaaaggctactcgggtcagtctgcagggacggggagaaaacaacgaattgctcaaagagattgaacccgttttgtctttgctgacgtcaggatcccgcggtgtaaaaggcggtgcacctgcaaaagccgaaatgaaagatatggggatccaggtagatcgcgacctggacggaaaatcacacaaacctcttcctctaggcgttgagaacgacagggtatttaatgatctttggggaaaaggaaatgtcccagttgttctgaataatccttacagtgaaaaggagcagcccccaaccagcggaaaacaaagccctaccaaaaacggaagccctagcaagtgcccgaggtttctgaaggttaaaaattgggaaaccgaggtggtgctgaccgatacacttcatctgaagagtaccctggagaccgggtgcacggagtacatttgtatgggaagcatcatgcatccctctcagcatgccagaaggccagaggacgtgcgcaccaaaggtcagctgttccccctggcaaaagaatttatcgatcagtattactccagcatcaaacgtttcggttcgaaagcgcatatggagagattagaagaagtgaacaaggaaattgatactacctcaacctatcagctgaaagacacagagctaatttacggggctaagcacgcatggcgcaacgcctcccgttgtgtgggtcggattcagtggtctaagctccaggtcttcgatgcccgtgactgcactacagctcatggaatgtttaactacatttgcaaccacgtgaagtacgccacaaataaaggaaatctacgctccgctatcaccattttcccgcaacgtaccgatgggaagcacgattttagggtgtggaactcccagctgattaggtacgccggatacaaacaacccgacgggtcaactctcggagacccggctaatgtccagtttaccgagatatgtatacagcaggggtggaaaccccctcggggacggttcgacgtgctgccgctactactgcaggccaacggtaacgacccagaactgtttcagatcccgcctgaactggtgttggaggtgcctatcagacacccaaagttcgagtggtttaaggatctgggcctgaaatggtatggattgcctgccgtctccaatatgctgttagagatcgggggactggagtttagcgcttgtccgttctccggctggtatatggggacggagatcggcgtgagagactactgcgacaactcccgctataatatcttggaggaggtcgcgaaaaagatgaatctggacatgagaaaaacttccagcctgtggaaagaccaggctctggttgaaatcaacattgcggtgttatacagcttccagagcgacaaggtgacaatcgtcgatcaccattctgccactgagtccttcattaaacacatggaaaacgagtatcgatgtaggggagggtgtcctgccgattgggtctggatcgtccctcctatgagtggcagcatcacccccgtgttccaccaagagatgctgaattatcggctaacacccagtttcgaatatcagccagatccctggaacacccacgtttggaagggcaccaacggcacaccaactaagagacgggcaatcggatttaaaaaactagccgaggccgtgaagtttagcgctaaactcatgggccaggccatggctaagcgcgtaaaggcgacgatcctttacgcaacagagaccgggaagagtcaagcctatgcaaagaccctgtgcgaaatcttcaaacacgcattcgacgcaaaagtgatgtccatggaggagtacgatatcgtccatttagagcacgaaaccctggttctggtggtcacaagcaccttcgggaacggtgaccctcctgagaatggtgaaaagttcggctgtgcactgatggagatgcgccaccctaattcggtgcaggaggagcggaaataccctgaacccctccggttcttccctcgcaagggtccacccctccctaatggcgataccgaggtgcatggcctggccgctgccagggatagccagcatcggtcatataaagtacgctttaacagcgtgtctagttactcagattcccagaagtcaagtggagatggccctgacctgagggataattttgagtctgccggacctctggcgaatgtcagattctcggtgttcggcctcggttcaagagcatatccccacttctgcgcctttggtcacgctgtggacaccctcctcgaggagctaggcggagaacgtattctaaagatgcgtgagggggatgaactgtgtgggcaagaggaagcatttcgcacctgggctaaaaaagtgttcaaggctgcctgcgatgtgttctgcgtgggagacgacgtgaacattgagaaggcgaacaatagccttataagcaacgaccgctcttggaagagaaataagttcaggctgacattcgttgctgaggcacctgagctgacccagggacttagcaacgtacataagaagcgagtaagtgcggcaaggctcctttccaggcaaaaccttcagagtccaaagagttcaaggagcaccatcttcgttagactgcacaccaacggctcccaggaactccagtatcagcctggggaccacctgggagtgttccctgggaaccacgaggacctagtcaacgctctcattgagcggcttgaggacgcgcctcccgttaatcaaatggtgaaagttgaattgctcgaggaacggaatactgcgctgggggtgatctccaattggactgacgaattacggctgccaccctgtactatattccaggcctttaaatactatctcgacataacaactccgcctacccccctgcagcttcagcaattcgccagccttgctacctccgagaaagagaagcagcggctgcttgttctgtccaagggactgcaggagtacgaagagtggaagtggggaaagaatcccacaatagtcgaggtgctggaagagtttccttcaattcagatgccagcaaccctcctgctgactcagctgtcgttgttgcagccacggtattacagcatctcttcctctcccgatatgtatcccgacgaagtgcacctcacagtggcaatcgtgtcttacaggacaagggatggtgagggcccaatccaccacggagtgtgcagctcgtggctcaaccgcatccaggccgatgagctagttccttgttttgtgcgcggtgccccatccttccatttacccaggaacccacaggtgccctgtatattggtcggacctggaacagggatagcaccctttcgtagcttttggcagcagcgccagtttgacatccaacataagggaatgaacccttgcccaatggttttagtcttcggctgtcggcagagcaaaatcgatcacatctacagggaagagacccttcaggcaaagaataaaggagtgttcagggaattatacactgcttattctcgcgaaccagataaaccgaaaaagtatgtacaggatatcctgcaggaacagctggctgagagtgtctaccgtgcgctaaaggaacagggaggacacatctacgtctgtggggatgtcactatggccgctgatgtactgaaagcaatccaaaggattatgacccagcagggtaaattaagtgcagaagatgcaggtgtgtttatttctagaatgcgcgacgacaatcgataccatgaggatatcttcggggtgaccctcaggacttatgaagtcacaaatcgtctgagaagtgaaagcattgcatttatcgaggagtctaaaaaggataccgatgaagtgttttccagttag

SEQ ID NO: 232776 - DNA, 1224 bp, synthetic construct
  misc_feature 1..1224: note = Description of Artificial Sequence: Synthetic coding sequence
  source 1..1224: mol_type = other DNA
atggaagaccacatgtttggggtccagcagatccagcctaacgttatcagtgttcgcctttttaaacggaaggtcggcggacttgggttcttggtgaaggagagagtgtccaaaccgccagtgattatcagtgatttgattaggggcggagccgcagagcagtccggtttgatccaggccggagacattatcctcgcggttaacggtcgccctttggtggacctttcttatgacagtgcgttagaggtgttgcgcggtatcgcatctgagacacatgttgtactgatcctgcggggacccgaggggttcaccacccaccttgagactacattcaccggtgatgggacacccaaaacaataagagtgactcaaccacttggccctcccaccaaggcagttgatttgtcacaccagccccctgctgggaaagaacagcccctagctgttgatggcgcatctggccctggaaatggcccacaacacgcgtatgacgatggccaagaagcaggaagcctgccccacgctaacggcctggctcctcgtccccctgggcaagaccctgccaaaaaggcaaccagagtgtctctgcaaggcaggggcgagaataatgagttgcttaaggaaatagaacccgtactatcactgctgacaagtggatcgaggggagtgaaagggggagcccctgcgaaggccgagatgaaggatatgggcatccaggtggacagggaccttgatgggaagtcacataaacccctccctctcggtgtggagaatgatagggtgttcaacgacctctggggaaaaggcaatgtgccagtagttcttaataacccctactctgagaaagaacagatgaggaaactgcgcattaccgaggggtttggagcccagcggggtagccacaaccatcctccaccccaggagaactcccctccccagaggatggccgcacccccttccgtccatgctagttctcggtctagaactggccgtctacgatggtttagcctaaccccatcaaccttgagagctcactggaaaagagatgcactttctacctccgcatgggcaccatcatgtatcctgttgagcatgcaggggggattgaagacgtccgcccagaaagactccagctccctttcgccaaagagcctcttaattaataccatccatcagttaaaggatctagccccaaaacctacctggaagggatggaaacggtag

SEQ ID NO: 232777 - DNA, 3993 bp, synthetic construct
  misc_feature 1..3993: note = Description of Artificial Sequence: Synthetic coding sequence
  source 1..3993: mol_type = other DNA
atggaagaccacatgttcggagtccaacagatccagccgaacgtgatatccgttcggcttttcaagaggaaagtgggaggtctggggtttttagtgaaggaacgagtgagtaaaccccctgtgatcatcagcgatttgatccggggaggcgcagccgaacagtcgggattaatccaggctggggatataatcctggctgtaaatgggagacccttagttgatctgtcctatgacagtgcccttgaagtactacgcggtattgcttccgagacgcatgtagttctgatccttcgaggtcctgagggctttaccactcacttagaaacaacatttactggagatggtacccccaaaaccatacgcgtgactcagccactgggaccccctaccaaggccgtggatctttcacatcagccgccagcgggtaaggagcagccgctggctgtcgacggcgcttccggcccaggtaatggacctcagcacgcttatgatgatggccaggaggccggatcactcccacatgccaatggcttagctccccgtcctccaggacaggatcccgcaaaaaaagccacccgagtgtccctgcaggggcgaggagaaaataatgaactgttgaaagaaatcgagccagtcctgtcactgctgacctcaggttcgcgcggagtcaaaggcggtgcgcctgcgaaagcggaaatgaaggacatgggaatacaagtggaccgagatctggatggaaaaagccacaaacctctgccactgggggtcgaaaacgatagggtgttcaacgacctctggggcaaaggcaacgtgcctgtcgtactgaataacccatattctgaaaaggagcagcctccaaccagtggaaaacaaagccctaccaagaacgggtctcctagcaaatgccccagatttctcaaagttaaaaattgggaaacagaggtggtgttgacggacacactgcatctaaagtctacactcgaaactggctgtaccgaatatatttgtatgggtagcatcatgcacccttcccaacacgctcgcagacccgaagatgttagaactaagggacagctattcccactggccaaggaatttatcgatcagtactatagtagtatcaagcgattcggctctaaggcccacatggaacgcttagaggaggtgaacaaagagatcgataccactagtacttaccagctgaaggacacagagctgatatacggagctaagcacgcttggaggaatgctagtcgctgtgtcggaaggatccagtggagcaagctccaggtctttgacgctcgcgattgcacaaccgcgcatggcatgtttaattacatttgcaatcacgttaagtatgcaactaacaaaggcaacctcagatccgccatcacaatcttcccgcagcggaccgatggaaaacatgatttccgggtctggaactcccagttaatccgttatgctggttacaaacaaccagacgggtctacgctgggcgatcctgccaacgtgcaattcactgaagaagtggccaagaagatgaatttggacatgaggaagacgtctagcttgtggaaagaccaggcgttagtcgagatcaacattgcagtgttatattcttttcaatccgataaggtcaccatcgtggatcaccactccgccacagagagtttcataaagcatatggagaacgaatacagatgtcggggagggtgccccgcagactgggtgtggatagtgcccccaatgtctggctccattactccagtgttccaccaggagatgctcaactaccgattaaccccatctttcgaatatcagccagatccgtggaacactcatgtgtggaagggaactaacggcactcctacgaagaggagagcgataggatttaaaaagcttgctgaggctgttaaattcagcgccaaactgatgggccaggcgatggccaagagagtcaaggcaacaatcctttatgcgacagaaacaggtaaaagccaagcgtatgccaaaacactgtgtgagatatttaagcacgcatttgatgctaaagtgatgtctatggaagagtacgacattgtccaccttgagcacgagacgcttgtcctggttgtgacttcaacctttgggaacggagaccccccagaaaatggtgagaagtttggatgcgctctcatggaaatgagacatccgaacagtgtgcaggaagagcgcaaatcctacaaagtcaggttcaattccgtttcatcatatagtgattctcagaaatcttctggcgacgggccagacctgcgcgacaattttgagtctgcagggcctcttgccaacgtgagattcagtgtgtttggattgggcagccgggcttacccccacttctgcgccttcggccatgctgtcgatacattgctggaggagctgggtggggaaaggatcctgaagatgagggagggagatgagctctgcggccaggaggaagccttccgcacatgggcaaagaaagtgttcaaagccgcatgcgatgttttctgcgtgggcgacgacgtgaacatcgagaaagcaaacaacagtcttatctcaaacgataggtcctggaagcgtaataaatttcggttgacctttgtcgctgaggcaccagagctgactcagggactgtcgaatgtgcataagaagcgggtaagcgctgctaggcttctgtccaggcaaaacctccagtccccaaagtcctcacgctctacaatatttgttagattgcatacaaatggttcacaagagctccagtatcagcccggagaccaccttggcgtgtttcccggaaaccatgaagacctggttaatgccctcattgagcgcctggaggatgcacccccagtgaaccagatggtcaaagtggagcttttggaggagcgtaacacagcactgggcgtcatatccaactggaccgacgagctgagactgcctccttgtacaatctttcaggcatttaaatattacctcgatatcacaacgccgccaacacctctgcagctccaacagtttgcgtcactagccacaagcgagaaggagaagcagagactgctcgtgctctctaaaggcctgcaggaatatgaggaatggaagtgggggaaaaatccaactattgtagaagtactggaggagttcccatctattcagatgccagccacactcctgctgactcaactgtcgttgctccagccaaggtactactccattagttcttcacctgacatgtatcctgatgaggttcatctcaccgtcgccatcgtctcatacagaacaagagatggggagggaccaatccaccatggtgtgtgcagttcctggcttaatcggatccaggctgacgaactggtaccctgttttgtcagaggtgcaccttctttccatctacccagaaacccacaagtcccatgcatcctggtcggaccagggacagggattgctccctttagatctttctggcagcagcggcagtttgacattcagcataaaggcatgaacccctgcccgatggtgcttgtctttggatgccggcaaagcaaaatagatcacatataccgggaggaaacattacaagcaaagaataagggggtttttcgggagctgtacaccgcttacagtagggagccggacaaacccaaaaaatatgtgcaggatatactccaggaacagctggcagagagcgtctatcgggcactaaaagaacaaggcggtcatatttatgtgtgtggagacgttactatggctgcagatgttctgaaggccatacagaggattatgacccaacagggcaaattgtctgcggaagacgccggagtcttcatttctcgcatgagagatgataacagataccacgaggacatcttcggagtgacactgcggacttatgaagtaactaatagactaaggtcagaatctatcgctttcatcgaagaatctaagaaggacacagatgatcaggtatttaagacgtag

SEQ ID NO: 232778 - DNA, 3621 bp, synthetic construct
  misc_feature 1..3621: note = Description of Artificial Sequence: Synthetic coding sequence
  source 1..3621: mol_type = other DNA
atggaagatcacatgttcggggttcagcagattcaacccaatgttatttccgtgagacttttcaagcggaaggtggggggtcttgggttccttgtgaaggagagagtttctaagccccctgtgattatcagcgacctgattcgagggggagccgctgagcaatccgggctcatccaggcaggagacataatcttggcggtcaacggccgacccctcgttgatctgtcctatgactctgccctggaagtactgcgcggaatcgcctccgagacccatgtggtccttatactcaggggaccagaagggttcactactcacctcgaaacgacctttacaggggacggtacccctaagactatacgagtgacacagccattgggcccacctaccaaggctgtggacctgtcacatcagccaccggcaggcaaggagcagcccttagcggtggatggagcatctggacccggtaacgggcctcaacatgcttacgacgacggacaagaggccggttctttgccccacgccaacggccttgcccctcggccacctgggcaagatccggcaaagaaggcaacaagggtgtctctgcagggaaggggggagaacaatgaactgctgaaagagattgaacctgtgctaagtctgctgaccagtggttccaggggcgtcaaaggtggcgctccagctaaggcagagatgaaagatatgggcatacaggtggatcgggacttagacggaaaatcccacaagcccctgcctctgggcgtagaaaacgaccgagtgtttaatgacctttggggcaagggcaacgtgccggtagttcttaacaacccatactcggagaaggagcagccacccacatctggtaagcagtctccaactaaaaacggctcaccgtctaagtgcccaaggtttctgaaggtgaagaattgggaaaccgaggtcgtgctgaccgatacattgcacctcaagtctacactggagactggctgcacagagtatatttgcatgggctcaatcatgcacccatcacaacacgcccgacgacccgaggatgtgagaaccaagggacagctcttcccactggccaaggagttcattgatcaatactattcctctataaaacggttcgggtcgaaagcacatatggaaaggcttgaggaggtcaacaaagagatagacaccacaagcacctaccagctgaaagacacagagctgatctatggtgcaaaacatgcatggcgcaacgccagccgctgcgttgggaggatccagtggtcaaaactgcaggtgttcgacgctcgtgactgtaccacagcccacgggatgtttaattacatatgcaaccacgtcaagtacgccactaataagggtaacctgaggtctgccatcaccatcttcccacagcgcactgacggtaaacatgatttcagggtgtggaatagccagctgattagatatgccggatacaagcagcccgatggatccacccttggggaccccgcaaacgttcagttcaccgaaatatgtatccaacaggggtggaaaccacctcgcggacgttttgatgttttgcccttgcttctccaggctaacggtaatgaccccgagctttttcagatcccacccgagctcgtactggaggtccccattcgccaccccaaattcgaatggtttaaggacttgggtctgaaatggtacggacttcccgcagtatccaacatgctgctggaaatcggcggactcgagttctcagcgtgtcccttttccggatggtacatgggcactgaaatcggggtgagagattattgcgataatagccgctacaacatactggaggaggtcgccaaaaaaatgaatctagacatgaggaagacttcgagtctttggaaagatcaagcattggtggagatcaatatagcagtgctttatagtttccagagtgataaagtgacgatcgtagaccatcattcagccacagagtccttcatcaagcatatggagaacgagtaccggtgtcggggaggctgcccagcggattgggtgtggattgttccaccaatgtctggttcaatcacacctgttttccaccaggagatgctcaattaccgcctcactccatcgttcgaataccagccagatccttggaacacacatgtctggaagggtaccaacggaactcctacaaagaggagagccattggattcaagaagctggctgaggctgttaagttttcagccaagctcatgggccaagcaatggcaaagagggtgaaagcaacgatactttatgctactgagaccggaaaatcccaagcttacgcaaagactctgtgcgaaatcttcaagcatgccttcgacgcaaaggtcatgtctatggaggagtacgatattgttcacctggagcatgaaaccctcgtgcttgtcgttacttccacatttgggaacggcgatcctcctgagaatggtgaaaaatttggctgcgcccttatggagatgaggcacccaaattcagtccaggaagaaagaaagtcttataaggtacgcttcaattctgtgtcatcttactcagatagtcaaaaaagctccggggatggacccgatctcagggacaattttgagtccgctggtccgctggccaacgttcgcttcagtgtctttgggctgggatctcgggcatatcctcacttctgcgccttcggtcatgcggtcgataccctactggaggagctgggtggggaacgcatcctcaaaatgcgcgagggggacgagctctgcgggcaggaggaggcctttcgcacatgggctaagaaggtgtttaaggccgcttgcgacgtgttctgtgttggtgatgatgtcaatattgagaaggccaataactcgctcatctctaacgatcgatcttggaagcggaataagttccggctcaccttcgtggcagaagctccagagctgactcaaggtctctccaatgttcacaagaaacgggtgtccgccgcaagattgttatcgaggcaaaacctacaaagtcctaaatcctctaggtctactatatttgtgagactgcacacaaatggttcccaggagcttcagtaccaacccggtgatcatctcggcgtgttccctggcaaccacgaggatctggtgaacgccttaatcgagcgcctggaggatgcccctcctgtcaatcagatggtcaaagttgagctgcttgaagagagaaatacagccctcggtgtgataagtaattggaccgacgagcttaggctgcctccctgcacaattttccaggctttcaaatactatctcgacatcactacaccacccacccctcttcagctgcagcagttcgcgagcctggccaccagcgaaaaagagaagcagaggttgctggtgctctccaaaggccttcaagaatatgaggaatggaaatggggcaaaaatccgacaatcgtcgaagtgcttgaggaatttccctccatccagatgcctgcaactctgctgctgacccagttgtcgctactccagcctagatactattccatttctagcagcccccacacccacaccttatccgagacacgcccatcacccttgccactgtcatcgcagtgctgttag

SEQ ID NO: 232779 - DNA, 204 bp, synthetic construct
  misc_feature 1..204: note = Description of Artificial Sequence: Synthetic coding sequence
  source 1..204: mol_type = other DNA
catcctaatagcgtacaagaggaacgtaaatacccagaacctctgcggttttttccccgtaaggggccacccctgcctaatggcgatacagaagtccacggactggctgccgcacgggacagtcaacaccgcagctacaaggtcagattcaactcagtgtcctcgtactccgattctcagaagagctccggtgatggaccctag

SEQ ID NO: 232780 - DNA, 1521 bp, synthetic construct
  misc_feature 1..1521: note = Description of Artificial Sequence: Synthetic coding sequence
  source 1..1521: mol_type = other DNA
atgcccagtaagaccaagtacaatctggtggatgacgggcacgatcttcgaatcccactccacaatgaggacgcctttcaacacggaatatgctttgaggccaagtacgttgggagcttagatgtgcctcgcccaaacagtagggtggagattgtggccgctatgcgcagaatcagatatgaatttaaagccaagaatatcaaaaaaaagaaagtgtccatcatggtttccgtggacggagtgaaggtaatcctgaagaagaagaagaaattgcttctcctgcagaaaaaagaatggacttgggacgaaagcaaaatgcttgtgatgcaggatcccatttaccgtatcttttatgtctcacacgactctcaggacctgaagatttttagctacattgctcgggatggcgctagcaacatttttaggtgtaacgtgttcaagtccaagaagaaatcccaggcaatgagaatcgtgcggactgtgggccaggcttttgaggtatgccacaaattgtctttgcaacatacacaacagaacgcagacgggcaggaagacggcgaaagtgaacgcaactccaattcctccggtgatccgggaagacagttgacgggcgctgagagagcctcgacggcgacggcagaagaaactgatatcgatgctgttgaggtcccactgcccggtaatgatgttctggaattctcacgtggggtaactgaccttgatgccgtaggtaaggaggggggaagccacaccggcagcaaggttagccatcctcaagagcccatgctcaccgcgtccccaagaatgctactacctagtagcagcagcaagccacctgggttgggtacggagactcctctatccacccaccatcagatgcagctgcttcaacagcttttgcaacaacagcagcaacagacccaggtggcagtggctcaggtgcatcttctgaaagaccagcttgccgctgaggcagctgccaggcttgaggcacaggctagggtccatcagctgctgttacagaataaggacatgcttcaacatatttcccttctggtgaagcaggttcaggagctagagctgaagttgagtggccaaaatgctatgggctctcaggacagcctgctcgaaataacattccgatccggagcgctgcccgtgctgtgtgacccgactactccaaaaccagaagatctgcactccccgccactgggagcaggtctggccgatttcgctcacccggcaggctctcctctgggtagaagagattgcctggtcaaactagagtgttttaggtttctccctccagaagataccccgccacccgcacaaggtgaggctctactggggggactggagttaattaagtttcgtgagtccgggatcgcgtccgagtacgaatccaacacagacgaatcggaggagcgggactcttggagccaggaagagctcccgagactgctcaacgtattgcaaaggcaggagcttggtgatggtctggatgacgagattgctgtatag

SEQ ID NO: 232781 - DNA, 636 bp, synthetic construct
  misc_feature 1..636: note = Description of Artificial Sequence: Synthetic coding sequence
  source 1..636: mol_type = other DNA
atgtccctgtcaagtctgtgccccgtctttagcgcagccgcttcatcactgcaggtgcacttgctgaaagatcaactggccgctgaagcggctgcgcgactggaggcacaggcaagggtacatcaattattgttacagaacaaagatatgctgcagcatatctctctactggtcaaacaggttcaggaattagaactcaagctctcagggcagaacgcgatggggagccaggattccctgcttgagattacatttcgcagcggtgctctgcccgtcctgtgtgacccaactacccctaagcccgaagacctgcacagtccacctctcggcgctggacttgccgacttcgcccaccctgcaggctcacctttgggcaggagagattgtctcgtgaaactggaatgttttaggtttctacctccagaggataccccaccaccagcccaaggagaggccttgctggggggtctggaactcatcaaatttcgggaatctggcatcgcatctgagtacgaaagcaataccgacgagtccgaagaaagggactcttggtcccaagaagaactgcctagacttctgaacgtcctgcagaggcaggaactcggcgatggactcgatgacgaaatagctgtttag

SEQ ID NO: 232782 - DNA, 1506 bp, synthetic construct
  misc_feature 1..1506: note = Description of Artificial Sequence: Synthetic coding sequence
  source 1..1506: mol_type = other DNA
atgccctccaaaaccaagtataaccttgtagatgatggccacgatttacggattcctctccacaatgaagatgcctttcagcacggcatttgcttcgaagccaagtacgtgggcagcctggacgtgccgaggcctaactctcgcgtggaaatcgtcgctgcaatgagacgcattcgttatgagtttaaggcgaagaacatcaagaaaaagaaagtttctattatggtttcggtggacggagtgaaagtgattcttaaaaaaaagaagaagaagaaggaatggacttgggacgaatctaagatgctggttatgcaggacccaatctataggatattttatgtcagtcacgatagtcaagatttgaagatattttcctacatcgctcgtgatggcgcttcaaacatcttccgttgcaacgttttcaaaagtaagaagaagtcccaggcaatgcggatcgtgcgaactgtggggcaggcattcgaggtgtgccataaacttagccttcaacatactcaacagaatgctgacggacaggaggacggggagtccgagcgtaacagtaattccagcggtgaccccggtcgtcagctcacgggcgcagaaagggcctcaaccgctaccgcagaagagactgacatcgatgcagtggaagtcccgcttcctgggaacgacgtccttgaattctcgagaggtgtgactgatctcgatgccgtgggcaaggaaggcggtagccacaccggatctaaggtcagccatccccaggagcctatgttgaccgcatccccacgcatgcttctgccaagcagcagctcaaaaccccctgggttaggtacagaaacccccctgtccacacatcatcagatgcagttgctgcagcagctgcttcaacagcagcagcagcagacgcaggtggccgtcgcccaggtccaccttctgaaggatcagttggcagctgaggcagcggcacggttagaagcccaggcgagggttcaccaacttctgctgcagaacaaagacatgctacagcacatttcgctgctggtgaaacaggtgcaggagctggagctgaaactgtccggccagaacgcgatgggtagccaggattccctcctggaaattacctttaggtcaggggctctgccagtgctctgcgatcctacaacccctaaacctgaagatctgcacagtccaccactcggcgctgggttggcagatttcgctcaccctgccggaagccctctggggagaagggattgcctggtgaagttagaatgttttcggtttcttcctccagaggacacaccacctccggctcagggcgaagccctgctgggaggcctcgagctcattaagttcagagaaagtgggatagccagtgaatatgagagtaacactgacgaaagcgaggagcgcgatagctggagccaggaagagctcccacggctgttgaacgttctccagaggcaggagcttggcgacgggctcgacgacgaaatcgccgtgtag

SEQ ID NO: 232783 - DNA, 2190 bp, synthetic construct
  misc_feature 1..2190: note = Description of Artificial Sequence: Synthetic coding sequence
  source 1..2190: mol_type = other DNA
atggcctgcccctggaagttcttgttcaagaccaagttccaccagtacgcaatgaatggcgagaaggatatcaataataacgtggagaaggcgccatgcgccaccagttcacctgtgacgcaggatgatctacagtaccacaacctgagtaagcagcaaaacgagagtccccaacctctcgtggagacaggaaaaaaaagccccgagtctctcgtgaaactcgacgctacccctctctccagtcctcgccacgttcgcattaaaaactgggggtcagggatgacattccaagacactctccaccataaagcaaaaggtattctgacttgccgtagtaagtcttgtctggggagcatcatgactcccaagagcttgacacgcggacccagggacaagcccacacctcccgatgaactgctccctcaggccatcgaatttgtaaaccagtactacggctctttcaaagaagccaaaatcgaggagcatctggctagggtagaagccgtgacaaaggaaattgagacaactggcacgtaccagctgacgggggacgaactgatttttgccacaaagcaagcatggcgcaacgctccccgatgcatcggccgaattcagtggagcaacctacaggtattcgatgctcggtcttgtagcacagctagagagatgtttgagcacatttgccgacacgtgaggtactccactaacaacggaaatattcgtagcgctatcaccgtattcccacagcgaagcgatggaaagcatgactttagagtttggaatgcacagttgattcggtatgcgggatatcagatgcccgatggctctattagaggagatccagctaacgtagagttcacccaactctgtatcgatttgggttggaaacccaagtatggcaggttcgatgtggttccactcgtcctccaggccaacggccgtgatccagagctgttcgagattccacctgaccttgtgttagaggtggctatggagcacccaaaatatgagtggttcagggaactcgaacttaaatggtatgcactgcctgctgtggcgaatatgctattagaagtcggcggattggaatttcccggatgccccttcaatggttggtacatgggtactgagattggcgttcgcgacttttgtgatgtccagagatacaacattttggaggaagtgggcaggcgaatgggactcgagacccacaaactggcctccctctggaaggatcaggcagtcgtggagattaatatcgcagtcctccacagtttccagaaacagaatgtgactattatggaccaccacagcgcagccgaatcattcatgaaatatatgcagaatgagtacaggtctcgcggaggttgccccgctgattggatctggctcgttccccctatgagcggaagtataactccggtgttccaccaggagatgctgaactatgttctcagccctttttattactatcaggtagaggcttggaaaacgcacgtgtggcaggacgaaaagcgacgaccaaaaaggagggagatccctctgaaggtccttgttaaggccgtcctgtttgcctgcatgctaatgaggaagactatggcctctcgtgtgcgcgtgacgattctgtttgctacagagacgggcaagtcagaggccctggcatgggatctgggtgcactgtttagctgtgctttcaatccaaaaaagctgaaaaaatctctttttatgcttaaagagttgaataataagttccggtatgctgtcttcggtttaggctcatctatgtatccgaggttctgtgcattcgcacatgacattgatcaaaagctttcacatcttggcgcatcccagctgacacctatgggggaaggagacgagctaagtgggcaggaagatgcatttcgatcctgggctgtgcagaccttcaaggccgcttgtgagacatttgatgtgcgtggtaaacaacacatccagatacccaagttgtacacctcaaacgtgacatgggaccctcaccactaccggctagtgcaagatagtcagccattgcctgcagcatctactagtcccagaatccccccaatactggcatcttctagcggtctcgcacaggcttccaggcccagtgctgtctctggctcgaatgggagcatgactccgtccacacgggaatgtggtgaagccgcttag

SEQ ID NO: 232784 - DNA, 3462 bp, synthetic construct
  misc_feature 1..3462: note = Description of Artificial Sequence: Synthetic coding sequence
  source 1..3462: mol_type = other DNA
atggcgtgtccttggaagtttttattcaagacaaaatttcatcagtatgcgatgaacggggagaaggacatcaacaataacgttgaaaaggccccttgcgcaacaagcagcccagtcacccaggatgatctccagtatcacaacctgagcaagcagcagaacgaatcccctcagcccctcgtcgaaactggcaagaagagccccgaatccctcgtcaaactggacgccactccactcagctcacctcgccacgtgagaatcaagaactggggctccggtatgacttttcaggacaccctgcatcataaagcaaagggtatcttaacttgtcgctcgaagagttgtctggggtcaatcatgactcctaaatccctcacacgcggtcctcgggataaaccaacccccccagatgagctccttccccaggcaatcgaattcgtgaatcaatactatgggagtttcaaagaggccaagattgaagaacaccttgctagagtggaagctgttactaaggagatcgagaccaccgggacctaccaactgacaggcgatgaacttatattcgcgaccaaacaagcttggcggaatgccccacgctgcatcggcagaatacagtggagcaacttacaagtgttcgatgcgaggagctgttctacagccagggaaatgtttgagcacatctgccgtcacgttcgctacagtactaacaacggcaatatccgcagcgcaatcaccgtatttccacagcgcagcgatggtaagcatgattttcgagtttggaatgcccagttgattagatacgccggatatcaaatgcccgacggtagcattcgaggagatccagcaaacgtggaatttacacagttatgcatcgatttgggctggaaaccgaaatacggacggtttgacgtggtgcctttggtgctgcaagccaacggcagggatcctgagctcttcgaaatcccaccggatctggtgctcgaagtcgctatggagcaccctaaatatgagtggtttcgggaactggagctgaagtggtacgctcttcctgctgtcgcaaatatgctgctcgaagtgggcggattggaattcccaggctgccccttcaacggctggtacatggggacagaaatcggtgttagggatttttgcgatgtgcagcggtacaacatcttggaggaggtgggaagacgaatgggcttagaaacgcacaaactggcttcactgtggaaggaccaggcagtggtagaaattaacattgcagttctgcattcgtttcaaaaacaaaatgtgacgatcatggaccatcactctgctgccgagtccttcatgaaatacatgcaaaatgaatatcgcagtaggggaggatgcccagccgattggatctggttggttcctcccatgtcaggttccattaccccggtcttccatcaggaaatgctcaattatgttctaagtccgttctactactatcaggtggaggcatggaagacacatgtctggcaagacgaaaaacggcgtccgaagaggcgcgaaatcccgcttaaagttctggtgaaggccgtcctgtttgcttgtatgctgatgcgcaaaacaatggctagccgggtgagggtgaccattctgtttgccaccgagactgggaaaagcgaagccctcgcatgggatctgggagctttgttctcctgtgcgtttaaccctaaagtggtctgtatggacaaataccgcctgtcctgcctcgaagaagagaggttactgctggtggtgacgtcaactttcggcaacggcgactgccctgggaatggcgagaaactgaaaaaaagcctctttatgctgaaggaactaaacaacaagtttcgatacgccgtgttcgggctgggttcttcaatgtaccccaggttttgtgcctttgcccacgacatcgatcagaagttgtcccatctgggcgcttcacagctcaccccaatgggcgaaggcgacgagctgagcgggcaggaggacgcgtttcggtcctgggcagttcagaccttcaaggctgcctgtgaaacatttgatgtgcgagggaagcaacacatccagatcccaaaattgtacacaagcaatgtgacttgggatccgcaccactacagacttgtccaagactctcagcccctcgacttatcaaaggcactgtcatcaatgcatgcaaaaaatgttttcactatgcgcctaaagtcccgacagaatctgcagagtcctacatctagtcgagcaacaatcctcgttgaactgagttgcgaggatggccaggggcttaactatcttcctggagagcatctcggagtgtgcccaggaaaccagcctgcccttgttcaaggcatcctcgagcgggtcgttgacgggccaacaccacaccaaacggttagactggaggcacttgacgagtccggaagctactgggtgagcgataagcgcctgcctccatgctctctgtcccaagcactcacgtactttttggatatcacaacccctcctacccaactgctgctccaaaagctggctcaggttgccaccgaagagcctgagcgtcagaggctggaggccttgtgtcagcccagcgagtacagcaagtggaaatttacaaatagccctactttccttgaagtccttgaggagtttcctagcctgcgagtttcggccggttttcttctctcacaacttccgatacttaagccgagattttacagcatctctagctcccgcgaccacactccaaccgaaattcacctcaccgtcgccgtggtaacctaccacacaagggacgggcaaggtcccctgcatcacggcgtgtgttctacttggttgaactcactgaagccccaggatccagtcccctgttttgtgagaaacgcctctgggtttcatctgcctgaagatccttctcacccatgtatcttgattggtcccggtacaggcatcgcacccttccggagcttttggcaacagcgtctacatgactctcagcataaaggggtcagaggagggcgtatgaccctggtttttggatgcagacgacccgacgaggatcacatttaccaggaggaaatgctcgagatggctcagaagggcgttctccatgccgtccatacagcttacagcagacttcccggaaagccaaaggtctatgtgcaggatattttgcggcagcagctcgcctccgaagtgctccgggtgctccacaaggagcctggtcacctctacgtctgtggagatgtccgaatggccagagacgtggctcataccctaaaacagctggttgctgctaagttaaagctgaatgaggaacaagtcgaagactatttctttcagctgaaatcacagaaacgctaccatgaggatattttcggagcagtgtttccctacgaagctaagaaggatcgagtggcggtgcaaccctcttcgctggagatgtccgccctgtag

SEQ ID NO: 232785 - DNA, 3345 bp, synthetic construct
  misc_feature 1..3345: note = Description of Artificial Sequence: Synthetic coding sequence
  source 1..3345: mol_type = other DNA
atggcatgtccctggaagttccttttcaaaacgaagttccatcagtatgccatgaacggtgagaaagatattaacaataacgtcgaaaaagctccatgtgccacgtccagcccggtgacccaggacgacctgcagtatcacaaccttagtaagcagcagaatgaaagcccccagccccttgtggagacagggaagaaatcccccgagtccctggtcaagctggacgccacgcctctgtcctcaccaagacacgtcaggataaaaaactggggttcaggaatgacctttcaagacacgctacaccacaaggccaaagggatattgacctgccggtctaaatcctgcctgggcagcatcatgacacccaagagcttgactagaggcccacgcgacaaacctactcctcccgatgagctgctgccccaggctattgagtttgttaatcaatattacggcagctttaaggaggccaagatcgaggagcatttggcccgagttgaggcagtgaccaaagaaattgagaccaccggaacataccagctcaccggtgatgagctgatatttgccactaagcaggcatggcgaaacgctcccaggtgtatcggcaggattcagtggagcaatctacaagtgtttgacgcccgaagctgcagcaccgcgcgtgaaatgtttgagcatatttgtcgccacgtccggtacagtacaaacaacggaaacatccgttcagccatcaccgtgtttccccaacggagtgacggtaagcacgactttcgagtgtggaacgcacaactgtgcatagatttggggtggaagcccaatgggagagaccccgagctgttcgaaatccctccggatctggttctggaggtcgcgatggagcacccaaagtacgaatggtttcgggagttggaacttaaatggtacgctctgcctgccgtggcaaatatgctgttggaagtgggcggactggagtttccgggatgcccatttaatggatggtatatgggcacagagatcggagtgcgagacttttgcgacgttcagagatacaatattttggaggaggtcggtaggcggatgggcttggaaactcataaactcgcgtcactttggaaggatcaggccgtagtggaaattaacattgccgtcctgcactctttccaaaagcaaaacgtcaccataatggaccaccattccgctgccgagagcttcatgaaatacatgcagaatgagtatcgatcccgtggcggatgtcccgcagactggatttggctggtacctccaatgtctggatccatcacccctgtcttccatcaggaaatgcttaattatgtcctttcccctttctactattatcaggtcgaggcatggaagacccacgtctggcaggacgagaaacgcaggccgaagcggcgagaaatccctctcaaggtcctagttaaggctgtgctgtttgcctgtatgttaatgcgcaagacgatggcatcccgggtgagggtgactatactctttgctactgaaactgggaagtctgaagcccttgcatgggatttaggggcactattttcatgtgcgttcaaccctaaagtcgtgtgcatggacaagtaccgactttcctgcctggaggaggagcggctgctactcgtcgtcacatcgacatttgggaacggggactgtccgggaaatggagaaaagctcaagaagagtctgtttatgctaaaagagctgaataataagtttcgttatgcagtgttcggacttggctcttctatgtatccgagattttgtgctttcgcccatgatatcgaccagaaactttctcacttgggtgcctcacaactcaccccaatgggggaaggagacgagctaagcggccaggaggacgcttttaggagctgggccgtgcaaacctttaaagcggcatgtgaaacctttgacgtacgagggaagcagcacattcaaattccgaagttatacactagtaatgttacttgggatccacaccactacagactcgttcaggatagtcagcctttagatctctcgaaggccctaagctccatgcacgcgaaaaacgtctttaccatgcgcctcaaatcccggcagaacctgcaatctcctacgagttctagagcaactatacttgtggaactgagttgtgaggatgggcagggtctgaactacttgcctggagagcatctcggcgtatgtcccggaaaccagcctgcactggttcagggtattctagaacgcgtggttgacggccctaccccccatcagactgtaaggctggaggcgttggacgagtccgggagttactgggtgtccgacaaacgactcccaccttgtagcctttcgcaggcgttaacttatttcctggacataaccacccctcccacccagctgcttttgcagaagttggctcaggtggcaaccgaggaacccgagcgacagagactggaggctctgtgtcaaccgtctgaatatagtaagtggaagttcacaaattctcctacgtttctggaggttttggaagagttccccagtctgagagtcagcgctggtttcttgctgagccagctgcctatcctcaagccccgattctactcaatctcttcttcccgagaccacacgccaaccgaaatccatctgaccgtcgccgtagtgacataccacacgagagatggccaaggccctttgcaccacggagtctgtagtacatggctgaacagccttaaaccccaggaccccgttccttgtttcgtccgcaacgcttcagggtttcatctgccggaagatccctcccacccctgcatcttgattggccctgggaccggtattgccccattccgctctttttggcagcaacggctccatgactcccagcacaagggcgtgcggggtggcaggatgacattggtgttcggctgtagaaggcctgatgaggatcacatctatcaagaggagatgttggagatggcacaaaagggggtgctgcatgccgttcatactgcttacagtagactgccgggtaaaccgaaggtgtacgtccaggacatacttcgccagcagctggcttcagaggtgctccgcgtgttacacaaggagcctgggcacttgtacgtctgcggggacgtgcgcatggcccgtgatgtagcacataccctaaagcagttggtagccgctaaacttaaactcaacgaagaacaagtggaggactatttttttcagctcaagagccagaagagataccatgaggatatttttggcgctgtgtttccttacgaggcaaaaaaggacagagtggcggtacagccaagttcgctggagatgtcagctctttag

SEQ ID NO: 232786 - DNA, 3612 bp, synthetic construct
  misc_feature 1..3612: note = Description of Artificial Sequence: Synthetic coding sequence
  source 1..3612: mol_type = other DNA
atgggaaatctgaaatccgtagctcaggagccaggtcctccctgcgggctgggcctgggactcggtttaggattgtgtggaaagcaaggcccagccactccggctccagagccctcccgcgctcctgcttctctgttaccaccagcgccagaacactcgccgcctagttccccactcactcagcctcccgaggggccaaaattcccccgagtgaaaaactgggaagtgggaagcatcacgtacgacacgctcagtgcacaggcccagcaagacgggccttgtacacctagacggtgcttgggaagtctggttttccctaggaagcttcaagggaggcctagccccggaccccctgctcctgagcagctcctcagtcaggcgagagacttcatcaatcagtactactcttcgatcaaacgtagcggttcacaggcgcatgaacagagactacaggaggtcgaagcggaagttgccgctacagggacatatcaactgagggaatcagagctggtgttcggggctaaacaagcatggcgaaacgccccaagatgcgtcggcaggatccaatggggcaagctccaggtgtttgatgctagagactgcaggagtgcccaggaaatgttcacatatatttgtaatcatatcaagtatgcaactaatcgtggaaaccttcggtctgcaattaccgtgtttcctcagcgctgccccggtcgcggtgatttccgcatatggaattctcagctggttaggtacgctggatataggcagcaggatgggtcagtgcgtggtgacccagccaatgtcgaaatcacagaattgtgcatccaacatggctggactcctgggaatgggcgttttgatgtgttgcccctgctgttgcaggccccagacgatccacccgaactgtttctgctgccccctgaactggtactcgaggttcccctggagcatcccacacttgaatggttcgccgctctggggctgaggtggtacgccctgccggcagtgagtaacatgcttcttgagattgggggtctggaattccctgccgctccattctctggatggtatatgtcaacagagatagggacaaggaacctgtgcgatccccacagatataacatcctggaggatgtggctgtgtgtatggacctggatacacgcactacctcaagcctctggaaagacaaggctgccgtggaaataaatgtggctgtcctccactcctatcagctcgcaaaggtgacaattgtggaccatcacgccgctaccgcctcttttatgaagcacctcgaaaatgagcaaaaagcacgtggaggctgccccgctgactgggcatggatcgtgcccccaatatccgggtctctcactcctgttttccaccaggagatggtgaattatttcttgagcccggcattcaggtaccagcccgacccctggaaaggatccgctgccaaaggcacgggcatcacccgcaagaaaactttcaaggaagtggcaaacgccgtgaagatctccgcctcattaatgggtaccgtgatggccaagcgggtaaaggctaccatcctgtatggctcagaaacaggccgtgcccagtcttatgctcagcagttgggcaggttgtttaggaaagcatttgatcccagagtcctgtgcatggacgagtacgacgtagtaagcctggagcatgaaactctggtattggtagtgacatctacattcggaaacggtgacccccctgagaatggagagtccttcgctgctgcccttatggagatgtccgggccttataactcatcccctagaccagagcagcacaaatcctataagatccgtttcaatagcattagctgctcggatccattggtaagcagttggcgcaggaaacgcaaagaaagctccaatacagactctgccggagccctggggacattgcggttctgtgtatttggcctgggatctcgtgcttatcctcacttttgcgctttcgcgagggcagtcgatacacgccttgaggagctaggaggcgagcgcctgctgcagcttggccagggagacgaactatgtggacaggaggaagcgtttcggggatgggctcaggccgcattccaagcagcctgtgagaccttctgtgtgggcgaagatgctaaagccgctgctcgggacatattctcccccaagagatcttggaagagacaaaggtaccgactctccgcacaggctgaaggtctgcagctccttccgggactgatccatgtacaccgcaggaagatgttccaagccaccatccgatcggtggaaaatctgcagagcagtaagtcaacgagggctaccattctggttagattagacacgggcggtcaggagggcctacaataccagccaggggatcatattggagtttgtcctcccaatagaccaggcttagtggaagccttactgtctcgggttgaggatccacccgcacctacagaaccggtcgcagtagagcagctggaaaagggtagtcctggcggaccacctccaggatgggtgcgagacccacgactgccgccatgcactctgcgccaggctcttacgttttttctggacatcacatccccaccatcacctcagctccttcggttactgtcaacactcgctgaggaaccacgtgagcagcaggaactggaggccttaagccaggaccccaggagatatgaagaatggaaatggtttcggtgccccaccctcttggaagtgttggagcagtttcccagtgtggccctacccgctcccctgctattgacacagctgccgcttctccagccacggtactattctgtgtcctccgccccttccactcatcccggagagattcatctcactgtggccgttttggcctacaggacccaggacggtctaggcccactgcattacggtgtttgttccacctggctctcccaattaaaacccggtgatcccgtgccatgttttattcgaggcgcaccctcctttaggttaccgcctgatccgtcgctcccctgcatcctggtgggcccagggaccgggatcgccccatttcgcggattttggcaggaacgcctccatgatatcgagtctaagggccttcagccaacgcctatgacattagttttcgggtgtagatgctcccaactcgatcatctgtaccgcgatgaagttcagaacgcacaacagaggggtgttttcgggagggttctgacagcatttagtcgcgaaccagataacccgaagacatacgtgcaagatatcttaagaaccgaactggccgcagaagttcatagagtcctgtgtcttgagcgtgggcacatgtttgtgtgcggtgatgtcacaatggccacaaacgtgctgcaaacggtgcagcgcattcttgccactgaaggggatatggaactcgatgaggccggtgatgtcataggcgtgctgcgagatcagcaacgctaccacgaagacattttcggcctgacattacgcactcaggaggtgacctcccgtattaggacacaatctttttccctgcaggaacgccagctgcgtggggctgtcccgtgggccttcgacccccctgggagtgacaccaatagcccttag

SEQ ID NO: 232787 - DNA, 2994 bp, synthetic construct
  misc_feature 1..2994: note = Description of Artificial Sequence: Synthetic coding sequence
  source 1..2994: mol_type = other DNA
atgtttacatatatctgtaatcacatcaaatatgccacgaaccggggaaatctccgcagtgcaataacggtgtttccccagcggtgtcccggaagaggtgacttccgtatctggaacagtcagctggtgcgctatgcaggctacagacaacaggacggatccgtgcgaggggacccagcgaatgtagagataaccgagctgtgcatccagcatggctggactcccggtaatgggaggtttgatgttctcccattactgttacaagcccctgatgacccccctgagctcttcctccttcccccagaactggtccttgaggttccacttgaacaccccacgctggaatggtttgcagccctgggattgagatggtacgctcttcccgctgtgtctaatatgctcctggagataggagggctggagtttccagccgctccgtttagtggctggtacatgtcaaccgaaattggtacaagaaatctgtgcgatccccaccggtataacattctcgaagacgtggccgtgtgcatggacctggatactaggacgacaagctcattatggaaggataaggcagcggttgagattaatgtggctgtactgcactcctatcagctggcaaaagttactatcgtggaccatcacgcagctacagcatcttttatgaagcacctggaaaatgaacaaaaagccaggggcggatgtccagctgattgggcatggatcgtgccccctatcagcggatctctaaccccagtgtttcatcaggaaatggtgaactacttcctgtcccctgcatttagataccagccagatccgtggaagggctccgccgcaaaggggactggtataacccgcaagaaaacgttcaaagaagttgcaaacgccgtgaaaatatctgcttcccttatgggcacagtgatggctaagcgtgtgaaggccaccattttgtacggttccgagacaggacgcgcacaaagctacgctcagcagctgggaaggctcttccgaaaagccttcgatcctagagttctttgtatggatgagtacgatgtggtctctttggagcacgaaacccttgtgctcgttgtcaccagcactttcggtaacggagacccacctgagaacggcgaatccttcgcagccgctcttatggaaatgagcggcccttacaattcttccccaagacctgaacagcataagtcatataaaattcgcttcaatagcatcagctgttctgacccgctggtgtcctcatggaggaggaaaaggaaggagagtagcaataccgactcagcaggggctctggggaccttgagattctgcgtgttcggcctcggctctcgggcatacccacatttttgcgccttcgcacgtgcagtggacactcgactcgaagaactcgggggagagcgcttactccagctggggcaaggagatgagctgtgcggccaagaggaggcatttagggggtgggcacaagctgccttccaggcggcttgcgaaaccttctgcgtcggggaggacgctaaagccgcagcacgggatattttctccccaaaacgctcttggaaacgccagcggtacagattgagcgctcaggccgagggtctgcagctgctgcccggattgatccatgtgcatcggcgaaagatgttccaggcgacaatcagatccgtcgaaaacctacaaagcagcaaaagtacccgcgcaacaattctcgtcagactggatactgggggacaggagggcctgcagtaccagccaggcgaccatattggcgtgtgccctcctaataggccaggccttgtcgaggcgcttctctcccgagtggaggacccaccagccccaaccgagcccgtcgccgtggagcagctcgagaaaggcagccccggtggtcctcccccaggatgggtgcgggaccctaggctgcccccttgcactttgagacaggcgttgacattttttcttgatataacaagtcccccatcgccacagcttctgcgcttactgtcaaccttggcggaggaaccaagagagcagcaggagttggaagctctttcccaggatccgcgtaggtacgaagaatggaaatggtttcgatgccctacactgctggaagttctcgaacagttcccctcagtggcgctgcccgcacccttattgcttactcagctccctttactgcagccccgttactactccgtatcatcagccccatcaacccatccaggtgagatccacctgaccgtggctgtgctggcctatcggactcaggatggtttgggcccacttcattacggagtatgtagtacgtggctgtcacagttgaagccaggtgaccccgttccctgtttcatcaggggcgctccatccttcagactgccacctgaccctagtctcccgtgcattctggtcggaccaggtacaggcatcgcccctttccggggattttggcaggagagattgcacgatattgagtcaaagggcctgcagcccacgcctatgactttagtgtttggatgtcgctgtagtcagctggaccacctgtatagggatgaagttcaaaacgcacagcagagaggtgtcttcggtcgggtgcttaccgctttctctagagaaccagacaacccgaagacatatgtgcaggatattctgcggactgagctggctgctgaggtgcaccgggtgctttgtttagaacgcggacacatgtttgtatgtggggacgtcacaatggctactaacgtcctgcagactgtccagcgcatactagccaccgaaggtgacatggagctggatgaggcaggagatgtgattggcgttctgcgtgaccaacagcgttatcacgaggacattttcggcctgacactcaggactcaggaagtgacgagcaggatccggactcaaagcttttccctccaggaacgccagctgagaggcgctgtcccctgggcttttgatcctcctggttctgatacgaattccccctag

SEQ ID NO: 232788 - DNA, 1521 bp, synthetic construct
  misc_feature 1..1521: note = Description of Artificial Sequence: Synthetic coding sequence
  source 1..1521: mol_type = other DNA
atgcgagaccccctgacggactgtccgtacaacaaggtgtataaaaacttgaaggagttttcacagaatggcgagaatttttgtaaacaagtgactagtgtccttcaacagagggcaaaccttgagatctcttatgcaaaagggctacagaagcttgcaagtaaactctctaaggcattgcagaacacaaggaaatcgtgcgtctcttcagcttgggcctgggcatctgaaggcatgaagtccacagcggacctgcaccagaagctgggcaaagcaattgaactggaggcaattaagcccacatatcaggtgctgaatgtccaggagaagaagcgcaagtcactggataatgaagtggaaaagaccgcaaatctcgtgatttcaaactggaaccagcagatcaaagctaaaaaaaagcttatggtctctactaagaagcatgaggctctgtttcaactcgttgaaagctcaaagcaaagcatgacagagaaggagaagagaaaactgcttaataagctgactaaatctacagagaagctggagaaggaggatgagaattactaccagaagaacatggccggatattcaaccagactgaaatgggagaataccctagaaaactgttaccagagcattctggaacttgagaaggagcggatccagctgttatgtaataatctaaatcaatacagccagcacatcagcctgtttggacagaccctgactacctgccacacgcaaatacattgcgcaatatcaaagattgatatagagaaagatatccaagctgttatggaagagacagcaattctaagtactgaaaataagtccgaattccttcttaccgattattttgaggaagacccaaattctgctatggacaaagagaggcgcaagtccttgttaaagcctaaactccttcgtctgcagcgggacatcgagaaggcttcgaaggataaggaaggtctggaacggatgttgaaaacatactcttctaccagctctttttctgatgctaaatcacagaaggacaccgcagctttaatggacgagaacaaccttaagctcgatctgctggaagcaaattcctacaaactgtctagcatgctggctgagctcgaacagcgaccccagcccagccacccctgcagtaatagcatctttcgatggcgagaaaaagagcacactcactcatacgtgaaaattagccgaccttttctcatgaagcgtctggaaaacatcgtgtctaaagcatcctccggcggacagagcaacccaggaagcagtactcccgctcccggagccgctcagctgagctccaggctgtgtaaggccctgtactccttccaggcccgacaggatgatgaattgaatctagaaaagggggatattgtgattatccatgaaaagaaggagggcggatggtggtttggaagtctaaatggaaaaaaagggcactttcccgctgcctacgtggaagaactcccttccaacgcaggcaatacagccaccaaagcctag

SEQ ID NO: 232789 - DNA, 1287 bp, synthetic construct
  misc_feature 1..1287: note = Description of Artificial Sequence: Synthetic coding sequence
  source 1..1287: mol_type = other DNA
atgaaaagtactgcagatctgcatcagaaactgggaaaggccatcgaactggaggccatcaaaccaacctatcaggtgttaaacgtccaggagaagaaacgcaagtctctcgataacgaggtggaaaagaccgcaaacctggttatttcgaattggaatcagcaaatcaaggctaagaaaaaactcatggtttcaaccaagaagcacgaagcactgtttcagcttgttgagagctctaaacaatccatgaccgagaaggagaagcggaagctgctgaacaaactgacaaaaagcaccgaaaaactcgagaaggaagacgagaactactatcaaaagaatatggctggttattctacgcgcttaaagtgggagaacaccttggagaactgctaccagtcaatacttgagctggagaaggaaaggattcagctgctttgtaataacctgaatcagtattcccagcatatctctctctttggacagacactgactacatgtcatactcagatccattgcgccattagcaagattgatattgagaaggacatccaggcggtcatggaagagaccgccatccttagcacagaaaataaaagcgagtttctgcttacggactacttcgaggaggatcccaacagcgccatggacaaggagcggaggaaatccctattgaagccaaaacttctccgactccagagggatattgaaaaagcttcgaaagacaaggagggccttgaaaggatgcttaaaacctatagctccacctcgtcgtttagcgatgccaagtcccaaaaggacactgccgcactcatggacgagaataaccttaaactggacctgctggaggccaatagttacaagctctcctcgatgctggccgaactcgaacaacgtccacaacctagccacccctgtagtaacagtatattccgctggcgtgagaaagagcacacccactcatacgtcaagatctcacgtccttttctcatgaagaggcttgagaacatcgtgtcaaaggctagctccggcggacagtctaaccctggatcatctacacccgcacctggagcagcgcagctgtccagtcgactctgtaaagccctgtacagtttccaggcaaggcaagatgacgagctgaacctcgagaagggtgacattgtaattatccatgaaaaaaaagagggtggctggtggtttggctccctcaatgggaagaaaggccactttccagcagcttacgtggaggaactcccaagcaatgccggtaacactgccactaaagcctag

SEQ ID NO: 232790 - DNA, 1692 bp, synthetic construct
  misc_feature 1..1692: note = Description of Artificial Sequence: Synthetic coding sequence
  source 1..1692: mol_type = other DNA
atgcgcgaccctctgacggattgcccctataataaggtttacaaaaacctgaaggaattttcacagaatggcgaaaatttttgcaaacaggtgaccagtgttctgcagcaaagggccaacctcgagattagttatgcgaagggactgcagaaattggccagcaagctgagtaaggcactgcagaatacccggaaatcctgcgtgagtagcgcttgggcttgggcctctgagggcatgaaaagcactgccgatctgcaccaaaagctgggtaaagcaattgagctggaagcaatcaaacctacttatcaggtgctgaacgtgcaggaaaagaaacggaaatcgctcgacaacgaggtcgagaaaaccgccaatttggtaattagcaactggaaccagcagattaaggccaaaaaaaagctgatggtctccactaagaagcacgaggccctttttcagctggtcgaaagctccaagcagagcatgaccgaaaaggagaagcggaagctgttaaataagctcactaagtcaacggagaagctcgagaaggaggatgagaattactaccagaagaatatggcgggatactccacacgtctgaagtgggagaataccctggaaaattgttatcaggtgacccacagtatttgtctgtatgccttctgggtaaagcgcgcttggggcaagtgtgtcagtgatttgcgatatcaagatacctttctccccggaaacctcccacccctgtggtttggctacgacattgttaaaagattaattatgaggttgtgttccgtgtgcctacagagtatcttggaacttgaaaaagaacgtatacagctcttgtgtaacaatctcaaccaatatagccagcacattagcctgttcggtcagacattgacaacatgtcatactcaaatacactgcgcgatcagtaagatcgatatcgaaaaagacatccaggcggttatggaggaaactgccatcctgtctaccgagaacaaatcggagttcctgttgacagactactttgaggaagatccaaactctgccatggacaaagagcgacgcaagtccctgctgaaaccaaagttgctgcggcttcaaagagatatcgagaaagcctccaaagacaaagagggcttggagaggatgttgaaaacatattcttccaccagctccttcagcgacgcgaagtctcaaaaagacactgcggcactcatggatgagaacaaccttaagctcgatctgcttgaagctaactcatacaagttaagcagcatgctggccgaactggagcaacgcccacagccctcccacccatgtagcaactccatctttagatggcgcgagaaggaacatacacacagttatgtgaagattagccggccattccttatgaaaagactcgagaatatcgtaagcaaagcgtctagcggcggtcagagcaaccccggtagcagcacaccagcgcctggagcagcacagttatcttctcgactttgcaaggcactgtactccttccaagcaagacaggacgatgaattaaacctcgagaagggagacattgtgattatccatgagaaaaaagagggtggttggtggttcggcagcctcaatggcaagaaagggcatttccccgctgcatatgtagaagaactgccctccaacgcaggaaatactgctactaaggcctag

SEQ ID NO: 232791 - DNA, 1692 bp, synthetic construct
  misc_feature 1..1692: note = Description of Artificial Sequence: Synthetic coding sequence
  source 1..1692: mol_type = other DNA
atgagagaccccctgacggactgcccatataataaagtttacaaaaatttgaaggaattttcgcagaatggggaaaacttttgcaagcaggtgaccagcgtgcttcagcaaagagccaacctggagatatcctatgccaaaggacttcagaagcttgcctctaaactctccaaggctctgcagaatactcgcaaaagctgtgtctcatctgcatgggcctgggcctctgagggaatgaaatcaaccgcagatctgcatcagaagctggggaaggccatcgagctggaagctatcaagccaacttaccaggtcctcaatgttcaggagaagaagcgcaagtccctcgataacgaggtcgaaaagactgctaacttagttattagtaactggaatcagcagatcaaggccaagaagaagctaatggtatccacaaaaaaacatgaggcactgttccaactggttgaaagctctaagcaatcaatgacagaaaaagaaaagagaaaattacttaataagttaacgaagagcactgagaagctggaaaaggaggatgagaactattaccagaagaatatggcgggatactccacccgacttaagtgggagaatacgctagaaaattgctaccaggttacccacagcatatgcttatatgccttttgggtcaaaagggcatggggtaaatgtgtaagcgatctgcgataccaggacaccttcttgcccggaaatttgcctcccctctggttcggatacgatatagtcaagagactcatcatgaggctgtgttccgtctgcttgcagagtatcctggaactggaaaaggagaggatccagctgctctgtaataacctcaaccagtacagtcagcacatttccctatttggccagaccctgacgacatgccacacccagatacactgcgcgattagcaaaatcgacatcgaaaaggatattcaagctgtgatggaagagaccgcgatcttatcaacagagaacaagtctgagttcctgctgactgattacttcgaagaagatcccaacagtgccatggacaaagaacggagaaaatccctgctgaagccaaagctgctccgactgcagagggacattgagaaagcctccaaagataaagagggcctggaacgtatgctgaaaacctactcaagcacaagtagcttctctgatgccaaatcccaaaaggatactgccgcacttatggacgaaaacaacctcaagctcgatctcctggaggccaattcctacaaattgagttccatgctggcagagcttgaacaaagacctcaaccatcccacccctgtagcaactctatatttcgatggcgggaaaaggaacatacccacagctacgtcaaaatctcacgccctttcctgatgaagagattagagaatatcgtgtctaaagcctcaagcgggggtcagtcgaaccccggtagcagtacccctgctcccggagccgcacagcttagcagcaggctatgcaaagccctttattctttccaggcaagacaggacgacgagctaaacctggagaagggcgacatcgtgattatccacgagaaaaaggaagggggatggtggttcggtagtctaaacgggaaaaagggtcattttccggcagcatatgtggaagaactgcctagcaacgctggcaacacagcaactaaggcttag

SEQ ID NO: 232792 - DNA, 939 bp, synthetic construct
  misc_feature 1..939: note = Description of Artificial Sequence: Synthetic coding sequence
  source 1..939: mol_type = other DNA
atgacatttggcctgcgcaagcgtctcagcgaggagcgcggtttcagcctcatgccaagagccatggcaatcagctcatcatcatgcgaactccccctggtcgccgtatgtcaggtgaccagtacaccggacaagcaacagaactttaagacttgtgccgagctggtgcgcgaggccgcaagattgggagcttgcctcgccttcctgccggaggccttcgacttcatcgcgagagaccctgctgagacacttcatctgtccgagcccctcggtggaaagctgctggaagagtacactcagctggccagagagtgcggcctgtggctcagtttagggggatttcacgagcgaggccaggactgggaacagacacagaagatatataactgtcatgtcctgctgaacagcaaaggcgctgtcgtcgccacataccgaaaaacacatctgtgcgatgtggagattcccggtcagggtcctatgtgcgagagcaacagcaccatgcccggacctagcctcgaatcaccagtgtccactcccgctgggaaaataggactggctgtgtgttacgacatgcggtttcccgagctcagccttgcccttgcacaagccggtgcagagatacttacatatccatccgctttcggaagtattaccgggccagcacactgggaagtcctgctgcgagcacgggcaatagagacccagtgttatgtagtcgccgcagctcagtgtggcaggcaccatgagaaacgcgcatcatacggacattctatggttgtggatccatgggggacagtcgtggcaagatgttccgagggtccgggtttatgcctcgccaggatcgacctgaattatctgcgacagttgcggaggcacctcccagtgtttcaacatcgcaggccggacctgtacggcaatttgggtcaccctctcagctag

SEQ ID NO: 232793 - DNA, 732 bp, synthetic construct
  misc_feature 1..732: note = Description of Artificial Sequence: Synthetic coding sequence
  source 1..732: mol_type = other DNA
atgctcgggttcataacacgaccccctcatagattcctgagtttactctgtccaggcctcagaataccgcaactatccgtgctgtgtgcacagcccaggcctagagccatggcgatctcctccagctcctgcgagttgcccctcgtggctgtgtgccaagtcacttccacccctgacaaacagcagaacttcaagacctgcgcagagctggttcgcgaagccgctcggcttggagcgtgcctggcctttttgcccgaagcattcgactttattgctcgagatccagccgagactttgcatttgtccgaaccactgggaggaaaactacttgaagaatacacccaactagctcgggagtgcggactctggctgtccctaggaggtttccacgaaagggggcaggattgggaacaaacccagaagatttacaattgccacgttttactaaactcaaagggtgctgtcgtggctacttatcgaaagacacatctctgtgacgtcgagattccaggacagggaccaatgtgtgaatccaattctactatgccgggtccatcactcgagtccccagtgtcaactccagctggtaagatcggcctggctgtatgttacgacatgcggttccctgagctcagtttagcactggcccaggccggagctgagatcctgacctatccctccgctttcggctccataacgggaccagcccactgggaaccagtatcttcttag

SEQ ID NO: 232794 - DNA, 984 bp, synthetic construct
  misc_feature 1..984: note = Description of Artificial Sequence: Synthetic coding sequence
  source 1..984: mol_type = other DNA
atgctcggcttcatcacgaggccgccacaccggtttctgtctcttttgtgcccgggattacgcattccccagctcagtgtgctctgtgcacaacctaggcctcgcgctatggccatatcctcaagttcctgtgaactgccactggttgcggtatgtcaggtcacatcgacgcctgataagcagcagaactttaagacctgcgcagagttggtgcgggaagccgcacgcttgggagcatgtctggcgtttctgccagaggctttcgactttatagcccgagatccagccgaaaccctgcatctctctgagcccctggggggtaagctgcttgaggaatatactcaactagcacgcgagtgtgggttgtggctatcgctgggcggatttcatgagagggggcaggactgggagcagacacagaagatttataactgtcatgtgctgttgaacagtaaaggtgccgtggtggcaacctacaggaagactcatttgtgcgatgtggagattccgggtcaaggcccaatgtgtgagagcaattcaacaatgccgggtccaagtcttgaaagccctgtgtctacccccgctggcaagattggtctggccgtgtgctacgacatgaggttcccggagttgtccctggccttggctcaggccggagccgaaatactcacatacccatccgccttcggtagcataacaggacctgcccactgggaagtcctcttgcgcgctcgggctatcgagacccagtgctacgtcgtggccgctgcgcagtgcgggagacaccacgagaagcgtgcctcctatgggcacagcatggtggtcgatccatggggaacggttgtggcccgttgcagcgagggacctggcctgtgtctcgctcggatagatctgaactatctccgacagcttaggagacacctccccgtgttccagcacagaaggcccgatctgtatgggaatctgggtcaccctctctcatag

SEQ ID NO: 232795 - DNA, 876 bp, synthetic construct
  misc_feature 1..876: note = Description of Artificial Sequence: Synthetic coding sequence
  source 1..876: mol_type = other DNA
atggccattagtagcagttcatgcgagctgcctttagtggccgtatgtcaagtgaccagtaccccagataagcagcagaattttaaaacctgcgccgagttggtcagagaagcagcccgactgggcgcatgcctcgcgtttctgcccgaggcgtttgacttcatcgcgagagacccagcggagacactgcatctcagcgagccactggggggtaaattactggaggaatacacacagttggcccgagagtgcggactgtggctatcactgggcggttttcacgagcgtgggcaggactgggagcagacgcagaaaatctacaactgccacgtgctcctcaactccaaaggggcagtcgtggcaacctacagaaagacgcatctgtgtgatgtggagatccccggacaaggcccaatgtgcgaatctaacagcactatgccgggaccatcactggagagccccgtctctacccctgctggcaagattggtttagctgtctgctacgatatgaggtttcccgagctatctcttgccctggcccaggcaggcgcagagattctcacttacccaagcgctttcgggtcgattacaggacccgctcactgggaagtgctcctcagagctagggctatcgaaacacagtgctatgtagtcgccgctgctcagtgtggaagacaccacgagaagagggcttcctacgggcattccatggtcgtggatccttgggggaccgtcgtcgcccgttgtagcgagggaccagggctgtgtctggccaggattgatctcaattatctgcgacagctgaggcggcacttgcctgtatttcagcaccgcagacctgacctctatgggaacctggggcatcctttatcatag

SEQ ID NO: 232796 - DNA, 822 bp, synthetic construct
  misc_feature 1..822: note = Description of Artificial Sequence: Synthetic coding sequence
  source 1..822: mol_type = other DNA
atgtccctgacaaatacgaaaaccggcttcagtgtaaaggacattctagacttgcccgacaccaatgatgaggaaggaagcgtagctgaaggacccgaagaagaaaacgaaggccctgaacccgcaaaaagggccggaccactgggacagggagctctggacgccgtgcagagtctccctttaaagaacccgttctatgactccagtgataacccatatactagatggttggcctccacagaaggcttgcagtattctttgcatggtctggccgctggcgcaccccctcaggactcatcctcaaagtctcctgagccatcagccgacgaatctcctgataatgacaaggagactcccggagggggaggagatgctgggaaaaagagaaagaggagagtgctattttctaaggctcagacatacgaacttgaacgacgtttcagacagcagaggtatctgtctgcaccggaacgcgagcacctggccagccttatacggctcacacctactcaggtcaagatttggtttcaaaatcaccggtataaaatgaaacgagccagggccgagaaaggaatggaggtgacgccccttccctcacctcggcgagttgcggttccagtgctggttcgcgatggtaaaccctgtcacgctctgaaagcccaggatctcgccgcagccaccttccaggcaggaatccctttttctgcctatagcgcgcaatctctgcagcatatgcagtataacgctcaatatagcagcgcctcaacacctcagtatcccacagcgcatcctctcgtacaggcccaacagtggacatggtag

SEQ ID NO: 232797 - DNA, 1065 bp, synthetic construct
  misc_feature 1..1065: note = Description of Artificial Sequence: Synthetic coding sequence
  source 1..1065: mol_type = other DNA
atgtcgctgtcacccaagcacaccaccccattcagtgtgtctgacatcttatcccctatcgaggaaacctacaagaagtttagcggtgcaatggacggtgcacctcctggactaggagcgccactcggcgcagccgcagcatatcgagccccacctcccggtcccagctctcaggcagccaccgttgccggtatgcagcctagccacgcaatggcgggacacaatgctgcagccgctgccgctgctgctgcagctgcagctgcagccgctgcgacatatcacatgccacctggagtctcacaatttccgcatggggctatggggtcatattgcaacgggggtctgggcaacatgggagaactccctgcctataccgacgggatgcggggaggagccgcaactgggtggtacggagcgaacccggatcctagatactcttctatctcacgcttcatgggaccatctgccggagtaaatgttgctggaatggggtcactgactggcatcgccgatgcagccaagagtctaggccctttacacgctgccgctgcagcagctgctccccgtcgcaagcgacgggtcttatttagccaggcccaggtctacgagttggaacgccgattcaagcagcagaaatacttgtctgcacctgagagagaacatcttgcgtccatgatacacttgacaccaactcaagtgaaaatttggtttcagaatcatcgctacaagatgaaacgccaagcaaaggataaggcggctcaacagctgcagcaggaagggggtttgggcccaccaccacctccacccccatccccacgcagggtggccgtgcctgtgctggtgaaagatggaaagccttgtcagaacggggcatctactccaacaccagggcaggcaggtccccagcctcccgctcctacacctgcccctgagctggaagaactaagcccatccccccctgccctccatggaccagggggagggcttgccgctctcgatgcggcagctggagagtattcaggtggtgtgctgggggctaacctgctttacggaagaacttggtag

SEQ ID NO: 232798 - DNA, 975 bp, synthetic construct
  misc_feature 1..975: note = Description of Artificial Sequence: Synthetic coding sequence
  source 1..975: mol_type = other DNA
atgtttccttctccagccctcactcctacccctttctccgtaaaagacatcctgaacctggaacagcagcaaagaagcttagccgctgccggagagctatccgccaggctggaggctacactggcaccctccagttgtatgttagctgcttttaaaccagaggcttacgcaggtccagaagccgcagcccctgggttgccagagcttagagctgagctcgggcgagcgccaagtcccgctaaatgcgcaagcgcattcccagcagcccctgccttctatcctagagcttactctgatccagatcctgcgaaagatcctcgcgctgagaaaaaagagttgtgtgccctgcagaaggctgtggagcttgagaaaaccgaggccgacaacgccgagcgccctcgtgctcgtaggcggcgtaagcctagagtactgttctcccaggcccaggtgtacgagttagagaggaggtttaagcagcagaggtacctttctgctccggagagggaccagctggcatctgtgctaaaacttacctctactcaggttaagatttggttccagaatcgccgttataagtgcaaacggcagagacaggatcaaacattggaactcgtgggactgccccctcctcctcctccaccagcacgcagaatagccgttccagtgctggtgagggatggaaagccgtgtttaggtgatagcgcgccttacgcaccagcctacggcgttggcctgaacccttacggttataacgcctaccccgcttatccaggatatggcggagcagcatgcagccccggttacagttgcaccgccgcttatcccgcaggtccttccccagctcagcctgccaccgccgctgctaataataattttgttaattttggagtcggcgatctgaacgccgtccagagccctggtattcctcaatctaattcgggcgtgtccactttacatgggatccgcgcatggtag

SEQ ID NO: 232799 - DNA, 339 bp, synthetic construct
  misc_feature 1..339: note = Description of Artificial Sequence: Synthetic coding sequence
  source 1..339: mol_type = other DNA
atgtttccgagtcccgcactcacacctacacccttttcagtcaaggacatcctgaatctagagcagcagcagaggtccctggcagccgctggagagctcagcgccaggttagaggccaccctcgcacccagcagttgcatgctggctgcctttaagcctgaggcctacgccggacccgaggctgccgctcccggactgcctgaactgcgcgcagaactcggcagagccccaagcccagcaaagtgtgcctccgcctttcccgctgcgcctgcattctacccacgcgcttacagcgatcccgatccagcgaaagatccccgagcagaaaaaaaggcttag

SEQ ID NO: 232800 - DNA, 456 bp, synthetic construct
  misc_feature 1..456: note = Description of Artificial Sequence: Synthetic coding sequence
  source 1..456: mol_type = other DNA
atgtttccgtcgcctgctcttaccccaacccccttcagcgtaaaggacatcctaaatctggagcagcagcagaggagcctggccgctgcaggagagctgtcggcaagattggaagcgactctcgcaccctcctcctgtatgttggccgctttcaaaccggaggcatacgccggtccagaggcagcagccccaggacttcctgagctccgtgcggagctcggcagagcacctagtcccgcaaagtgcgcctccgccttccctgcggctcccgctttttatcctcgggcatattccgacccagatcccgctaaggacccacgtgctgagaagaagggatgtgagctaccaaggggtcaacgacctcccgtcctttttagctccgctctctctcagccggatttccttcagatgctttcagagacatgcagatggctccctgtccacctggcagaatag

SEQ ID NO: 232801 - DNA, 906 bp, synthetic construct
  misc_feature 1..906: note = Description of Artificial Sequence: Synthetic coding sequence
  source 1..906: mol_type = other DNA
atgcttctgtctcctgtgacaagcacaccattttctgtcaaagatatcctcaggcttgaaagggagcggagctgccccgcagcttctccacatccaagggtcagaaaatctcctgagaatttccagtacttgcggatggacgccgaacccagagggtccgaagtgcataacgcagggggaggcggtggcgatcggaagctagacggctcagagcccccaggcggtccttgcgaagccgtgctggagatggatgctgaacgaatgggggagccccagccagggcttaacgccgcatcgcctctgggtgggggaaccagagtgccggaaagaggggtgggtaacagcggcgacagcgtacgcggagggagatcagagcagccgaaagcacggcagaggcggaaacccagagtcctcttctctcaggcccaggtgctggccttggaaagacgttttaagcagcagcgctatctctctgcaccagagcgcgagcatcttgcttcagcactgcaactaacatctactcaggttaaaatttggttccagaatcgtcgctacaagtgtaagaggcagaggcaagacaagtctctggagctggctggacatccactgacgccacgcagggtggccgtgcccgtgctggtgagggatggtaaaccatgtctcggccctggacccggagccccagccttcccaagcccatattctgctgcagtgtcaccctatagctgctatggtggatatagcggcgcaccttacggcgctggctacgggacatgctatgccggagcaccctccggccctgctccacacacaccactggcaagcgctggcttcggccatggaggacagaatgcgaccccccagggccacttggcagcgaccctgcaaggagttagagcgtggtag

SEQ ID NO: 232802 - DNA, 660 bp, synthetic construct
  misc_feature 1..660: note = Description of Artificial Sequence: Synthetic coding sequence
  source 1..660: mol_type = other DNA
atggatgccgagcgcatgggggaaccacagcctggattgaacgctgctagtccactgggcggagggacacgggtacccgagcgtggcgtcggtaacagcggcgattccgtgcggggtgggcgatccgagcagcctaaggcacgccagcgccgaaagcccagagtgttgtttagccaggcccaggtcctggcgcttgagcgacgctttaaacagcagcgatacctgtccgctcctgagcgcgaacacctggccagcgccctgcaactcacaagtactcaggtgaagatctggttccagaatcggaggtataagtgtaagcgacaaagacaagataagtctttggagttggccggtcacccgctaactccacgcagagttgccgtccccgtcttggtgagagacggcaagccttgtctgggccctgggcctggagcaccagccttccccagcccttacagtgcggcagtctccccttattcttgctatggcggatatagtggtgccccttatggcgcaggttacggtacctgttacgcgggagcaccctctggtcccgctcctcacactcctctagcatccgccggtttcggtcatggaggccaaaatgccacccctcagggtcacttggccgctacgctgcaaggggtacgcgcatggtag

SEQ ID NO: 232803 - DNA, 720 bp, synthetic construct
  misc_feature 1..720: note = Description of Artificial Sequence: Synthetic coding sequence
  source 1..720: mol_type = other DNA
atggccacatcagggcgtttgtcttttacagtccgttctctgttggatttgcctgagcaggatgcacaacacctgccacggagggaaccggagccaagagccccacagccagatccatgcgccgcatggctcgacagcgaaagaggccactatcccagctccgacgagtcctcccttgaaacatcccctcccgatagtagtcagcgcccatctgccaggccagcctctccaggaagcgacgccgagaagcgaaaaaagcggagggtgttgttcagcaaagcacagacccttgaactggaacgtcggtttagacaacaacgttacctctcagcgccagaaagggaacagttagccagcctgcttcgtctgaccccaacgcaggtcaagatttggttccagaatcatcgctacaaactgaagagggcgagggccccaggcgctgccgagagtcccgacctggccgcatctgcggagcttcacgcggcaccagggctgcttcgtcgcgtcgtggtccccgtgctggtgcgcgatggccaaccatgtggcggaggaggtggaggagaggttggtactgcagccgcacaagaaaagtgcggagcccctcctgctgccgcatgcccactgcctggctatcccgcattcggaccaggctctgcactgggtctgtttccagcctaccaacatcttgcatcccccgcactcgtgagctggaactggtag

SEQ ID NO: 232804 - DNA, 1002 bp, synthetic construct
  misc_feature 1..1002: note = Description of Artificial Sequence: Synthetic coding sequence
  source 1..1002: mol_type = other DNA
atggccgtgcggggagccaatacactgacatctttcagcatccaggccattcttaacaaaaaagaggaacgtggcggactggccgctccggagggtcgtcccgctcccggaggaaccgctgcttccgtggcggctgctcctgcagtgtgctgctggaggctattcggggaaagggatgctggagcactcggtggggctgaagactctctgttagctagtcccgctggaactcggacagcagctggccgaaccgccgagagtccggaaggttgggactctgactccgcactttctgaggaaaatgagtcccggagaagatgcgccgatgcgaggggagctagcggagcgggtttggctggcggatcgttgtcgttgggccaacccgtatgcgagctggccgcaagcaaagatctggaggaagaggccgcaggtcgctctgactcggaaatgagcgcttctgtgtccggcgaccggtcacctaggacagaggatgatggagtcggccctagaggcgcacatgtgtctgccctgtgcagcggagctgggggaggcggtggctcaggccctgccggtgtggcagaagaagaggaggagccggctgcccctaaacccaggaaaaagcgatcccgtgccgctttctcccacgcccaggtctttgaattggaaaggcggttcaaccaccagaggtatctgagcggcccagaacgtgcggatctagcagccagtctgaaactgactgagacccaggtgaaaatctggttccagaaccgaaggtataagactaaacggagacagatggctgccgatcttcttgcctcagccccagccgcaaagaaagttgcagtcaaagtgctggtgagagatgaccaaagacagtatctgccgggagaggtgcttcgtcctccaagtctcctgccgctgcagccgtcttactactatccctactattgtctgccaggatgggctctgtccacctgcgccgcagccgctggtacacaatag

SEQ ID NO: 232805 - DNA, 798 bp, synthetic construct
  misc_feature 1..798: note = Description of Artificial Sequence: Synthetic coding sequence
  source 1..798: mol_type = other DNA
atggagtcaaacctacagggaaccttcctgttgaacaacactccactggcacagtttcccgagatgaaggctccagtttgtcagtattcagtccagaactctttttacaagctaagtccccctggccttggaccccagcttgccgcaggcaccccgcatgggataaccgacatcctttcgagaccagttgccgcacctaacaatagcctcctgagtgggtacccgcatgtcgctggcttcgggggacttagttcccaaggggtctactactcacctcaagttggcaattttagcaaggcaggaaacgagtaccctacaagaactcgaaattgttgggctgacacaggccaggattggagaggagggaggcagtgttccaatactcctgatcccctgagcgacagtatccacaagaaaaaacacacccgcccaacattcactggacaccaaatcttcgccctggagaagacctttgagcagactaaatacctggctggtcccgagcgggcacgactcgcttatagtttaggtatgaccgaatctcaagttaaggtatggtttcagaaccgtcggaccaagtggaggaagaagagcgcgttagagcctagctcatcgactccgagggcacctggaggcgcaggcgctggcgctggcggtgatagggcaccatccgagaacgaggacgatgagtataacaagcccctggatcccgattctgacgacgaaaagatccgcttgctactcaggaagcacagggcagcgtttagcgtgctttccctgggggctcactctgtctag

SEQ ID NO: 232806 - DNA, 408 bp, synthetic construct
  misc_feature 1..408: note = Description of Artificial Sequence: Synthetic coding sequence
  source 1..408: mol_type = other DNA
atgcaacaaggtcagctagccccaggctctcgactctgctccggaccttggggtctcccagaactgcagccagcagccccttcctcctccgccgcacagttgccctggggggagtcctggggagaagaggcagacacaccagcatgcctctcagcaagcggcgtttggtttcaaaatcggaggacaaagtggaggaagaaaagcgctctggagccaagctccagcacccctagggctccgggaggtgctggggctggggcaggtggagatagggcaccatccgagaatgaagacgatgagtacaataagccactggacccagactccgatgacgagaaaatcaggttactcttgcggaagcatcgagcggcattctccgtcctttcccttggggcacattctgtctag

SEQ ID NO: 232807 - DNA, 2928 bp, synthetic construct
  misc_feature 1..2928: note = Description of Artificial Sequence: Synthetic coding sequence
  source 1..2928: mol_type = other DNA
atgaggtggggccaccatctcccccgtgcaagctggggatctgggttccggcgtgccctccagaggccagatgaccgcataccctttctcatccattggagctggccactccaaggtgagcggccattcggcccacccagagcgtttatccggcatcatggatcctctgtcgattctgcaccaccacccggtcgacacggtcggctgttcccgagtgcctctgctacagaggccattcagagacacaggcgcaacctcgcagagtggtttagcaggttgccccgagaggaacgtcaatttggacccacctttgcgctggatactgtgcatgtggacccagttattagggaaagcacacctgatgaactcctgcggcctccagcagagctggcgctggagcaccaaccaccccaagctggactccctccactggccctgagccaattattcaatccagacgcctgcggcaggcgtgttcagacggttgtcttgtacgggacagtcggcaccggcaaatctaccttggtgcggaagatggtgttggattggtgttacgggaggctgccagcattcgagctgctcataccattttcctgcgaggatctttccagtctaggacctgccccagccagcttatgtcagctggtggcacagcggtatactcctctcaaggaggtgctgccccttatggccgcagccggatcccacctgttgttcgttcttcatggtctggagcacctgaacttggacttccgactagccggaactggcctttgctccgatccggaggagccacaagagcccgctgcaatcatagtaaatttattgagaaagtatatgctcccacaagccagtatcttggtcacaacacggccatcagccataggtaggattccttccaagtacgtgggcagatacggggaaatttgtggtttctccgacaccaacctccagaaactctatttccagttacgcctgaatcagccttattgcggttacgcagtgggaggctctggggtgtccgccacccccgctcagagagaccacctggttcaaatgctgagccgcaatctggagggacaccaccaaattgcagcagcgtgcttcttgcccagttactgctggctagtctgcgctacccttcattttctacatgcccctacacccgctggccagactctcacgtctatctacacctcctttctacggctgaatttcagcggggagaccttggattcaactgatccatcaaacctcagtctgatggcatacgctgctcggacaatggggaagctcgcctatgagggagtgtcgagccgcaaaacttacttttctgaagaggatgtatgcggatgcctggaggcgggtattagaacagaggaggagtttcagttactccatatctttaggcgcgacgctttgaggtttttcttggcaccatgtgtcgagccgggtcgggctggcacttttgtgtttacggtgcctgctatgcaagagtacctcgcagcgttgtatatcgtcctgggactgaggaaaactaccctccaaaaagttgggaaggaagtggctgagctggtcgggagagttggtgaagacgtctccctggtgttggggatcatggccaagcttctgccccttagggcacttccactcctttttaacctcatcaaagtcgtgcccagagtctttggccgaatggttggaaaaagccgagaagcagtcgcacaagctatggtcctggagatgtttcgggaggaggattactataacgacgacgtcctggatcaaatgggggctagtatcctgggtgtggaaggtccgcgacgccatcctgatgagccgcctgaggacgaggtattcgaactgttccctatgtttatgggaggcttgctgtctgcgcacaaccgggctgtcctagctcaactgggctgccctattaagaacctcgatgctttagaaaatgcccaagccattaaaaagaagctcggaaagctgggcagacaggtactccccccttccgagctgctggatcatctttttttccactacgagtttcagaatcagcggttttccgcggaggttttgagctctctacggcagcttaatctcgcgggtgtgaggatgacaccagtcaagtgcacagtcgtagctgccgttctggggagcggcagacatgctctggatgaagtgaatctagcttcatgccagctagaccctgcgggacttcgcactcttctgcccgttttccttcgagccaggaaactcggacttcagctcaatagcctcggcccagaggcctgcaaggacctccgcgacctcttactccatgaccaatgccagattaccaccctgcgcctgagcaacaatccactgaccgctgcaggcgtggctgtgctgatggaggggttggcaggcaatacgagcgtgacccatctaagtttactgcatacaggtctgggggatgaggggctggagcttctggccgctcaactcgacaggaatcggcaactacaggagttaaatgtcgcttataatggagcaggcgacacggcggcactcgcgcttgcacgagctgcacgcgagcatcccagccttgagcttttgcacctctatttcaatgagttatcctccgagggaagacaggtactgagagacctaggcggagctgccgagggtggggcaagagtggtggttagcctcacagagggcacagccgtgtcagagtattggtccgtaatcctgagcgaggtgcaacggaacctcaactcttgggaccgggcaagagtgcagaggcacttggagctgctcctgagggatcttgaagattccagaggggcaacattaaacccttggcgcaaggcccagctactgcgagtagagggcgaggttcgtgcattgctcgagcaactcgggtcgagcgggtcttag

SEQ ID NO: 232808 - DNA, 345 bp, synthetic construct
  misc_feature 1..345: note = Description of Artificial Sequence: Synthetic coding sequence
  source 1..345: mol_type = other DNA
ggaatctcaaagctcaaaatggtgaaccagtgttttggtctgggcgacggcacttgcttgctgagtatccaactggagggccctaaacatgtggcattcggctggccggaatgccccgaggcaccactcccaaccctgcctccccctccactcaaggagcctctaacagtgagtccacgtggaagccatttaatgtcggccatgcctggggtttcgccttcaagatgtgtcggctccttcccctcctgtttgatgctaacttgcggacaccgcggttgtcctcacatcggcgcattctcatcttcttcttgccccctgtgccacaacggcatgatggcctggtag

SEQ ID NO: 232809 - DNA, 2928 bp, synthetic construct
  misc_feature 1..2928: note = Description of Artificial Sequence: Synthetic coding sequence
  source 1..2928: mol_type = other DNA
atgaggtggggccaccacctccccagagcttcatggggatcggggtttagacgagccttgcagaggcccgatgacagaatcccttttctaatccactggtcttggcccctgcagggcgaacgcccatttggccctccccgtgcatttatcagacaccatggttcatcagtggattctgcccctcccccaggccgtcacggcaggttatttccttcagcttcagcaacagaagcaattcagcgccatcgcaggaacctggcagaatggttttcccgactgcccagggaggagcgccaatttgggcctacgtttgccctggatactgtacacgtggatcctgtgattcgcgaaagcactccagatgagctgttacgtccacctgctgaattggctctagagcaccagccaccccaagccggtctcccacccttggccctgtctcaactcttcaaccctgatgcttgtgggagacgggtacaaaccgtcgtgctgtatggcactgtcggcacaggcaagtctactctggtgagaaagatggtgctggactggtgttacgggaggctacccgctttcgagctgctgattcccttcagttgcgaggatctttctagcctggggcctgctcccgctagtctttgtcagctggtcgctcagaggtatacaccgctcaaagaggtgctcccgctgatggccgctgcagggtctcacctgcttttcgtgttgcatggtttggaacacctcaatctcgactttagattagcgggaactggactgtgctccgatcccgaagagccgcaggagcccgcagccattatcgtaaacctgcttcggaagtatatgctgcctcaagcaagcattctcgtaaccactaggccatccgcgattggccgtattcctagtaagtatgtggggcgatatggcgagatttgtgggttcagcgacaccaacctccagaagctgtactttcagctgaggctgaaccagccctattgcgggtacgccgtgggcggatctggggtgtccgcaaccccagcccaacgcgaccacctggtgcagatgctgagcaggaacctcgagggacatcatcagatcgcggctgcctgtttccttccctcctactgttggctggtttgtgccactctccattttcttcatgctccaactcccgctggtcaaactctcacctcaatatacacatcctttctgcggctcaacttctctggagaaacacttgatagtactgatcccagtaacctgtctttgatggcgtatgccgcacgaacaatgggaaaactggcttatgaaggggtgtccagccgcaagacctactttagtgaagaagacgtgtgcggctgcttagaggccggtatccggaccgaggaggagttccagctcctgcacattttccggcgagatgcactcagatttttcctggcgccatgtgtggagccaggacgggcagggactttcgtcttcaccgttcctgccatgcaggagtatctggccgcactttacatcgtcctgggattgaggaaaacaactctgcagaaggttggtaaagaggtggctgagctcgttggcagggtaggcgaagatgtgtccttggtattaggtattatggccaaactcctacctctgcgggcactgccacttctgttcaatcttatcaaagtggtgccaagagtgttcggcagaatggtcgggaagagtcgggaggctgttgctcaggccatggtgttggagatgttccgcgaggaagactactataatgacgacgtgctggatcagatgggagcatctatcctgggagtggaaggccctaggcgccatcccgacgagcctcctgaggacgaagtgttcgagctctttccgatgttcatgggcggtctcctgtcagcccacaatcgggcagttctcgcgcagctggggtgccccatcaaaaacctggacgccctggagaatgcacaggcaattaagaagaagcttggcaagctgggtaggcaagtgttacctccatccgagctcttggatcaccttttcttccactatgagtttcaaaaccaaagattcagtgctgaagttctcagcagtctgcgtcagctgaacctcgcaggcgtccgcatgacacccgtgaaatgcactgtagttgctgctgtcctcggatcagggcgacacgccttggatgaggtgaatctggcctcatgccaacttgatcccgctggcctacggacattgcttcctgttttcctgcgcgctagaaagcttgggctgcagctcaacagcttgggtcccgaggcatgcaaggacctccgtgacctgctgttgcacgaccagtgccagataaccactttgcgtttaagcaataacccactaacagctgcaggggtggccgtcctgatggaggggctggccggtaacacatctgtaacacacttatctctcttgcacactgggttgggcgatgagggcctggagttactcgctgcacagctggatagaaatcggcagctgcaggaacttaatgttgcctacaatggagctggagacacagctgcacttgcactggccagagccgctcgtgagcaccctagtcttgagctgctgcatctctatttcaatgaactgtcctctgaaggacgtcaggtcctgcgcgacctgggaggggcagcagagggcggtgcccgtgtggtggtttccctgacagagggaaccgccgtcagcgaatactggtccgtcattctgtcggaggtccaaaggaacctgaactcctgggaccgcgcaagggttcagagacacttggagctgcttctgagggatctggaagactcccggggagcaaccctaaatccatggcggaaggcgcagctgctcagggtggaaggagaagtgagggccttgttggaacagcttgggtcttcgggatcttag

SEQ ID NO: 232810 - DNA, 2766 bp, synthetic construct
  misc_feature 1..2766: note = Description of Artificial Sequence: Synthetic coding sequence
  source 1..2766: mol_type = other DNA
atgaggtggggtcatcatttaccacgggcttcttggggcagcggattcaggcgagcgttgcaaagacccgacgaccggatacctttcctgatccactggagttggcccttgcaaggcgaaaggccatttggcccaccacgcgctttcatcagacaccatgggtcttctgtcgactcagctccgcctccagggagacacggcagactattccccagtgcgtcagccactgaggctattcaacgtcatcgcaggaacttggccgaatggttttcccgactaccacgcgaagagaggcagtttggacccacatttgccctggacacggtccatgtggacccagtgattagggaatctacacccgacgagttgctcaggcccccagccgagctcgccctggaacaccagcccccacaagccggactgcccccattggcactctcgcagctgttcaacccagatgcctgtgggaggcgggtgcagactgtggtcctgtatggcaccgtggggactggaaagagcaccttagtgaggaagatggttttagattggtgttacggacggctgccagcctttgagctgctgattccgttttcctgtgaggacctgagctcccttggaccagcacccgctagcctgtgccaactggtggcacagaggtacacccctctgaaggaagtgctgcctctgatggccgcagccggttcacacctcctctttgtgttgcatgggctcgaacaccttaatctcgatttcaggttggccggaaccggtttgtgttctgacccagaggaaccacaggagccggctgccattattgtcaacctacttcggaaatacatgctgcctcaggcctctattctggtgacaacaaggccatcggcaataggaaggatcccctcgaaatacgtgggaaggtacggggagatttgcgggttcagcgatacaaaccttcagaaactctattttcagctgaggctaaaccagccatactgtggttatgcagttggaggtagcggtgtgtctgctaccccggctcagagggaccacctggtccagatgctctcacggaatctcgaggggcaccaccagattgctgcggcttgctttcttcccagttactgttggctcgtatgtgccaccttacactttttgcacgctcctacccccgctggacaaacactgacatcaatctacacctcatttttaagattgaatttttcaggcgagactctggactcgacggacccaagcaacttgtccttaatggcctacgccgcacgtacaatggggaagctagcctacgaaggagtctcatcccgcaagacatatttctccgaggaggacgtgtgtggctgtctcgaagcagggattagaacagaagaagagtttcagttactgcacatttttcgtcgggacgctttgaggttcttcctggctccatgtgtggagcctggcagggccggtactttcgtcttcaccgtgccagccatgcaggaatatctcgcagctctgtacattgttctgggactgcgcaagacaaccctgcaaaaggtcgggaaagaagtggctgaactcgtaggccgagtgggggaagacgtgagcctcgtcttgggcattatggcgaagctgctacccctgagggccctgcctttgttgttcaacctgattaaagtcgttcccagggtgtttgggcgtatggtcggcaagagccgggaggcagtggcccaggccatggtgctggagatgtttagagaggaagactactataacgatgacgtcttggaccagatgggggcaagcatactgggggtcgaagggccacggaggcatcctgacgaacccccagaagatgaggtgttcgaactgttccccatgttcatgggaggcctgctgtccgcacacaatcgcgcagttctggctcagttgggctgtcctattaagaatttggatgccctggagaatgctcaggcaattaaaaagaagttgggtaagctgggtcggcaggtactgccgccatctgaacttctggatcacctgttcttccactacgaatttcagaatcaaaggttttctgccgaggtgctgtccagtttacgccagctgaacctagcaggcgtgcgcatgactcccgtaaagtgcaccgtggtcgcggcagtgcttggatctggccgtcacgcactcgacgaagtcaatctagccagttgccaactggaccccgctggcctccgcaccttgctcccggtgtttctacgggctagaaaacttgggctccagcttaatagcttgggtcctgaagcctgcaaggatctgcgagacctgcttcttcacgatcaatgtcagatcacaactctgcgcctctctaacaatcctctgacggctgccggagtagctgttctcatggagggcctcgcaggcaatacaagcgtgactcatctctctctgttacacacaggactgggagacgagggcttagaactgttagcagcccaactcgataggaatagacagctgcaggagctgaacgtggcctataatggggctggagataccgccgctctcgctttagcacgagctgcacgcgaacacccctccctggaattgctgcagggcgtcgccattcagatgtgctggaagctgccactgctcccatatgcccatctgtggacccctcggatgccctctcattggtgctttctgctgatactaatgcctcctctgccccagtggtatgatgggctggtggccccaagggggcgttgtacgtag

SEQ ID NO: 232811 - DNA, 2928 bp, synthetic construct
  misc_feature 1..2928: note = Description of Artificial Sequence: Synthetic coding sequence
  source 1..2928: mol_type = other DNA
atgagatggggacaccacctcccgagggcttcctggggtagtggtttccgcagagcactgcagcgccctgacgaccgcatacccttcctcattcactggtcttggccactccagggcgagaggccatttggtcccccaagggccttcattcgccatcacggcagttctgtggattctgctcctcctccagggagacacgggagactatttccctctgcctctgccacagaagcgatccagaggcaccgcagaaacctcgcagagtggttcagcagactgccaagagaggaacggcagtttggccctacatttgcattagataccgtgcacgtggatcctgtgatccgagaatcaacaccagacgagctgctcagaccccctgctgagttggccctggagcaccaaccccctcaggcagggctccctcccctagcactaagccaactgtttaacccagatgcgtgtggccgtagagtacagacagtcgtgctgtacggcacggtcgggactgggaaatccaccctggtgagaaagatggtgttggattggtgctacggccgtttgcccgcatttgagctccttatccctttctcttgtgaggacttgagctctttaggcccagccccagcctctctctgtcagctggtggctcagagatatacaccgctcaaggaggtgctgcctctcatggctgcagctggatctcacctgctgtttgtgctgcatggcctggaacacctcaaccttgactttcggttggcgggtacaggcctctgttccgatcccgaggagccacaggagcccgctgcaattatagtgaatctgctgaggaagtacatgttgccgcaagcatcaatactggttaccacacgcccttctgccattggaaggatcccctcgaagtacgtgggaagatacggcgaaatctgcggcttttctgatactaatctgcaaaaactttatttccaattgcgcttgaatcagccatactgtggatacgctgttggcggtagcggagtgagtgcaaccccagctcaacgggatcacctggtccaaatgctgtccagaaacctggaaggacatcatcaaattgcagctgcatgctttctgccaagctactgctggctggtttgtgcaacacttcactttcttcacgcgccaaccccggctggccagaccctgacctctatttatactagttttctcaggttgaatttttctggcgagactctggattctacagaccctagcaacttgtccctgatggcttacgccgctaggactatggggaaattagcctatgagggcgtgagttcaagaaaaacctattttagtgaagaagacgtatgcggatgcctggaagctggcatacggacagaagaagaattccaattgttacatattttccgaagagatgcactgcgattcttcctcgcgccatgcgtcgaacccggtcgggctggtaccttcgtgttcacagtaccggcaatgcaggagtatctcgccgcactgtacatcgtgttgggccttcgcaagactacgcttcaaaaagtgggaaaggaagtggcggagctcgttgggagggtgggtgaggatgtgtctctggtgctcggaatcatggcaaaactattgccgctgagagccctcccccttcttttcaaccttattaaggttgtgccgagagtctttggtcgcatggttggaaaatctcgggaagccgtcgcgcaagctatggttcttgaaatgtttcgcgaagaggattattataatgacgacgtgctggaccagatgggggcaagtattttgggtgttgagggaccacggaggcaccctgacgaacctcctgaggatgaagtttttgagttgttccccatgtttatgggaggcttgctgtcagcccataatcgggctgtactcgcccagttgggttgcccaatcaaaaacctggacgccctggagaacgcccaagccatcaaaaagaaacttggaaaactggggcgacaagtgctacctccctcggaactgctggaccatctgttcttccattacgagtttcagaaccagagattctccgcagaagtactgagttctttaaggcagctcaacctggctggagttaggatgaccccagttaagtgtaccgtcgttgcagccgttctgggaagcggcagacatgctctggacgaagtcaatctcgccagctgccagctggacccagcaggactaaggactttgctccctgtgttcctgagagctcggaaactgggactccagttgaacagcctcggacctgaggcctgcaaggacctgagggatctcctgctgcacgaccaatgccagatcacgactcttcgattgtcaaataacccattgactgctgcaggcgtggccgtcctcatggaggggttagccggtaacaccagcgtgacccaccttagcctgctgcatacgggcctgggcgacgaaggcttggaattactggctgcccagttagatcgaaacagacagctgcaggagttaaatgtggcctacaatggcgctggtgacacggctgcgctggccttagcgagagccgctagagagcatccatcattagagctgcttcacctctacttcaatgagctatcaagcgaaggcaggcaggtgctgcgggacctgggtggtgcagcagagggcggtgccagggttgtggtgagtctgacggagggaacagccgtttctgaatattggtcggtcatcctgagcgaagtgcagagaaatctgaattcatgggacagagcgcgtgtccaacggcacttagaacttttgttgcgcgacctcgaagactcccgtggagcaaccttgaacccctggcgaaaggcacagctcctgcgcgtggaaggggaagtgcgggctcttctggagcagctgggaagctcggggtcctag

SEQ ID NO: 232812 - DNA, 2766 bp, synthetic construct
  misc_feature 1..2766: note = Description of Artificial Sequence: Synthetic coding sequence
  source 1..2766: mol_type = other DNA
atgaggtggggacatcacctgcctagggcaagttgggggagcgggttccgaagggccctgcaacgcccagacgaccggatcccattcctgatacactggtcctggccactacagggcgagcggccttttggccctcccagggctttcatccgccaccatggtagctcagtggatagcgccccacccccaggcagacatggtcgccttttccctagcgcaagcgcgactgaagctatccagcgccatcggagaaatttggctgaatggttttccaggctccctcgagaagagcgtcagttcggacctacctttgcgctggatacagttcacgtagatccagtgatacgcgaaagtaccccggatgagttgctgcgcccaccggctgaactagccctggaacaccagcccccacaggccggactgccaccgttggctctctcgcaactgttcaatccagatgcatgcggccgaagagtgcagaccgtggtgctgtatggaaccgtagggacagggaagtccacgttagtccggaagatggtgctggactggtgttatggacgactgcccgcattcgagctgctgattcccttttcttgcgaggacttgtccagccttgggccagctccggctagcctgtgccagcttgttgcccagcgctatacccccctcaaagaagtcctgccactgatggccgctgccggaagccatttactctttgtgttgcatggcctcgagcatctgaatctagacttccgtttggcaggcactggcttgtgcagcgatccagaagagccccaagagcctgctgccatcatcgtcaacctgctcagaaagtacatgctgccacaggcctcaattttggtgacaacccggccttcagctatcggccgtattccctcaaaatatgtgggacggtatggcgaaatctgtggcttctcagacacaaacctgcagaagctgtattttcagttgcgcctgaaccaaccctattgcggttacgccgttggaggcagcggggtcagcgccacgccagcccagagagatcacctagtgcaaatgcttagccgtaacctcgaaggacaccatcagattgcagctgcctgcttccttccctcatactgctggctagtgtgtgcgactcttcatttcctgcatgcgcctacccccgctgggcaaacgctcacttccatctatacctccttcctgaggctaaacttctccggcgagaccttagactctactgacccgtcaaatctgagccttatggcttacgcggcaaggaccatgggtaagttagcgtacgaaggggtgagttcgcgtaaaacctatttttcagaggaggacgtgtgtggctgcctcgaagccggtatacgcacggaggaagagttccagctgcttcatatttttaggcgcgatgctcttcggttctttttggctccatgtgtggaacccggtcgcgcaggcacttttgtctttactgtacccgcaatgcaggagtaccttgccgctttgtatattgtgctgggcttaagaaaaaccacgttgcaaaaagtgggcaaggaggttgccgagctcgtggggagagtcggcgaagacgtgtccctcgtgttgggaatcatggccaagctgctacccctgcgcgctctcccactcttatttaatctgattaaggtcgtgccgcgagtgttcggaagaatggtcggcaagtcgcgcgaagccgtcgcacaggctatggttctggaaatgtttagggaagaagattattataatgatgacgtgctcgatcaaatgggtgcttctattctgggggtagagggcccacggagacacccagatgagccgcctgaggacgaggtttttgagctgtttcccatgtttatgggaggcctactgagcgcacataaccgtgcagtgctggcccaacttggttgcccaatcaagaatttggacgccctcgagaacgcccaagctattaagaagaaattgggaaagctcggcagacaagtgctaccacctagcgagctcctggaccacctgttctttcattacgaattccagaaccaacggttttcagccgaagtgttaagctctctgaggcagttgaacttggcaggagtgaggatgacgcccgtgaagtgtactgtggtggccgctgtgcttgggagtggcagacacgccctggacgaggtgaatttggcttcttgccagcttgaccccgctggactccgtaccctgctgccggtgtttctcagagcacggaagctcgggctccagctgaactctcttggaccagaggcatgcaaagacctgcgggacctgttgctccacgaccagtgccagattacaaccctgcgattatctaataacccgttgacggccgcaggcgtggcagtcttgatggaaggactggcaggaaacacgtccgtgacccatttgtccctgctgcacactggtctgggtgacgagggactggagcttctcgctgcccaacttgacaggaatcggcagctacaggaattgaatgtggcttacaatggcgctggagacactgccgcactggctctggcaagggccgctcgtgaacacccgtccctcgaactccttcagggcgttgccatccaaatgtgttggaagctgcctctgctcccatacgctcacctgtggacccctcgcatgcccagtcactggtgcttcctcctcattttgatgcctcccctcccccagtggtatgatggcctggtggcccctagaggtagatgcacctag

SEQ ID NO: 232813 - DNA, 3111 bp, synthetic construct
  misc_feature 1..3111: note = Description of Artificial Sequence: Synthetic coding sequence
  source 1..3111: mol_type = other DNA
atgaaaatggccagcacaaggtgtaagctggctcgctacctggaggatctggaggacgtggatctgaagaagtttaaaatgcacctcgaagactatccacctcaaaagggatgcattcctctgcctcgcggacagacagagaaggccgaccacgtcgatctcgcaacactcatgatagatttcaatggagaggagaaggcgtgggctatggcagtctggatctttgctgccattaataggagagatttgtacgagaaggccaagcgggatgagcccaagtggggctctgacaacgctagagtgtctaacccgacagtgatctgtcaagaagacagcattgaggaagagtggatgggcttgttggagtatctttctcgaatatccatatgcaaaatgaaaaaagattatcggaagaagtaccgaaaatatgtccggtccagatttcagtgtattgaggatcgcaacgccaggttgggtgaatccgtgtcactaaataagaggtatacgcggctgcgactgatcaaagaacaccggagccagcaggagcgcgaacaggagctgctcgcaattggaaaaacaaaaacatgtgaatcacctgtcagtccaatcaaaatggagctgctgttcgatccagacgacgaacactcagagcccgtccataccgtcgtgtttcaaggggcagccggaatcggtaaaactatcttagcccgtaaaatgatgctcgattgggccagcggaactctgtaccaggacagattcgattacttattctatattcattgtcgagaagtgtccctcgttacacagagatctctgggtgacctcatcatgtcatgctgcccggaccccaatccccctatccataagatcgtaaggaaaccctccagaattctcttcctaatggacggatttgacgaacttcagggcgcattcgacgagcatatcggtcctctctgtacggactggcagaaggccgagcggggagacattctcctgagctccctgattagaaaaaagctgttacccgaggcttcattacttatcactacccggccagtagcactggagaaactccagcacttattggatcaccccaggcatgtggagatacttggcttcagcgaggcaaagaggaaagagtatttctttaagtatttttccgatgaagcacaggcacgggctgcattttccctgattcaggaaaacgaggtgctctttacaatgtgcttcattcccctcgtgtgctggattgtctgtacgggcctcaagcaacagatggagtccggcaagtccctcgcacagacaagcaaaacaaccactgcagtgtacgtgtttttcctgtccagcctgttacagccaaggggaggatcccaagaacacggtctttgtgcccatctttggggtctgtgttccctcgcggctgatgggatctggaaccaaaaaattctgtttgaggagagtgacctccggaaccacggcctgcagaaggcggatgtatcagcctttctcagaatgaacctattccagaaggaagttgattgtgagaaattttattcgttcattcacatgacattccaggagttctttgcagcgatgtactatttactcgaggaagaaaaagaaggtcggaccaatgtgcccggatctagactgaagctgccttctagagacgttaccgtgctcctggaaaactacgggaaatttgagaagggttacctgatcttcgttgtgaggtttctgtttggtctcgtgaatcaggagcggacaagctacctagagaagaagctgtcctgtaagatctcccaacaaatcaggctggaactgcttaaatggattgaagttaaggccaaggccaaaaagttgcagatccaaccctcacaacttgaactgttctactgtctgtacgagatgcaggaagaagatttcgttcagcgagcaatggactactttcccaaaattgagattaatctgagtacaagaatggaccatatggtgagtagcttttgcatagaaaactgtcatagagtggaaagcctaagcttgggcttcctgcataatatgcccaaggaggaggaggaggaggagaaggagggcaggcacctagatatggtgcaatgtgtactaccctcctctagccacgccgcttgcagtcatggactggtgaatagccacctgacttcatccttttgcagggggctgttctcggtgttatccacgagccagtcgttgactgaactggacttgagcgacaactctcttggcgacccaggcatgcgagtgttgtgcgagactctgcaacacccaggctgcaacattagacggctgtggcttggtcggtgtggactgagccatgagtgctgtttcgacattagtctggtcctgtcttccaatcagaagctggtagagctggatctcagcgacaatgccctgggagacttcggcattcgcctgctctgtgtgggtctgaagcatttgctgtgcaacctgaagaagctgtggttggttagctgctgtctgacatctgcatgctgccaggatctggcctctgtgttgtcaaccagtcactctctgactcggctctatgtgggcgagaacgccctgggggactccggcgtggccattctctgcgaaaaagcaaagaacccacagtgtaatttgcaaaagttgggcctggtcaactctggcctgactagtgtttgctgtagcgcacttagctctgtcctgtcgaccaatcagaatcttacgcatttatatctgcggggaaatacccttggagataagggtataaagttgttgtgcgaaggacttctgcatccagattgtaaattacaagttttggagctggacaattgcaacctaacgtcacactgttgttgggatctaagcaccctgctgactagctcacaaagcctgaggaagctgagcctgggtaataatgatcttggagacctgggggttatgatgttctgcgaggtgctgaagcagcagagctgcctcctccagaacctcggtctttctgagatgtactttaactatgagactaagagtgcactagagactctgcaggaagaaaaacccgagctgactgtggtgttcgagccctcttggtag

SEQ ID NO: 232814 - DNA, 2769 bp, synthetic construct
  misc_feature 1..2769: note = Description of Artificial Sequence: Synthetic coding sequence
  source 1..2769: mol_type = other DNA
atgaaaatggcctccacaagatgcaagcttgccagatatctggaggacctggaagatgtcgatttaaagaagttcaagatgcacctggaggattacccacctcagaaaggctgcatccctctccctaggggacaaaccgaaaaggccgaccatgttgacctggcaacgttaatgatagactttaacggggaagagaaggcctgggccatggctgtctggatctttgcggcaattaatcgtagggatttgtatgaaaaagctaaaagagacgaaccaaaatggggctcggataacgcacgcgtcagtaaccctactgtaatttgtcaggaagatagtatcgaggaggagtggatgggcctactggaatacctttcacgaatctctatttgcaaaatgaaaaaggactacagaaaaaagtatcggaagtacgtccggagccggttccaatgcatcgaggataggaacgcacggttgggagagtctgtgtccttaaataaacgttatacaaggctgaggctaatcaaggagcataggtcccagcaagaacgcgaacaggaactgctggcaatcggcaagacaaaaacctgcgaaagccccgtgtcccccatcaagatggaactcctgttcgatccagacgacgagcacagtgagccagtgcacactgtggtgtttcaaggagctgctggtatcgggaagaccattttagcacgaaagatgatgcttgactgggcctctggaacgctgtatcaggacaggttcgattacttgttctacatccactgtcgggaggtctctttggtgactcagaggtccctgggagatcttataatgtcttgctgccctgatccaaatcctcccatccacaagatcgttcgtaagccaagcagaatcttgtttctcatggatgggttcgacgaactgcagggcgcttttgatgaacatatcggaccattgtgtacagattggcaaaaagccgagagaggcgatatcctcttgtcgagtctgatacggaagaaactgctgccagaggccagccttctgataacgacacgccctgtcgcattggaaaaactacagcatctcctcgatcaccctagacacgtggagattcttggatttagtgaggccaagagaaaagagtatttttttaagtatttcagcgacgaggctcaggctcgtgcagctttttcactcatccaagagaatgaggtcttgtttacaatgtgtttcatccccctggtgtgctggatcgtctgcacagggttaaaacaacagatggagagcggtaaatccctggcccagacctcaaaaaccacaactgcagtctatgtgttttttcttagctctttacttcagccacggggaggctctcaggagcacggactgtgtgcccatttgtggggtctttgcagcttggccgctgatgggatttggaatcagaaaattctcttcgaggaaagcgatctcaggaatcatggtcttcagaaagccgacgtgtccgcgtttttgaggatgaatctcttccaaaaggaagttgattgtgagaagttttactcttttattcatatgacgttccaagagttcttcgcagctatgtactacctcctggaagaagaaaaggaaggacgtacaaatgtgcctgggtcaaggctgaagctgccgtctagagatgtgacagttctcctggagaattatggaaaatttgagaaaggctatctcatctttgtggttaggttcttgttcggcctcgttaatcaggagagaacctcgtacctggagaagaaactgagctgcaagatcagccaacagatacgattggagctccttaagtggatcgaggtaaaggcaaaggccaaaaagctccagattcaacctagtcagctggaattgttctattgcctgtacgagatgcaggaggaggacttcgtccagagagcaatggattactttcccaaaatcgaaattaacctgtcaacgcggatggaccacatggtatccagcttttgcattgaaaactgtcatcgggttgagtcactgagcctaggtttcctccacaatatgcccaaagaagaagaagaggaggagaaggaaggccgtcacctggacatggtgcagtgtgtgcttcctagtagttctcacgctgcgtgtagtcatggcctggggcgatgtggattatcacacgaatgctgttttgatatctccctggttctctccagtaatcagaaattagtcgaattggacttgtctgataacgcactcggtgatttcggcatcagactcttatgtgtgggcctaaagcacctgttatgtaacctgaagaagctgtggctggtgaatagcggtctcactagcgtgtgttgtagcgccttgtcttccgtgctaagtaccaatcagaatctcacccacctctatctgaggggcaacacactgggggataaaggcatcaaactcctgtgcgaagggctcctgcaccccgattgtaaactgcaggtcctggaattggacaactgcaatctgaccagtcactgctgttgggacctgagcaccctgctgacctcctctcagtccctccggaagttgagtctcgggaacaacgacctcggcgatctgggagtgatgatgttttgtgaagtgctgaagcagcagtcctgtctgttgcagaatctaggactatcagaaatgtatttcaattatgagaccaagagtgctcttgagacgcttcaagaagaaaaaccagagcttaccgtggtgtttgaacctagctggtag

SEQ ID NO: 232815 - DNA, 2940 bp, synthetic construct
  misc_feature 1..2940: note = Description of Artificial Sequence: Synthetic coding sequence
  source 1..2940: mol_type = other DNA
atgaagatggcaagtacacgatgcaaactcgctagatatctggaagatttagaagatgtggatttaaaaaagttcaaaatgcatttggaagattatccccctcagaagggttgtattccattgccccgtgggcagacagaaaaagctgaccacgtggacttggcaacgctcatgattgattttaatggagaagaaaaggcctgggccatggctgtctggatattcgcagctatcaataggcgggacttgtatgagaaggctaagcgggatgagccaaagtggggatcggacaacgctcgtgtgtctaatccgacagtgatctgccaggaagattccatcgaggaagagtggatggggctccttgaatatctaagtcgcatctccatctgcaagatgaagaaagactatcggaagaaataccggaagtatgtgaggtcaaggtttcagtgcattgaggatagaaacgcccgacttggagagagcgtgtcgctgaacaagcgctacaccaggctgagattgatcaaagaacatcggtctcagcaggagagagaacaggaactgctcgcaattggcaaaactaaaacttgtgagtctccggtgtcccccattaagatggagctgctgtttgacccagatgacgagcacagcgagccggtgcataccgtcgtgttccagggcgctgctggtataggtaagaccattctggcccgaaagatgatgctggactgggcctccggaacgctctatcaggataggttcgactacttattctacatccattgtagggaagtgtctctggtgacgcagagaagcttgggtgatctcatcatgtcctgttgtccagacccaaatccccctatccacaagattgtacggaagccctcccgaattctttttctaatggatggctttgacgagcttcaaggcgctttcgacgagcacatcggcccactctgcacagattggcaaaaggcagagaggggtgatattcttctcagctccttgattcgaaagaaactcctgcctgaggcaagcctgctgatcacgacgaggcctgtcgccctcgagaaactgcagcatctgttggaccatcccagacatgtggaaattctggggttcagcgaagccaagcggaaggagtatttctttaaatatttttccgatgaagcccaggctagagctgccttcagcctcatccaagaaaatgaagtcctctttactatgtgttttatacccctcgtatgctggattgtgtgtacaggcctaaaacagcagatggagtctgggaagtcgctggcacagacatctaagactaccaccgccgtgtatgtgttctttctaagctcactgcttcaacctagagggggatctcaggagcatggcttatgcgcccacctctggggattatgttctttagccgcagacgggatttggaatcagaaaatcctctttgaagagagcgacctgaggaatcacgggctgcagaaggccgatgtgtccgcgtttttgaggatgaacttatttcagaaagaagtagactgcgagaagttttacagctttatacatatgacttttcaagagttctttgccgcaatgtactaccttctcgaagaggagaaagaggggcgtacaaatgtacccggttctcgtttgaaactgccttccagagacgtcactgtactcctggaaaactacggcaagttcgaaaaaggctacctaatcttcgtagtgagatttctgtttgggctcgtcaatcaggaaaggacaagctatttagaaaagaaactcagctgcaaaatcagccagcaaattaggcttgagcttctgaaatggattgaggtgaaagcaaaggctaagaagctgcagatccagccatcccagctggagcttttctactgtctttacgagatgcaggaggaggacttcgtacagagagcaatggattattttcctaaaattgaaataaacttatctactagaatggatcatatggtgagctctttctgcattgagaattgccaccgggttgagtctctgtcgctcggattcttgcataacatgccaaaggaagaggaggaggaagaaaaagagggcagacatctcgacatggtccagtgcgtgcttcccagttcctctcacgccgcttgttcacatgggctggtgaacagtcacctcacatcctctttttgcagaggtctattttccgtattgtcaacatctcaatctctgacagagctcgacctctcggacaacagtctcggtgatcccggtatgcgagtgttatgtgaaaccctgcagcatcctggttgtaatatacgcaggctttggttgggtaggtgtggtctctctcatgagtgctgttttgatatttcccttgtgcttagctccaatcagaagctcgtggaacttgacctcagtgacaacgctctgggggatttcggaatccgccttctttgtgtggggcttaagcatctgctgtgtaacttaaagaagctgtggctggtcaattcgggtttgaccagtgtctgttgtagcgcactctcaagcgtgctgtctacaaatcagaatctgacccatctttatctgagaggtaatacattgggtgacaaaggtatcaagctcctgtgcgaggggctactacacccagattgcaagctgcaagtgttggaactggacaattgtaatctgacttctcattgttgctgggatctgtctacactgctgacgtcttcccagagcctccgtaaactttcactggggaataacgatttgggggacctcggggtcatgatgttctgcgaagttcttaaacagcagagttgccttctgcagaatctaggtctaagtgaaatgtacttcaattacgaaactaaatctgcgttggaaacacttcaagaggagaagccggagcttaccgtggtgtttgaaccttcttggtag

SEQ ID NO: 232816 - DNA, 2940 bp, synthetic construct
  misc_feature 1..2940: note = Description of Artificial Sequence: Synthetic coding sequence
  source 1..2940: mol_type = other DNA
atgaagatggccagcacaagatgtaagctggccagatacctggaggacctggaggatgtcgatctgaagaaattcaagatgcatttagaggattatcctccccaaaaggggtgcatcccactgcctcgcggtcaaacagagaaggcagatcacgtagacttggccaccctgatgatcgactttaatggcgaggagaaggcttgggccatggcagtgtggatttttgccgcaatcaatcgacgtgacctgtatgagaaggccaaaagggatgagcctaaatgggggtcggataatgcaagagttagtaatccaacggtgatctgtcaggaggactccattgaagaggagtggatgggtctcctggaatacctgtcacgcatctccatctgcaagatgaaaaaagattatcgcaaaaaataccggaagtatgtgcgcagcaggtttcaatgtatagaggacaggaacgcccgtcttggtgaatccgtctctctgaacaaacggtacactcgcttacgactgatcaaggaacaccgttcacagcaagaacgggaacaggaactgctcgccatagggaagaccaagacatgtgagagcccagtgtctccaattaagatggagctcctttttgaccccgacgacgagcactctgagccggttcacacagtcgtctttcaaggggctgctgggattggtaagacgattctggcgaggaagatgatgctagattgggcgagtggcaccctgtaccaggaccgctttgactacttgttttatatacactgcagagaggtgagtttggtcacccagcgctcccttggagatttgattatgtcttgttgtcccgatcccaatccccctatacacaaaatagtccggaagccatcccggatcctgtttctgatggacggctttgacgagctacagggggctttcgatgagcacattgggcctctgtgcaccgactggcagaaggcagaacgcggagatatcctgctgagtagcctgattaggaaaaaattgttacccgaggcttccctcctgatcacgacccgccctgtagccctcgaaaaactgcagcaccttctcgatcaccccaggcacgtcgaaatccttggattctctgaagcaaaacgtaaggagtatttttttaagtatttctccgacgaagcacaggctcgagccgcattctccctcatccaggagaatgaggtcctgttcaccatgtgcttcattcctctggtgtgttggatcgtgtgcactggactcaagcaacagatggaatccggtaaatctttggcgcagacctccaagactaccaccgcggtgtatgtttttttcctgtcgagcctgcttcagcctcgcggtggcagccaagagcatggcctgtgcgcacacctgtgggggctgtgctccctggctgccgatggcatctggaatcaaaagatcctgttcgaggagtccgatctcaggaaccatgggttacagaaagccgacgtatctgcatttctgaggatgaacctgtttcagaaggaggtggactgcgagaagttttattctttcattcacatgacattccaggaatttttcgccgctatgtattacctcctggaggaggaaaaggaggggcgaaccaatgtgccaggctcaagactgaagctgccatctagggatgtaaccgtactgctcgagaactatgggaagttcgagaaaggatatttgatctttgtggtgcgcttcctcttcggtttggttaaccaggagcgcacttcctatctggagaagaagctgtcatgtaaaatttcccagcagatccggctggagctgcttaaatggattgaggtcaaagccaaagcgaaaaagctccaaattcagccatcacagctcgagttattctactgcctgtacgagatgcaagaggaggattttgtgcagagagccatggactactttccgaagattgaaattaatctgagtacacgaatggatcatatggtgagctccttctgcatagaaaattgccatagggtggaaagcctgagtctgggattcctccacaacatgcctaaggaagaagaggaggaagagaaagaaggcaggcatctggatatggttcagtgcgtgttaccatcttcttcccatgccgcttgtagccacggcctggtcaatagtcatctgactagctccttctgcagaggactgttttcagtgctctcgacctcgcagagtctgaccgaacttgatttgtctgacaacagtttaggggatcccggaatgagggttctgtgcgagacgctccagcatcctggttgcaatatccgccgtctctggctcggtagatgtggcttgtctcatgagtgctgcttcgacatctccctggtcttatcgtcaaatcagaagctcgtcgaactagacctgtccgacaacgctctgggcgactttgggatccgactcctctgcgttgggcttaagcacctcctctgtaatctgaaaaagctgtggctggtcaattcgggtctcacatccgtgtgttgcagcgccctgtcatcagttttgtcgacaaaccagaacctgacacacctctatctacgcggtaatactctgggcgataaaggaatcaaactactttgcgaagggctcctgcacccggactgcaagctgcaggtgctcgaactggacaactgcaacctgacgagtcattgctgctgggatctgagtaccctgctgacttctagtcaaagcctgaggaagttgagcttgggaaacaatgacctaggcgacctgggggtgatgatgttctgcgaagtgcttaagcagcagtcctgcctgctgcaaaacttggggctctccgaaatgtactttaactacgagacaaagagcgctctcgagacattgcaggaggagaagcctgagctcaccgtcgtgtttgagccaagttggtag

SEQ ID NO: 232817 - DNA, 2940 bp, synthetic construct
  misc_feature 1..2940: note = Description of Artificial Sequence: Synthetic coding sequence
  source 1..2940: mol_type = other DNA
atgaagatggctagcacgcgctgcaaactcgcgcgatacctcgaagatctggaagatgtggatctgaagaaattcaaaatgcacttggaagactatccgcctcagaaaggctgtatcccgctgccccgtggccagaccgagaaagcagatcacgtggatctcgctactctgatgattgattttaacggggaggaaaaagcatgggccatggcagtttggatttttgcagcaatcaataggcgcgacttatatgagaaggcgaaacgtgacgaaccgaaatgggggtctgacaatgctcgggttagcaacccaaccgtcatatgccaagaggacagtattgaagaagaatggatggggctcctggagtacctgagcaggatctctatctgcaaaatgaagaaagattatcgcaagaaataccggaaatatgtgcgctcccgctttcagtgcattgaggaccggaatgcacggcttggtgaaagtgtcagtctgaataagcgatacacccgactaagactcattaaggaacataggtcacaacaggagagggaacaggagttattggctattgggaaaacaaaaacgtgtgaaagccccgtgtctcccatcaaaatggagttactgtttgaccccgacgacgaacactccgaaccagtgcacacggtggtcttccagggcgctgctgggatcgggaagaccatcctggcccgtaagatgatgcttgattgggcaagcggcactctgtatcaggatcgctttgattatctgttttacattcattgccgggaggtctccttggtgacccagcgcagcctcggagatctgattatgtcttgttgccccgaccctaaccccccaatccataagattgtgaggaaaccttctcgaatcctatttctgatggatggcttcgacgagctccaaggagctttcgatgaacacatcggcccattgtgcactgattggcaaaaggccgagagaggagatatactgctgtcttccctcatcaggaaaaagctgttgcccgaggcttccttgctgatcacgacaagaccggtcgcactggaaaagctccagcatttgctggatcatccgaggcatgtggagatcctcggcttttctgaggccaagcggaaagagtactttttcaagtacttctccgatgaggctcaagcccgagctgccttctctctcattcaggagaatgaggtgctgtttactatgtgtttcatacccctcgtgtgctggatcgtttgtactggattgaagcaacagatggagtcaggaaaaagcctggcacagactagcaagaccaccacggccgtatacgtctttttcttatctagcttacttcagcccagaggtggcagccaggaacatgggttgtgcgcccatctctggggtttatgctcactggcggcagacgggatctggaatcagaagatccttttcgaagagtccgaccttcggaaccatggcctgcagaaggccgatgtctccgcattcctgcggatgaatctgtttcagaaagaggtcgattgcgaaaagttttattcctttatccatatgacgttccaggagttcttcgctgctatgtactatctactagaagaggagaaggaaggacgaactaacgtacccggatctcgactgaaactcccttcccgtgatgtgactgtgctactcgagaactatgggaagttcgagaaaggctatttgatcttcgtcgtgcgcttcctgtttggtctggtaaaccaggaacgaaccagctatctcgaaaagaagttgtcgtgtaagatctctcagcagatccgacttgagttactgaaatggattgaggtcaaagccaaggccaagaagcttcagattcagccatcccagttggagctcttctactgcctatacgagatgcaggaagaggatttcgtccagcgtgccatggattactttcccaaaatagaaatcaacctgtcgacaagaatggatcatatggtatcaagcttttgcatagagaattgtcacagagtggagtctctatcactgggttttctccataatatgcctaaggaagaggaggaagaagagaaagagggccgtcatttggatatggtgcagtgcgtgctgccctctagcagccacgcggcatgctcacatgggctgggaagatgtgggctgagccacgaatgttgtttcgacatttcactggtgctctcatctaaccagaaactggtcgagctcgacctcagcgacaatgcgctcggcgactttggaattcgccttctgtgcgtgggcctaaaacacttgctgtgtaatttgaagaaactctggttagtgagttgttgtttgacaagtgcatgttgccaggaccttgcttcggtcctcagcacatcgcacagcctaacaaggctgtacgttggagagaacgctcttggggattccggtgtagccatcctgtgcgaaaaagcaaagaatccacagtgtaacctgcaaaagttgggactggttaactctgggctgacctccgtctgctgctcagctctcagttccgtgttgagcactaaccagaatctgacacatttatatctgcggggtaacacactaggagacaagggcattaaactgctatgcgaaggtctgctgcaccccgattgcaagttgcaggtactcgagctggataattgcaatttaacctctcactgttgttgggacctgagtacccttcttacatcatctcaatccctacgcaagcttagcctggggaataatgatctcggcgacctgggcgtgatgatgttttgtgaagttctcaagcagcagagctgccttctacagaaccttggactgagcgagatgtatttcaactatgagaccaagtcagcgttggagactctgcaagaggagaagccagagctcactgtagttttcgaaccctcttggtag

SEQ ID NO: 232818 - DNA, 3111 bp, synthetic construct
  misc_feature 1..3111: note = Description of Artificial Sequence: Synthetic coding sequence
  source 1..3111: mol_type = other DNA
atgaaaatggcctcaacacggtgtaaacttgcgagataccttgaggacctcgaagatgtcgatttgaaaaagtttaagatgcacctggaggactatccgccacagaagggttgcatcccactcccgagaggtcagacagagaaggcggaccacgtggatttggctacactcatgatagacttcaatggagaggagaaggcgtgggccatggccgtgtggatttttgctgctattaatcggagggatctgtatgaaaaagccaaacgagacgaacctaaatggggctcagataatgccagagtctctaatccgaccgttatctgccaggaagattccatcgaggaagaatggatgggcctgttagagtatttgtctcgaatctcaatttgcaagatgaagaaggactataggaagaagtaccgcaagtacgtgcggtcaaggtttcaatgcattgaggatagaaatgcacggttaggcgaaagcgtatccctcaataaacgatatacaaggttacggctgatcaaggaacataggagccagcaggaacgggagcaggaactcctggccatcgggaagaccaagacctgtgagtctcccgtgtcgcccattaaaatggaactgctgttcgaccccgacgatgaacattccgagccagtgcatactgtcgtgtttcagggggcagcgggaataggaaagaccattctggcgaggaaaatgatgctagattgggcctccggcaccctctatcaggaccgatttgactatttattctacatccattgccgcgaggtgagtctcgttacgcaacgctcgctaggtgatctgattatgtcgtgctgtccagatccaaacccacctatccataagatcgtaaggaaacccagccggattctgtttctcatggacggcttcgatgagctccagggagcattcgatgagcatatcggaccactctgtaccgattggcagaaagccgaacggggagacattttgctgtcatctctcatcagaaaaaaactgttacccgaagcgagcctactaatcaccacacggcctgttgctcttgagaagctgcagcatctccttgaccacccccgtcatgtggaaattctgggatttagcgaagccaagagaaaagaatacttctttaagtatttttctgacgaagcccaggccagggccgctttctccctcatacaggagaatgaggtcctatttacaatgtgcttcatcccactcgtttgctggattgtctgcaccggattgaaacaacagatggagagtgggaagtccctggcccaaacctccaaaaccactactgccgtgtacgtgttcttcttgagctctctgctccagcctaggggcggtagccaggagcatggcctttgcgcccatctgtgggggctatgtagtctggccgctgatggaatctggaatcaaaaaattcttttcgaggaatcagatctgcgaaatcacgggctgcaaaaggctgatgttagcgcattcctccggatgaacttgtttcagaaggaggttgattgcgagaagttttactcattcatccatatgacgtttcaggagttcttcgcggctatgtattaccttctcgaagaagaaaaagaagggcgtacaaacgttcctggatcaaggctaaagctgccgtcaagggacgtgacagtgctgctggaaaattacggtaaatttgaaaaggggtacctgatctttgtagttcgcttcctattcggtctggtgaaccaagaacgtaccagttacctcgaaaagaaacttagttgtaaaatctcacaacagatccggctggagctcttaaaatggatcgaggttaaggccaaagcgaagaaattgcagatacagccatcgcaactcgaacttttctactgcttatatgaaatgcaagaggaggacttcgtccagagggcgatggactatttcccaaagattgagataaatctgtcaacgcgaatggatcacatggtctcatccttttgcatcgagaattgtcaccgggtggaatccctgtctctcggatttctccataatatgcccaaagaagaggaggaagaggaaaaggagggtagacacctcgatatggtccagtgtgtgctgcccagctccagtcatgcggcttgcagccacggcctagtcaatagtcatttaacctcttcattttgccgaggtctgttttccgtgctcagcacctcacagagtctgacagagttggatctgtcagataacagcttgggcgaccctggcatgcgagtcttatgtgaaacgcttcagcacccagggtgtaatatacgtcgtctgtggctgggtagatgcgggctgtcccatgagtgttgcttcgatatctccctggttttatcctccaatcagaaactcgtagaactggatctgagcgacaatgccctgggtgacttcggcattcgtctgttatgcgttggactgaaacacctgctttgtaacttaaagaagctgtggctggtgtcttgttgcctgacaagcgcatgctgtcaagatctcgcttcagtgctgtccacatctcactccctgacacgtctgtacgttggagaaaatgctttgggcgactctggtgtggcaatcctttgcgaaaaagctaagaatccccaatgtaatctgcagaaactggggcttgtcaattcaggcctaaccagcgtgtgctgtagtgctctgagctcagtgctgagcactaaccaaaatctgacgcacctctatctgcgcggaaacacactgggagataagggaatcaagctgctgtgcgaagggctcctacacccggattgcaagctgcaagtgctagaattggacaactgtaacctcaccagtcattgctgctgggatctttctactctactaacaagttcgcagtccttgcgcaagctgtccctgggtaacaacgacctgggggatcttggagtaatgatgttttgtgaagtcctcaaacaacagtcttgcttgctccaaaacctgggtctcagtgagatgtactttaattacgagacaaaatccgccctcgagaccctgcaagaggaaaagcccgaactgactgtggtgtttgaaccctcttggtag

SEQ ID NO: 232819 - DNA, 1512 bp, synthetic construct
  misc_feature 1..1512: note = Description of Artificial Sequence: Synthetic coding sequence
  source 1..1512: mol_type = other DNA
atggagtatatggccgaatcgacagaccggagcccagggcacatcctctgctgcgagtgcggggtgccaatcagtccgaatccagcaaatatttgtgtggcctgcttgcgttccaaagtcgacatctcccaaggaattcctaagcaagtatcgataagcttctgcaagcagtgccagagatacttccagcctcctggaacctggatccaatgcgctctcgaatccagagagttgctggccctgtgcttgaaaaaaattaaagcccctctgtccaaggtgcggttagtggatgcagggtttgtctggacagaaccacatagcaagagactgaaggtgaagctcaccatccaaaaggaggtgatgaatggcgcaattctccaacaggtctttgtcgtcgactatgttgtccaatcgcaaatgtgtggcgattgccatagagtggaggctaaggatttctggaaggcggttattcaggtaaggcagaagactctacacaagaagaccttctattacctcgaacagctcatcctgaaatatggaatgcatcagaatacactgagaataaaagagatccacgatggtcttgatttttactactcgtctaagcaacacgcgcagaaaatggttgaattcctacagtgcaccgtcccatgcagatataaagcaagccagcgactgatttctcaggatatccatagcaacacttacaattataaatctacattctctgtggaaatcgttcctatctgcaaggataacgttgtgtgcctcagccctaaactggctcagtccttggggaatatgaaccagatttgcgtgtgcattcgcgtcacatccgccatccatctcatagacccaaatacactccaggtcgccgacatcgatggatctactttctggtcccatccattcaatagcctgtgtcatccgaagcagctagaagaattcatcgtgatggaatgtagcatagtccaggatatcaaaagagctgccggagccggtatgataagcaaaaaacatactcttggagaggtgtgggtccaaaagacgtccgagatgaatacagacaaacagtatttttgccggacccacctcggccaccttctcaacccaggagatttagttctggggttcgatctagctaattgcaacctgaatgacgagcacgtaaacaagatgaacagcgatagggtgcctgacgttgtgctaattaagaaatcttatgatcgcacaaaaagacagcgtcgcaggaattggaaactgaaggagctggcaagggagagggaaaacatggataccgacgatgagcgccaataccaggatttcctagaagaccttgaagaggatgaagcgatccgaaaaaatgtcaatatttaccgcgattcagcaatccctgttgagtcggacacagatgatgagggagcccctcggatctccttggctgaaatgctggaagatcttcacatcagtcaggacgcaactggggaggaaggcgcatccatgctgacgtag

SEQ ID NO: 232820 - DNA, 1512 bp, synthetic construct
  misc_feature 1..1512: note = Description of Artificial Sequence: Synthetic coding sequence
  source 1..1512: mol_type = other DNA
atggaatacatggctgagtctaccgacaggagtccgggtcacatcttatgctgcgagtgtggcgtccctatcagccctaatcccgcaaacatttgcgttgcgtgccttcgcagcaaggtggatatatcccagggaattcccaagcaggtttcgatcagtttctgcaaacagtgccagcgttacttccagcctcctggcacctggatccagtgtgccctggaatcgagagagctgctggccctgtgcctcaagaaaataaaggcccctctctcaaaggtgaggctcgtggatgccggattcgtctggaccgagccccatagcaagcggttgaaagtcaaactcaccatccagaaggaagtgatgaacggggctatactgcagcaggtttttgtggttgattacgtggtgcagtcccagatgtgtggggactgccatcgtgtggaagccaaagatttctggaaagcagtgatccaagttaggcagaaaacgctgcacaaaaaaactttttattacctcgaacaattgattctgaagtatgggatgcaccaaaacaccctgcgcatcaaggagatacacgacggcctcgacttttattattcatccaagcaacacgcccagaagatggtggaatttctgcagtgtacagttccctgccgttataaagcctcacaaagactgatctcccaggacatccatagcaatacgtataactacaagagtacattctccgttgagatagtgcctatctgtaaggacaacgtggtctgcctcagtcccaaactagcgcagtctctcggaaatatgaatcagatctgtgtatgcattcgcgtaacttctgctattcatctgatcgaccctaatacgctgcaggtggccgacattgacggctcaacattctggtcacaccctttcaatagtctgtgtcaccctaagcagttggaggaattcatcgtgatggaatgtagcatcgtgcaagacattaagagggcggctggtgcaggtatgatcagtaagaagcataccctcggcgaagtatgggtccaaaagacgtctgaaatgaacaccgataaacaatacttctgccgcactcacctgggacatctgctcaaccctggcgatctcgtgctgggctttgacctagcaaactgtaatctgaatgacgagcacgttaataaaatgaacagcgacagggtaccagacgtggttttgattaaaaaatcatatgacaggacaaagcggcagcggcgaagaaattggaaactgaaggaacttgcccgtgagagggaaaacatggatacagatgacgaacggcagtaccaggactttttggaggacctcgaggaagatgaggccatccgaaagaacgtgaatatatatcgcgactccgccattccggtggagtccgatacagacgatgaaggcgctccgagaatcagcctggctgagatgctcgaggacttacacatcagtcaagacgcaacgggtgaggagggggcatctatgctgacatag

SEQ ID NO: 232821 - DNA, 471 bp, synthetic construct
  misc_feature 1..471: note = Description of Artificial Sequence: Synthetic coding sequence
  source 1..471: mol_type = other DNA
atggagtacatggctgagtctaccgaccgctcccccggacacattctgtgctgcgagtgtggagtcccgattagtcctaatccagcaaacatttgcgtggcctgcctgagaagcaaagttgatatcagccaaggcatccccaaacaggtttccatcagtttctgcaagcagtgtcagcgatacttccagccaccaggaacatggattcagtgcgccctggaatcccgggaattgttagctctttgtctcaagaaaataaaagctcccctctcgaaagtgcgcttggttgatgccggtttcgtctggaccgagccacatagcaaaagactcaaggtaaaactgaccatccagaaagaggtaatgaacggcgcaattctgcagcaagtgtttgtcgtagattacgttgtgcagagtcagatgtgcggcgactgtcaccgtgtcgaagccaaggacttttggaaggccgtgtag

SEQ ID NO: 232822 - DNA, 657 bp, synthetic construct
  misc_feature 1..657: note = Description of Artificial Sequence: Synthetic coding sequence
  source 1..657: mol_type = other DNA
atggaatacatggcagaaagcactgatcgcagccctgggcacattctatgctgtgagtgtggagttcctatctctcctaatccggctaatatttgtgtggcttgcctccggtccaaggtcgacatttcccagggaatccccaaacaagtgtcaatttcattctgtaagcagtgtcagaggtacttccaacccccaggtacatggatccagtgtgccttggagagtcgagaactcctggcgctttgcctgaagaaaattaaggctcccctatcaaaggtgcggctcgtagatgccggatttgtgtggaccgaaccacatagtaaacgcctcaaggtgaaacttactattcagaaggaagtgatgaatggggctatcctgcaacaggtgttcgtggttgattatgtagtgcagagtcagatgtgcggcgactgccacagggtcgaggctaaggacttctggaaggccgttatccaagtgagacagaagacacttcacaaaaagactttctactatctggaacaactgattctgaagtacggcatgcatcagaacaccctcagaataaaagagattcacgacgggctcgatttctattacagtagtaagcagcatgcccaaaaaatggtggagttcctgcagtgcacggtgccttgctag

SEQ ID NO: 232823 - DNA, 297 bp, synthetic construct
  misc_feature 1..297: note = Description of Artificial Sequence: Synthetic coding sequence
  source 1..297: mol_type = other DNA
atggagtacatggccgagtctaccgacagaagccctggccatattctctgctgcgaatgtggggttcctatcagcccgaaccctgcaaacatctgcgtcgcctgtctgaggagcaaggttgatataagccaggggatcccgaagcaggtttcgataagcttctgtaagcagtgtcagcgctactttcagcctccagggacatggatccagtgcgctctggagtcgagggagctcctcgctttgtgcctaaagaaaataaaagcaccgctgagcaaggtgaggctcgtggacgcatag

SEQ ID NO: 232824 - DNA, 489 bp, synthetic construct
  misc_feature 1..489: note = Description of Artificial Sequence: Synthetic coding sequence
  source 1..489: mol_type = other DNA
atggaatacatggcggagagcaccgaccgcagtcctgggcacatcctttgctgtgaatgcggagtccctatctcccccaacccagccaatatttgcgtggcttgcctgaggagcaaagtcgacatttcccagggaatccccaaacaggttagcatttccttctgcaaacagtgccagaggtatttccagccccctgggacatggatacagtgcgctctggaatccagggaactcctcgctctttgtctgaagaagatcaaggcacccctcagtaaggtccggctggttgacgcaggttttgtctggacagaaccacactcaaaaaggcttaaggtaaagctgactatacagaaagaggtcatgaatggagccatcctgcaacaagtgtttgtagtggactacgtcgttcagtctcaaatgtgtggtgattgccatagagtcgaggcaaaagacttctggaaggccgtgatccaagtcaggcaaaaatag

SEQ ID NO: 232825 - DNA, 657 bp, synthetic construct
  misc_feature 1..657: note = Description of Artificial Sequence: Synthetic coding sequence
  source 1..657: mol_type = other DNA
atggaatatatggcagagtcaacagaccgctcacccggtcacattctgtgttgcgagtgtggtgttcccattagcccaaacccagccaacatctgtgtggcttgtttgagatcaaaagtcgacataagccaagggatacctaaacaggtgtcaattagtttttgtaaacaatgccagcgttacttccagccgcctggcacgtggatccaatgcgctctggagtcccgagagctgctcgccttgtgtctgaaaaaaattaaggcccctctcagcaaagtgagattggtggatgctggtttcgtgtggaccgagcctcattccaaaaggcttaaggttaagttaacaatacagaaggaagtcatgaacggagctatcctacagcaggtgtttgttgtggactatgtagtccagtcccagatgtgcggtgattgccacagggtggaggctaaagacttttggaaggcagttattcaggtgcgacagaagacactccataaaaagacgttttactatctcgagcagcttattctcaagtatgggatgcatcagaacacccttcgcatcaaagaaattcacgatggcctcgacttctactacagctcaaagcagcatgcccagaagatggtcgagtttctccagtgcactgtcccttgttag

SEQ ID NO: 232826 - DNA, 1152 bp, synthetic construct
  misc_feature 1..1152: note = Description of Artificial Sequence: Synthetic coding sequence
  source 1..1152: mol_type = other DNA
atgaatggtgccatcctccagcaagtattcgtcgtcgactacgtggttcagagtcagatgtgtggagactgtcacagggtggaggccaaggacttttggaaagccgtgatccaggtacggcagaagaccctccataaaaagactttttactatctggaacagctgatcctgaaatatggcatgcatcaaaacacattgagaatcaaggagatacacgatggactggatttctattattcttcgaagcagcacgctcagaagatggttgaattcctgcaatgcacagttccttgcagatataaagcgtctcagaggctgatcagtcaagacatccactctaatacttacaactacaagtcaaccttctccgtggagattgtccccatttgtaaggacaatgtcgtttgcctgtccccaaaactcgctcagtccctgggcaatatgaatcagatctgcgtgtgtatacgtgtgacttcagctatccatttgattgatcctaatactctgcaggtcgccgacattgacggatccaccttctggagccaccctttcaactccttgtgccacccaaaacaattggaggagtttattgtaatggaatgctctatagtccaagacattaagagggccgcaggagcgggaatgatctccaaaaagcacactctgggtgaggtttgggtccagaaaacatccgagatgaatacagacaagcagtatttttgccgtactcacctgggccacctgctcaaccctggggatctggtgctgggatttgacctggccaattgtaatctgaacgacgagcacgtaaacaagatgaattccgatcgtgtgcctgatgtcgtactgatcaagaaatcttatgacagaacgaaaaggcagagaaggaggaattggaaactcaaagaactcgccagggagcgggagaacatggacacagatgacgaacggcagtatcaagattttctagaggacctcgaggaagacgaggctattaggaagaacgtaaacatctatcgggactctgctattcctgtggagtctgacactgacgatgagggtgcccctcgaatctcccttgcagaaatgctggaggatctgcacatttcgcaggatgcaaccggtgaggagggagcaagtatgctgacttag

SEQ ID NO: 232827 - DNA, 2949 bp, synthetic construct
  misc_feature 1..2949: note = Description of Artificial Sequence: Synthetic coding sequence
  source 1..2949: mol_type = other DNA
atgagcagcaaaatggtaatttcagaacctggcctcaattgggacatctcacccaaaaatgggctaaagaccttcttcagtagggaaaattacaaggaccacagtatggccccttctctcaaagagcttcgggtgctgtccaataggcgcattggcgagaatttaaacgccagtgcaagcagcgtcgaaaacgagccggctgtgtcttcagctacacaggccaaggagaaagttaagacaactattggaatggtactgcttcctaagcccagggtgccttaccccaggttttccagattttctcagcgggaacaacggtcttatgtggatctccttgtgaaatacgctaagattcctgctaacagcaaagccgttggaatcaataagaatgactacctgcagtacctcgatatgaaaaaacatgtgaacgaggaggtcacagaatttctgaagtttctgcagaactctgccaagaaatgcgcacaggattacaatatgttatcagatgatgcaagacttttcactgaaaagatccttcgagcctgtattgagcaggtaaagaaatacagtgaattctacacactccacgaggtgactagtctgatggggtttttcccctttagagttgagatgggcctcaaactggagaagactcttctggcactgggaagcgtcaagtacgtgaagactgtgtttccatctatgccgatcaagctgcaacttagcaaggacgacatcgctactatcgagactagcgagcagactgctgaggccatgcattacgacatttccaaggatccaaatgcggagaagctagtctcgcgttatcaccctcagatcgcacttacgtctcaatcgctattcacactgctcaataatcatgggcctacgtataaggagcaatgggagatacccgtctgcatccaagtaatcccggtggccggatccaaaccagtgaaggtgatctatatcaatagccccctgccccaaaagaagatgactatgagagagcgtaaccagatctttcacgaggtccccttgaaattcatgatgtctaagaacacaagcgtccctgttagtgccgttttcatggacaagcctgaagaatttatctccgagatggacatgtcttgcgaagttaatgagtgccgaaagatagagtctctggagaatctttatctggactttgatgatgacgtcactgagctggagacatttggggtgacaaccactaaagtgagtaagtcaccttctcctgcatccacctccacagtgcctaacatgacagacgctcccactgccccaaaggcgggtacaaccactgtcgctcctagtgctccagacataagcgcaaacagcagatcactgtcacaaatcttgatggaacaattgcagaaggagaagcagctcgtaacaggaatggatggtggtcccgaagagtgcaagaataaggacgatcaaggctttgagtcttgcgaaaaagtcagcaattcagataaacctctaattcaggacagcgacctgaagacctctgacgctcttcagctcgagaattcccaggagatcgagaccagcaacaagaacgatatgacgattgacattctccatgcagacggcgaacgccctaatgttctagagaatctagataatagcaaagaaaagaccgtcggcagcgaagccgcaaagaccgaggatacagtactatgtagttccgacactgatgaggagtgcctgatcatcgatacagagtgcaagaataactcagacggaaaaaccgcagtggtcggctccaacctcagttcgcggcctgcctcacccaatagctcatcgggccaggctagcgtcggcaaccagactaataccgcatgctctcctgaggaatcctgcgtgctgaagaaacccattaaacgggtatacaaaaagttcgacccagtcggcgaaatcctaaagatgcaggacgaactgctcaaacccatcagccgcaaagtcccagagctacctctgatgaacctggagaattcaaagcagccaagcgtgtccgagcagctgagtggtccatcagactcctcttcttggccaaaatctgggtggccgtcagctttccagaaacccaagggccgattgccatacgagctacaagactacgtggaggacacctcagagtacctggcaccacaagaggggaactttgtgtacaagttattcagtctgcaggatttgttgctgctcgtcagatgttcagtgcagcgcatcgaaacccgccctcgaagtaagaaacgcaagaagataagaagacaattccctgtctatgttttgccaaaagtcgagtatcaagcatgctacggtgtcgaggccctgaccgaatccgagctgtgtcgcctttggacggaatctttgctgcactcgaattcctctttttatgtgggacatattgatgcctttacgagtaaactgttccttcttgaggagatcaccagtgaagagctgaaggagaagttgagcgcgctgaagatcagcaatttgtttaacatcttgcaacatattcttaaaaaacttagctcactgcaagaggggagttacctactgtcacacgccgctgaggactcctctttactgatttacaaagcctccgatggaaaggtcaccagaactgcatacaatctgtacaaaacacactgtggacttccgggagtacctagcagtctatcagtcccctgggtgcctctggaccctagtctgttgctaccatatcacatccatcatggacggatcccgtgcaccttcccccctaagtctctggatacgacaacccagcagaaaatcggtggaacaaggatgccgacacggtcccaccggaatcccgtgtctatggagaccaagtcctcatgtctgcccgctcaacaggtagaaacagaaggggtggcaccgcataaaagaaaaattacctag

SEQ ID NO: 232828 - DNA, 2538 bp, synthetic construct
  misc_feature 1..2538: note = Description of Artificial Sequence: Synthetic coding sequence
  source 1..2538: mol_type = other DNA
atgaaaaaacacgtgaatgaagaggtaaccgagttcttgaaatttctgcagaactccgcaaaaaagtgcgcccaggattacaatatgctgagtgacgacgctcggctgtttaccgaaaaaattttacgtgcgtgcatcgaacaggtaaagaagtactccgagttctatacactgcacgaggtgacctccttgatgggcttctttcccttccgggtggaaatgggacttaagctggaaaaaacccttcttgcgctgggctcggtgaagtatgtcaagaccgtgttcccaagcatgcccattaaacttcagctctccaaagatgacatcgccactattgaaactagcgagcagaccgcggaggccatgcactatgatatctcaaaggatccgaatgccgagaagctcgtttctcggtatcatccacaaatcgcacttactagtcagtctttgttcactttactgaacaaccacggcccaacgtacaaggaacagtgggagatccctgtatgcattcaggtcatacctgttgctggctccaagccggttaaagtcatttacatcaatagccctttgccacaaaaaaaaatgacaatgcgtgagcgaaaccagatcttccacgaggtgcctctcaagttcatgatgtcaaagaacactagtgtaccagtctcggctgtgttcatggataaacccgaggaattcatctctgaaatggacatgtcctgcgaggtgaacgaatgccggaagatcgagtctctggagaatctttacctcgattttgacgatgacgtgacagaactcgagactttcggagtcacaaccaccaaagtgagcaaaagtccctcccccgcatccacatctactgttcccaacatgactgatgcgcctactgcccctaaggctgggaccaccacagtagccccaagcgccccagatatatccgccaactcacgctcactctcccaaatcctgatggagcaactgcagaaggagaagcaactcgtgacaggcatggacggagggccagaggagtgcaaaaacaaggacgaccagggatttgagtcatgtgagaaggttagcaactcggacaagcctctcattcaggactccgatctgaagacaagcgacgccctgcagctcgaaaactcccaggagatcgagacatctaataagaacgatatgaccattgacatcctgcatgcagatggcgaacgtcccaatgtgcttgaaaacttggataacagcaaggagaaaacggtgggcagcgaggctgcaaagactgaggacacagtattgtgttcctctgatactgacgaagaatgcttgattatcgatacagaatgcaaaaataacagtgacggaaagaccgcagtcgttgggagcaatctcagctcgagacccgcttcacccaatagcagttctggtcaagcatccgtgggcaatcagacaaacacagcctgcagtcctgaggaaagctgcgtactgaagaagccaattaaaagggtgtataaaaagttcgatcctgttggagagatcctgaaaatgcaggatgagctgctgaagcctatttctaggaaggtccctgagctgcctcttatgaaccttgaaaacagcaaacaaccctctgtgtcagaacagctgtccgggccatcagattcctcctcatggccaaagtctggttggccaagcgcgttccagaaaccgaaggggaggctgccctacgagctgcaggactacgtggaggatacttcggagtaccttgccccacaagaaggaaattttgtttataaactgtttagcctccaggacttgttgctcctggtgagatgctcggtgcaaaggattgagactaggccaaggtccaagaagcgaaagaagataagacggcagtttcccgtgtatgttctgccaaaggtagagtatcaggcctgttacggagttgaggcactgactgagagtgaactgtgtcgtctctggaccgaatcactcctgcattcaaacagcagcttctacgtaggccatattgatgcgttcacctctaagttgttcctgctcgaggagattacatctgaagagctgaaagaaaagctcagtgcacttaagattagcaacctctttaacatccttcaacatattcttaagaagttaagtagtttacaggagggttcttatttgctctctcacgccgctgaggattcctccctcctcatctacaaagcgtccgacggcaaagtcactcgtacagcttacaatctctataaaacacactgcgggttgcctggggtgccgtcaagcttgagtgtcccgtgggtacctttagacccttcactgctgttgccctaccacattcaccacggcaggattccatgtaccttcccacctaagtcattagacacgacgactcaacagaagatagggggtacccgcatgcccacacgaagccaccgtaatccagtctccatggaaaccaagagtagctgtttaccagctcagcaggtcgagaccgagggtgtggccccacacaaaagaaagataacgtag

SEQ ID NO: 232829 - DNA, 1017 bp, synthetic construct
  misc_feature 1..1017: note = Description of Artificial Sequence: Synthetic coding sequence
  source 1..1017: mol_type = other DNA
atgtctagtaagatggtgatctctgagccaggacttaattgggatatctctcccaaaaatgggctgaagaccttctttagtagagagaattacaaagatcactccatggcaccctccttgaaggagctacgtgtgctttccaacagacgtattggcgagaatctgaatgctagcgcctccagcgtggagaacgagcctgctgttagcagtgccacacaagctaaggaaaaggtgaaaacaactatagggatggtgctactgccgaaacccagggttccttaccccaggttctctagatttagtcaacgcgagcagcgctcctatgtggacctgctggtgaagtacgctaaaatccccgcaaattctaaggcggttgggattaacaagaacgactacctgcagtatctggacatgaagaaacacgtgaatgaggaggtaacagagttccttaaatttcttcagaactccgccaagaaatgtgcacaagactacaacatgctgagcgacgatgctcgactgttcaccgagaagatattgcgagcctgcattgagcaggttaaaaaatacagcgagttctatacacttcacgaagtgacaagtctcatggggttcttccccttcagagttgaaatgggactgaagttagagaagactttactggcattggggtctgtgaagtatgtgaaaaccgtgttcccttctatgcccatcaaactccagttgtctaaggacgatatcgctaccatcgagaccagcgaacagaccgctgaagccatgcattatgacatctctaaagatccaaacgctgagaaactggtttcgagataccacccacagatcgctctcaccagccagtctctattcaccctcctcaataaccacggcccaacatataaagagcaatgggagatccccgtatgtattcaagtcattcctgtagctgggtccaaacctgtcaaggtgatctacattaattcacctctgccccagaagaaaatgaccatgcgtgagagatag

SEQ ID NO: 232830 - DNA, 438 bp, synthetic construct
  misc_feature 1..438: note = Description of Artificial Sequence: Synthetic coding sequence
  source 1..438: mol_type = other DNA
atgtcatcgaagatggtaattagtgagccgggactgaattgggacatctcccccaagaatggattgaaaacattcttcagcagagagaattataaagaccacagtatggctccgagtctgaaggagcttagagtgctctctaacagacgtattggtgagaatctgaatgcatccgcgagtagcgtcgagaatgagccggcagtatcgtctgccactcaggcaaaagagaaggtgaaaaccactataggtatggtccttctgcctaaaccaagagttccttacccccgattctctcggttctctcagcgtgagcagaggagttacgtcgatcttctggtaaagtacgcaaagatcccagcaaactcaaaagccgtgggaatcaataaaaacgactatcttcagtatctggatatgaaaaagcacgtcaacgaggagtag

SEQ ID NO: 232831 - DNA, 300 bp, synthetic construct
  misc_feature 1..300: note = Description of Artificial Sequence: Synthetic coding sequence
  source 1..300: mol_type = other DNA
atgtcatctaaaatggtgatatccgagccaggtctcaactgggatatatccccaaaaaatggactgaagactttcttctcacgcgaaaattacaaggaccacagcatggccccttcgctcaaggagttacgcgttctgagtaataggcggatcggggaaaatttgaacgcctctgccagcagtgtagagaatgagccagccgtgtcttctgctacccaggcaaaagaaaaggtgaagacaactattggtatggtcctgcttcccaagcctcgggtaccctacccaagattttcccggtag

SEQ ID NO: 232832 - DNA, 285 bp, synthetic construct
  misc_feature 1..285: note = Description of Artificial Sequence: Synthetic coding sequence
  source 1..285: mol_type = other DNA
atgagctctaagatggtcatcagcgagcctggtctcaattgggacatctctcccaagaacgggctgaagaccttttttagccgggagaattacaaagatcacagtatggcaccgagtttgaaggaactgagagttctttccaacaggcgcatcggtgaaaatctgaatgcaagcgccagctccgtagaaaatgagccagccgtatcgagcgccacacaggctaaggagaaagtgaaaacgacaataggcatggtcctcctgccaaaacccagagtaccctactag

SEQ ID NO: 232833 - DNA, 846 bp, synthetic construct
  misc_feature 1..846: note = Description of Artificial Sequence: Synthetic coding sequence
  source 1..846: mol_type = other DNA
atgggccagaagaagcaaaggcccgctcgggcaggccagccccactcatccagcgatgcagctcaggcacctgccgagcagccacattcgtcgagcgacgcagcacaggcgccttgccccagagagcggtgtttgggccctcccaccacccctggcccttatcgatccatctacttcagctcccccaagggacatcttacgcggctcggtctcgaattttttgaccagcctgccgtgcctcttgcacgagcattcttgggacaagttctggtgagaaggctgcctaacggaaccgaactgcgcggacggatagttgaaactgaagcttatttaggaccggaggacgaggcggctcactcaaggggtggtagacaaacccccagaaaccgcggtatgttcatgaagccaggaacgttgtacgtgtacataatctatgggatgtacttctgcatgaatatttcatcgcagggagacggcgcttgtgtacttttgagagccctcgagccacttgaaggcctggagaccatgcgacagctgagatccactcttaggaagggaactgcgtcccgggtattaaaagatagggagctgtgttccggaccgtccaagctgtgccaggccttggccatcaacaaaagctttgatcagagggacttagctcaggacgaagccgtctggctagagagaggtccactggagccctcagagcctgctgtcgtggcagccgcaagggtcggtgtgggccatgccggagaatgggcaagaaaacctctgcgattttatgtccgcggaagtccgtgggtgtctgtggtggacagggttgcggaacaggatactcaggcatag

SEQ ID NO: 232834 - DNA, 924 bp, synthetic construct
  misc_feature 1..924: note = Description of Artificial Sequence: Synthetic coding sequence
  source 1..924: mol_type = other DNA
atggaagccgacaaagacgatacacagcaaatcctgaaagagcattcccccgacgagttcatcaaggacgagcagaacaaagggctgattgatgaaatcacgaaaaaaaacatccagcttaagaaggaaatccagaaattggagactgagctgcaggaagccaccaaagaattccaaattaaagaggatatacctgagaccaagatgaagttcctttcggtcgagacacccgagaacgactcacaactttccaacattagctgcagctttcaagtttcgtctaaagttccatatgagatccaaaagggacaggctctgataacattcgaaaaggaggaagtcgcccagaatgtggtgagcatgtccaagcaccacgtccagatcaaggacgtaaacttagaggtcactgctaagcccgtgccattgaactcgggtgtccgcttccaggtctatgtggaagtctcaaagatgaagatcaatgtgacagaaatccctgacactttgagagaggaccagatgcgggacaaacttgagttgagtttttctaaaagccggaacggaggaggagaagttgaccgtgtggattacgacagacagtctggcagtgcagtcataacttttgtggaaatcggagtggcagataaaatattgaagaagaaggaatatcccttgtatatcaatcaaacctgccacagggttacagtgtcaccgtatacagaaatccacttaaaaaaatatcagatatttagcgggacctctaaaagaaccgtgctcttaaccgggatggaagggattcagatggacgaggaaatcgtggaggacctgatcaacattcatttccagcgggctaaaaacggcggtggtgaggtcgacgtggttaagtgttccttgggacagccacatatcgcttattttgaggaatag

SEQ ID NO: 232835 - DNA, 90 bp, synthetic construct
  misc_feature 1..90: note = Description of Artificial Sequence: Synthetic coding sequence
  source 1..90: mol_type = other DNA
atggaggcagataaagacgacacacaacagatcctgaaggaacattcccccgacgaattcataaaggatgaacagaataagggtctttag

SEQ ID NO: 232836 - DNA, 1185 bp, synthetic construct
  misc_feature 1..1185: note = Description of Artificial Sequence: Synthetic coding sequence
  source 1..1185: mol_type = other DNA
atgtctagggaaatgcaggatgttgatctggccgaagttaagcctttagttgagaagggagaaacaatcaccgggctcctccaggagttcgatgtgcaagaacaagatatcgagaccctccatggatccgtccacgtgaccttgtgcggtacccccaagggcaataggcccgttatcctgacctatcacgacatcggaatgaatcacaaaacatgctataacccactgtttaactacgaggatatgcaggaaatcacgcaacattttgccgtctgccacgtggatgctcctggtcagcaggacggtgctgcttccttccctgctggttacatgtacccttccatggaccagcttgcggaaatgcttcccggtgtattgcagcaattcggcctgaaatccatcatcggcatgggaaccggcgcaggtgcctacatcctaacccggttcgcactcaataatcccgaaatggtcgagggtctcgtgctgatcaatgtgaacccgtgcgcagagggctggatggattgggcagccagtaagatttccggttggacccaggccctccccgacatggtggtgtctcacctctttggtaaggaagagatgcagtctaatgtggaggttgtccacacctaccgccagcatatcgtcaatgatatgaatcccggaaacctccacctctttattaacgcttacaacagccgccgtgatttggaaattgagagaccaatgccagggacccataccgtcactctgcagtgcccggcactgctggtggtgggtgattccagccccgcagtggatgcagtggtggaatgcaatagcaagctcgaccccacgaagaccaccttgctaaagatggccgactgtggcggtctgccacaaatatcccaacccgctaagctggcagaggcttttaagtactttgtgcaaggtatgggatacatgcccagcgcatccatgactcggcttatgcgatcacgaaccgcctctggctcaagtgtgacaagcttggatgggacacggtcccgctctcatacctctgaggggacccggtccaggtctcatacatcagaaggaacaagatcccggtcgcatacaagtgaaggagcacatctggatatcaccccaaacagtggtgccgctggcaattccgccggacccaagtccatggaggtcagttgttag

SEQ ID NO: 232837 - DNA, 975 bp, synthetic construct
  misc_feature 1..975: note = Description of Artificial Sequence: Synthetic coding sequence
  source 1..975: mol_type = other DNA
atgtcaagggagatgcaggatgtggatctcgccgaggtcaagccactagtggaaaaaggcgaaactattaccggcctcctccaagaattcgacgtgcaggagcaggacattgaaaccctgcacggtagtgttcacgttactttatgtggaacaccgaagggaaatcgccctgttattctcacttatcatgacatcgggatgaaccataagacctgtgcttacatcctcacccggttcgccttgaataatcccgaaatggtggagggactggtgctaattaatgtcaatccttgtgccgagggctggatggactgggccgcatcgaaaatctctgggtggacccaagccttacccgatatggtggtgagccacctgtttggaaaggaggaaatgcagtcaaatgtggaagttgtgcacacctaccgccagcatattgtgaatgatatgaacccaggaaatttacaccttttcataaacgcgtataactcaagaagagatctagaaatcgaacgccctatgccaggtactcacaccgtgactctgcaatgcccagccttgctcgtggttggtgactcgagcccggcagtggatgctgtcgtggagtgcaattccaaacttgatccgacaaaaactaccctgttgaagatggccgactgtgggggtctgcctcagatttctcaaccagccaagctggcggaggccttcaaatactttgtgcaggggatgggctacatgcccagcgcatctatgactaggctgatgcggtctagaaccgctagcggcagctcagttacctcactggatggtacccgttcgcgttctcataccagcgagggcactaggtcacgatctcacacaagcgaaggcaccaggtctcgttcccacaccagcgagggagctcacttagacattaccccaaattccggagccgctggcaactccgcaggaccaaagagtatggaggtcagttgttag

SEQ ID NO: 232838 - DNA, 1185 bp, synthetic construct
  misc_feature 1..1185: note = Description of Artificial Sequence: Synthetic coding sequence
  source 1..1185: mol_type = other DNA
atgtccagagagatgcaggatgttgatctggccgaggtcaagcctttggtagaaaaaggcgagactattacaggactgcttcaggagttcgatgtgcaggagcaggacattgagacgctccacgggtcggtgcatgtgacgctgtgtggcacgccaaaggggaaccgcccagtcattcttacttatcatgatataggcatgaatcacaagacctgttataacccactgttcaactacgaggatatgcaggaaattacccagcatttcgccgtttgtcacgttgacgccccagggcagcaggacggagctgcaagctttccggctgggtacatgtatccaagtatggaccaattggcagaaatgctaccgggagtgttgcaacagttcggactgaaatctatcatcggaatgggcacgggcgcaggggcatatattttgacacggtttgccctgaacaaccccgagatggtggagggtcttgtcctgatcaacgtaaacccgtgcgccgagggctggatggattgggctgctagtaaaatctctggctggacacaggccctgcccgatatggtggtgagtcacctttttggcaaggaggaaatgcagagcaacgtggaggtggtccacacctaccggcagcacatcgtcaatgatatgaatcctggcaacctacacctgtttatcaacgcgtacaactccaggcgagatctggagatcgagagaccgatgccgggtacacataccgttaccttgcagtgccccgcattgctggtcgtcggcgattccagtccagcggtggatgcagtggtggagtgtaattctaagctggacccaacaaaaaccaccctgctgaaaatggccgactgcgggggtctccctcaaatttcccagcccgcaaagctggccgaggcatttaagtacttcgtgcagggcatgggatacatgccaagcgcctcgatgacaagactcatgcgctcgcgcactgcaagcggctctagcgtgacaagccttgacggcacccgatctcgctcccatacaagcgaggggacacggtcacggagtcacacgtccgaaggtacccgttcccgcagccacacatccgagggggcacacctggatattacgccgaacagtggtgccgctgggaacagcgcagggccaaaatcaatggaagtcagctgttag

SEQ ID NO: 232839 - DNA, 498 bp, synthetic construct
  misc_feature 1..498: note = Description of Artificial Sequence: Synthetic coding sequence
  source 1..498: mol_type = other DNA
atgagcagagagatgcaggatgtggatttggcggaggtcaagcccctggtcgagaagggggaaaccatcaccggcctattacaggagttcgacgtgcaagaacaggacatcgagaccctccacggatcggtacatgttacactgtgcggcacaccaaaaggaaatcgacctgtaatcctcacctatcacgatatcggtatgaaccataaaacctgctacaaccccctgttcaattacgaggatatgcaagaaatcactcagcatttcgctgtgtgtcacgtggatgctcccggacagcaggatggagctgccagctttccagctggctacatgtacccctcaatggatcagctggccgaaatgctacccggagttctacagcagttcggcctgaaatctataatcgggatgggtactggagctggagcatacatcctgacaaggttcgctctcaataaccctgagatggtggaaggcctggtcctgattaacgtgtag

SEQ ID NO: 232840 - DNA, 477 bp, synthetic construct
  misc_feature 1..477: note = Description of Artificial Sequence: Synthetic coding sequence
  source 1..477: mol_type = other DNA
atgtcacgggaaatgcaggacgtcgacttagccgaggtcaagcctctggtggagaaaggagagacaattactggcctgctgcaggagttcgacgttcaggaacaggacattgagaccttgcacggatccgttcatgttacactgtgtggcactcctaagggtaatcggccagttatattgacttatcacgatattgggatgaatcataaaacctgctacaatcccctgttcaattacgaggacatgcaggagataacacaacatttcgccgtgtgccatgtggacgccccaggccagcaggatggagcagctagtttcccagccggatatatgtaccccagcatggaccaacttgcagaaatgcttcctggtgtccttcaacagttcggactgaaatccatcattggcatgggcacgggtgcaggggcttatatcttgacaagatttgcactcaataaccctgaaatggtggaatag

SEQ ID NO: 232841 - DNA, 402 bp, synthetic construct
  misc_feature 1..402: note = Description of Artificial Sequence: Synthetic coding sequence
  source 1..402: mol_type = other DNA
atgtctagggagatgcaagacgtggatctggccgaggtcaaaccccttgtagaaaaaggtgaaaccatcactggcttgctgcaagaatttgatgtacaggaacaggacattgaaacactgcacggaagcgtgcatgtcactttatgtggtacgccgaagggcaacaggccagtgatcctaacttaccacgatatcggaatgaatcataagacctgttacaaccctttgttcaattatgaggatatgcaggaaattactcagcacttcgctgtatgccacgttgacgcaccgggacagcaggatggcgcagctagttttcctgccggttacatgtacccaagtatggaccagctggcagagatgctgcctggagtcctgcagcagtttgggctcaaaagttag

SEQ ID NO: 232842 - DNA, 477 bp, synthetic construct
  misc_feature 1..477: note = Description of Artificial Sequence: Synthetic coding sequence
  source 1..477: mol_type = other DNA
atgagtcgcgagatgcaggatgtagacttggcagaggtgaaacccctcgtggagaagggcgaaaccattacaggacttctacaggagttcgatgtccaggaacaagacatagaaactctgcacggatctgttcacgttaccctctgcggaacccctaagggaaaccggccagtgatcttaacgtatcatgacataggtatgaaccacaagacatgctataatccccttttcaactatgaggacatgcaggaaattacccaacatttcgccgtctgccacgtcgatgctcctggtcagcaggacggagcggcttcttttcctgctggctacatgtacccttccatggatcaactggccgagatgctgccaggtgtgttacaacagttcggactgaaaagtattatcggcatggggactggcgcaggggcatatatcttgacgagatttgcccttaacaaccccgaaatggtggagtag

SEQ ID NO: 232843 - DNA, 669 bp, synthetic construct
  misc_feature 1..669: note = Description of Artificial Sequence: Synthetic coding sequence
  source 1..669: mol_type = other DNA
atggactgggccgcttctaaaatttcaggttggacacaggccctccccgatatggtggtgagccacctctttggcaaggaagaaatgcagtcaaacgtcgaagtcgtgcacacatatagacagcatatcgtgaatgacatgaacccagggaatctacaccttttcatcaatgcctacaactcccgcagagatctggagatcgagcgccctatgcccggtactcacaccgtcacccttcagtgtcccgcactcctggtggtgggcgattccagtccagctgtagatgccgtcgtcgagtgcaactccaaactggaccctaccaagactaccttgctcaagatggcagattgtggtggccttccgcagattagccagcccgcaaaactggctgaagccttcaagtactttgtgcaaggcatggggtatatgccatccgctagcatgaccaggctcatgcgcagccggaccgcgtccggctctagtgtgaccagcctcgacgggacacgaagtagatcgcacacaagtgaaggaactaggtcaagaagtcacacatcagagggtacccgaagccgcagtcacacaagcgaaggcgctcacctcgacatcacgccaaattccggcgcagcaggcaactcagcaggtccgaagagtatggaagtgagttgctag

SEQ ID NO: 232844 - DNA, 450 bp, synthetic construct
  misc_feature 1..450: note = Description of Artificial Sequence: Synthetic coding sequence
  source 1..450: mol_type = other DNA
atgagcagggagatgcaagacgtggacctcgccgaagtgaagcccctcgttgagaagggtgagacaattactggactcctgcaggaattcgacgtgcaggaacaggacattgaaacattacacgggtctgtgcatgtgacgttatgcggcacaccaccagcaaagctggctgaggccttcaaatactttgtgcaggggatgggatacatgccttccgcctctatgacacgcctgatgagatcacgaaccgcttcagggagctccgtcactagtctggatggcacccggtcacgatcccatacctctgagggtacacggtcaaggtcccataccagcgaaggaacgcgcagcaggagtcatacatccgagggcgcacaccttgatatcacacccaatagtggtgccgctggtaactccgcgggtcccaagtccatggaagtttcctgttag

SEQ ID NO: 232845 - DNA, 942 bp, synthetic construct
  misc_feature 1..942: note = Description of Artificial Sequence: Synthetic coding sequence
  source 1..942: mol_type = other DNA
atgcaagagattacccagcattttgctgtgtgccacgttgatgccccaggccaacaggacggagccgcttctttccctgccggatatatgtaccccagcatggatcagcttgccgagatgctccccggtgtgctgcagcagttcggcctcaaatctatcatcggcatgggcactggcgctggcgcatacattttaacaaggttcgcacttaacaatcccgagatggtcgagggcctcgtgctgattaatgttaatccatgcgccgaaggctggatggactgggctgccagcaaaatctccggctggacccaggcactgccggacatggttgtgagccacctcttcggcaaagaggaaatgcagagtaacgttgaggtcgttcatacataccggcagcacattgtgaacgacatgaatccaggaaacctgcacctgtttattaacgcatataatagcagacgggaccttgagatagagaggccaatgccaggcactcacaccgtcacgctccagtgccctgctttgttagttgttggcgacagttcccccgcagttgacgctgtggtcgagtgcaatagtaagctcgaccctaccaaaactacacttcttaaaatggcagattgcggcggattgccccaaatttcccagcccgcaaagctggcagaggccttcaaatatttcgttcagggaatgggatatatgccatccgcttccatgacacgcctgatgcggtcccgcactgcttctggcagctccgtaacaagtctcgacggcacgcgatctagatctcacacctccgaaggtacgcgatccagaagccacacaagtgaaggcactcggtcccggagtcacacctccgagggggctcacttggatatcacccccaattcaggagccgcaggcaattctgctggcccaaaaagtatggaagtgtcctgttag

SEQ ID NO: 232846 - DNA, 288 bp, synthetic construct
  misc_feature 1..288: note = Description of Artificial Sequence: Synthetic coding sequence
  source 1..288: mol_type = other DNA
atgtcaagagaaatgcaggatgttgacctggctgaggtgaagcctctggtggaaaaaggcgaaaccatcaccgggctccttcaggagtttgacgtgcagacaaaacccgcaacgacaccaagttccacaacgaggacttgtagaagatctccttccaccctgccaagcgctacgtggactcccctcgcttcccgcactgctcagcctccaagccctcagggaacttgtacaccaccctggatttcctggctgaaatgttttctcgaatctttcaattcactgggctag

SEQ ID NO: 232847 - DNA, 1491 bp, synthetic construct
  misc_feature 1..1491: note = Description of Artificial Sequence: Synthetic coding sequence
  source 1..1491: mol_type = other DNA
atggctgatgagagcgaaactgcagtgaaacctcccgcacctccacttccccagatgatggaaggtaatgggaacggccatgagcactgtagcgattgcgagaacgaagaggataattcgtataaccgcggaggtctgtctcctgcaaatgatacgggcgctaaaaagaagaagaaaaaacaaaaaaagaaaaaggaaaagggcagcgagaccgactccgctcaagaccaaccagtgaaaatgaactctctacccgctgagaggatccaagaaattcaaaaggcaatcgagctgttcagcgtgggacaagggccagccaaaacaatggaggaggccagcaagagatcctaccagttctgggacactcagcctgttcccaaactaggcgaggttgtgaacacgcatggccctgtggaacccgataaagataacattcggcaggagccctataccttgcctcagggattcacttgggacgctctggacctgggagatagaggggttcttaaggaactttataccctgcttaacgagaactatgtggaagacgacgataacatgtttagattcgactactcgcccgaattcctcctgtgggctctgaggcccccagggtggctcccacagtggcattgcggggttagggtggtctcctcccggaagctggtggggtttatctccgctattcctgctaacatacacatttatgataccgaaaaaaaaatggtcgaaattaacttcctgtgtgtgcacaagaagctccggtccaagcgtgttgcacccgttctgataagggaaatcaccagacgcgtacatctcgaaggcatcttccaggccgtgtacacagccggtgtcgtcttaccaaagcccgtcggaacatgccgctactggcaccggagtctgaatccgcgtaagctcatcgaagtaaaatttagtcatctaagcagaaatatgaccatgcagaggaccatgaaactgtatcgtctcccggagacacccaagacagcagggttgagacctatggaaactaaagatatcccagtcgtgcaccaacttctcacccgctatcttaagcaattccacctaacacctgttatgtcccaggaggaagtggagcactggttctacccccaagaaaacataatcgatacatttgtcgtggagaacgccaacggcgaggtgaccgacttcctgtcgttttacactctgccctccacaatcatgaaccatcccacccacaaaagtctgaaggccgcatactcgttttataacgtgcacacacaaaccccgttattggatttgatgagcgatgctttggtgttagctaagatgaagggcttcgatgtgtttaacgcattagacctaatggaaaataagacctttctggaaaagcttaaattcgggattggtgatggcaacttgcaatactacctctacaactggaagtgcccctctatgggagctgaaaaggtgggccttgtgctgcagtag

SEQ ID NO: 232848 - DNA, 414 bp, synthetic construct
  misc_feature 1..414: note = Description of Artificial Sequence: Synthetic coding sequence
  source 1..414: mol_type = other DNA
atggcagatgagtcagagactgcagtaaagccccctgccccaccactaccccagatgatggaagggaatgggaatggacacgaacactgcagtgattgcgagaatgaagaggacaactcatacaacaggggaggtctatctcctgccaacgatactggcgctaagaaaaaaaagaagaaacagaagaaaaagaaagaaaagggaagtgagaccgacagtgcacaagatcaaccagtgaaaatgaattctttgccagccgagcgcattcaggaaatccagaaggccattgaactgttctcggtagggcagggtcctgccaagacaatggaggaagctagcaaacgctcttaccagttttgggacacgcagcctgtcccaaaactggctaagcggactgtacaccctcctgagtag

SEQ ID NO: 232849 - DNA, 1491 bp, synthetic construct
  misc_feature 1..1491: note = Description of Artificial Sequence: Synthetic coding sequence
  source 1..1491: mol_type = other DNA
atggccgacgaaagtgagaccgccgtgaagccaccagcccctccgctgccacagatgatggagggcaacgggaatgggcacgaacactgtagtgactgtgaaaatgaggaggataacagttataatcgtggcggtctttcacctgccaatgatacaggtgcaaaaaagaagaaaaagaagcagaaaaagaaaaaggagaaaggatccgaaactgattccgcgcaggaccagccagtgaagatgaattctctaccagcagagcgaatccaggaaatccagaaggccatcgaactcttcagcgtgggtcaaggcccagcaaagactatggaggaggcatccaaacgcagctaccagttttgggatacccagcccgtgcccaaactgggagaagtggttaacacacacggacccgttgaacctgacaaagataacattcggcaggagccctataccttgcctcaggggttcacgtgggacgcactggacttgggagaccggggagtgctcaaggaactctacacactcttgaatgaaaattacgtagaggacgatgataacatgttccgttttgattactcccccgaatttctactgtgggctctgcgtccgccaggctggctgccgcagtggcactgtggggtgcgggttgtgagttctcgcaagctggtcggcttcataagtgccattccagctaatattcatatttacgacactgagaagaagatggtggagataaattttctctgtgtgcataagaaactgagatccaagcgggtggcacccgttcttatcagagaaatcacacgccgtgtccacctggagggaatcttccaggcagtgtacaccgcaggcgtcgtactccctaagccagttggcacctgtcgttattggcaccggagcctcaatcctagaaaactaattgaagtgaagtttagccatctgagccgcaacatgaccatgcagaggacaatgaaactatacaggctgcctgaaacacccaaaacagcaggcctgcgtccgatggagacaaaggacatcccagttgtgcaccagctgctgacaaggtacctcaagcagtttcatcttacgccagtcatgagtcaggaagaagttgaacattggttttacccccaagaaaacatcattgacacatttgtagtggagaatgccaatggagaggttactgacttcctgagcttctacactctgccaagcacgatcatgaatcatccgacgcacaagtctctgaaagcagcatacagcttttacaacgtgcatactcagaccccccttctggatctgatgtcagacgccctcgtgttagcaaagatgaaggggttcgatgtcttcaacgcgcttgatctgatggagaataaaactttcttggaaaagctgaaattcggaatcggagacgggaatttacagtattacctgtataactggaaatgtccaagtatgggagcagaaaaggtaggcttggttcttcagtag

SEQ ID NO: 232850 - DNA, 1590 bp, synthetic construct
  misc_feature 1..1590: note = Description of Artificial Sequence: Synthetic coding sequence
  source 1..1590: mol_type = other DNA
atggctgaagattccgagtctgcagcaagtcaacagtctctggaacttgacgatcaggatacctgcgggatcgacggcgacaatgaggaggaaactgagcacgccaaaggtagtcctggagggtacttaggcgctaaaaagaagaagaaaaagcagaagcggaaaaaagagaagccaaattccggaggtaccaaaagcgactcagcatcagattctcaggagattaagatccaacaaccaagcaaacacaacacgatctggcagcagataagcgcaggcgctgcaatgggtagcgccacaatggaaggcgaatggaccgggatgaggaacgaccataagaatcctagcgtgcctatgcagaaactacaggacattcagagggccatggaactgttgtctgcctgccaaggcccagccagaaacatcgacgaggccgctaaacaccgttatcagttttgggacacccagccggtaccgaaactcgatgaggttataacatcccatggggctattgaacctgataaagataatgtcaggcaggaaccttactctttgcctcagggctttatgtgggacaccctggacttgagtgatgccgaggtgctgaaagaactgtatactcttctcaacgaaaactacgttgaagacgatgataatatgttccggttcgactattctccagagtttttgctgtgggcactgcggccacccggatggctgcttcaatggcactgcggagtccgcgtaagcagtaataagaaactcgtaggctttatctcagctataccagctaatataaggatctacgactctgttaaaaaaatggtggaaattaactttctgtgcgtgcacaagaagctgcgcagtaagagggtggcacccgttctcattagagagataacccgtcgcgttaacctggagggcatcttccaggcggtgtacacagcaggcgtcgttttgcccaagccgattgctacatgcagatattggcacaggtcacttaaccctcgcaagctcgtggaggtgaagttctcccatctttcacgaaatatgaccctgcaacggaccatgaaactctaccgactgcccgacgtcaccaaaacatccgggctcaggcccatggaaccgaaggacatcaagtccgtccgtgaactcattaacacatatcttaagcagttccatctggcccctgtgatggacgaagaagaggttgcccattggttcctaccccgagagcacatcattgacacctttgtggttgagagcccgaacgggaagctcactgattttcttagcttttacactctccccagcacggttatgcatcaccccgctcataagtcccttaaggcagcgtattcattttacaatatccacactgagactcccctgttggatctgatgtctgacgcactgattctggcgaagtccaaaggtttcgacgtcttcaatgctctggacttgatggagaacaaaacatttctggaaaagctgaaattcggaatcggcgatggaaaccttcaatactatctttacaactggaggtgcccaggcacagatagcgagaaggtcgggcttgtgctacagtag

SEQ ID NO: 232851 - DNA, 1458 bp, synthetic construct
  misc_feature 1..1458: note = Description of Artificial Sequence: Synthetic coding sequence
  source 1..1458: mol_type = other DNA
atgcgcagaagacggtccacacccaaggaggtccttgagggaatttgggagccaaagagaaaacggcgaaacagaagagaaaagcgacgtaatcagataccagaggccccttctcagaccagacacctcatcccccgaaggctaaaatttagttcactgcgtaacactacaccatctggctctagattccagcgcgagcagccgtggaacccgtccgtgcccatgcagaagctacaggacatccaaagagcgatggaactactgtccgcgtgtcaaggcccagccaggaacattgatgaggcggctaaacatcgctatcagttctgggatacacagcctgtgccaaaactggatgaggtcatcacttctcatggcgcaattgagcccgacaaagataacgtgagacaggagccctactccctgccacagggattcatgtgggataccctggatctctccgatgctgaggtgcttaaagaattgtatactctgttaaatgagaattatgtcgaggacgacgacaatatgtttcgctttgattatagcccagaattcttgttatgggcattgcgccctcctgggtggctcttgcagtggcattgcggagttagagtaagttctaacaaaaagctcgtggggtttatctcggctattcccgctaatatacgtatctacgattcagtgaagaagatggtggagatcaattttctgtgtgtgcacaaaaaactcagaagcaagagagtcgcacccgtcctgattagagagatcactagaagagtgaatctcgagggcatctttcaggctgtgtacactgccggagtggttctgcctaagcccatcgcaacttgcagatactggcatagaagcctgaacccacgcaagctggtagaggtgaaatttagtcatttgtccagaaacatgacactgcagcgaacaatgaagctgtacagacttcctgatgtcactaagacctccggacttcgaccaatggaaccaaaagacattaagtccgtgagagaattgattaacacttatctgaagcagtttcatctggcccctgtgatggatgaggaggaggttgcgcactggttcctgccgcgagaacacatcatcgatacatttgtggtcgagtcccccaacggtaagctgacagattttcttagcttttatacccttccctcaacggtgatgcaccaccccgctcacaaatccctgaaagccgcttatagcttttataatatccataccgagactccactgctggatctgatgtccgatgctttgattcttgcaaaaagtaagggttttgacgtttttaatgccctggatctgatggagaataaaaccttcctggagaagctcaaattcgggatcggagacgggaacctgcaatattatttgtataactggaggtgcccgggaactgactccgaaaaagtggggctcgttctgcagtag

SEQ ID NO: 232852 - DNA, 1497 bp, synthetic construct
  misc_feature 1..1497: note = Description of Artificial Sequence: Synthetic coding sequence
  source 1..1497: mol_type = other DNA
atggccgaggacagcgagtcggctgcctcacaacagtcactggagttggatgaccaggatacttgtgggatagacggcgacaatgaggaggagacagaacatgccaaggggagtccagggggttacctcggagccaagaaaaagaaaaaaaagcagaaaaggaaaaaagaaaagcccaacagtggtggtaccaagtctgatagcgccagcgacagtcaggagattaaaatccagcagccatcgaaaaacccgtctgtgcccatgcagaagcttcaggatatccaacgcgctatggagcttcttagtgcctgccaggggccagcccgtaatatcgacgaagctgccaaacaccgctaccagttctgggacacacaaccagtgcccaaacttgatgaagttatcaccagtcacggcgcaattgagccagataaggacaatgtgcgccaagaaccttattccctgcctcaggggttcatgtgggacactctggatttgagtgacgctgaggtcctcaaagagctgtacaccctgctcaatgaaaattacgtcgaggacgacgacaacatgttcaggtttgactatagtcctgaattcctgctctgggctctgcgtccaccaggatggttactgcagtggcattgcggtgtgcgcgtgtccagcaacaagaagctggtcgggtttatcagcgcaatcccggcaaatattcgcatctatgatagcgtaaaaaagatggtggagataaattttctctgcgtccataaaaagcttcgcagcaaacgggtcgctccagtacttataagagagattacaaggagagtgaatctcgagggcatcttccaggccgtgtacactgctggggtggtgcttccaaagcccattgccacttgtaggtattggcacagatcccttaacccacggaagctcgtggaggtgaagttctctcacctgtcacggaacatgaccctgcagcgaactatgaaactgtaccggctgccggacgtgacgaaaacctctggactgaggcccatggagcccaaagatattaaaagtgttagagaactgatcaacacttacctgaaacaattccacctagcacccgtcatggacgaggaggaagtggcgcattggtttctcccccgtgagcatatcatcgacacctttgtcgtagaaagtcccaacggcaagctaactgacttcctttctttttatacgcttcccagcacggttatgcaccatcccgctcacaagagcttaaaagccgcatactcattttataatatccatactgaaaccccattgttagatctcatgagcgatgctctgatactggcgaaaagtaagggctttgacgttttcaatgcattggatctgatggaaaacaagactttcttggagaagctcaagttcggcatcggcgacggcaatctacaatactacctgtacaattggagatgtcccggtactgacagtgaaaaggtggggctggtgctacagtag

SEQ ID NO: 232853 - DNA, 234 bp, synthetic construct
  misc_feature 1..234: note = Description of Artificial Sequence: Synthetic coding sequence
  source 1..234: mol_type = other DNA
atgtccgatgcactaatcctggctaaatccaaaggatttgatgtgttcaacgcccttgacctcatggagaataaaacctttctcgaaaagctgaagtttggcatcggagatgggaacctccagtactacctctacaattggaggtgtcccggaacagacagtgaaaagggtagcggtaattttgtcaatgccaacgggaagctgctgcctgacgtgtgtcgccgaccgccatag

SEQ ID NO: 232854 - DNA, 1458 bp, synthetic construct
  misc_feature 1..1458: note = Description of Artificial Sequence: Synthetic coding sequence
  source 1..1458: mol_type = other DNA
atggcctcgccctggcggggtgcacatgaggtcctggagggaatttgggagccgaagaggaaacggcgtaaccgacgggagaagaggagaaatcagatacccgaggcaccgagccagacaagacatctgattccacggaggctgaaattctcctccctgcggaatacaacgccttctggtagccggttccagcgcgaacagccatggaaccccagtgtgcccatgcaaaagctgcaggacatccagcgggctatggagcttcttagcgcatgtcaggggccagcacggaacattgacgaggccgcaaagcatcggtaccagttttgggacacccagcccgtgcctaagttagacgaagttattacaagccatggtgccatcgaaccagacaaggataatgttagacaggagccctattccttaccacagggctttatgtgggacacgcttgacttatctgacgcagaagtgctcaaagaactctacaccttactcaatgaaaactatgtggaagacgatgataatatgtttcgattcgactattcaccagagtttctgttgtgggccctccggcctcctggatggcttttgcaatggcactgcggagtcagagtgtccagtaataaaaagctggttggatttatttccgcaataccggcaaacatcagaatttacgattcggtcaagaagatggtggaaatcaactttctctgtgtgcataaaaagcttcgttctaagcgcgtcgccccagtcttgataagggaaattactaggcgagtcaatctggaagggatcttccaggcggtctataccgctggtgttgtcctcccaaaacctattgccacctgtaggtattggcaccggagtttaaatcccaggaagctcgtggaagtgaagttcagtcacctttcaaggaatatgacactacagcgtacgatgaaactatatcggctcccggatgtgactaagacaagtggtctccggcctatggagcccaaggacattaagagcgtgagggaactgatcaatacctatttgaagcagtttcatttggcccctgtgatggacgaagaggaggtggcacactggttcttgcccagggagcatatcattgataccttcgtggtcgaatccccaaacggtaagctaaccgacttcctcagtttctataccctccccagcacagtgatgcaccatccagcgcacaaatcattaaaggccgcttactccttttataacattcatactgagacccctctgcttgatctgatgagtgatgccctgattctggccaagagcaagggctttgacgtgtttaacgccttagatctcatggagaataagacctttctggaaaaactaaagttcgggatcggcgacggcaacctgcagtattacctgtacaactggcggtgtcctggcacagattctgagaaagttgggctcgtattacagtag

SEQ ID NO: 232855 - DNA, 933 bp, synthetic construct
  misc_feature 1..933: note = Description of Artificial Sequence: Synthetic coding sequence
  source 1..933: mol_type = other DNA
atgtttcggttcgattactccccggagtttctgttatgggccttaaggccccctggttggctgctgcagtggcactgcggtgtgcgagttagttccaataaaaaactagtgggatttatctctgcaattccagctaatattcgtatttatgactccgtgaaaaagatggtggaaattaactttctgtgcgttcataagaagctgcgatcgaaacgtgtggcacccgtcctgatacgcgaaatcaccagacgcgtgaatttggaagggattttccaagccgtctacactgctggcgtagtgttaccaaagccaatagcgacgtgtaggtattggcatagaagcctcaaccctagaaagcttgttgaagtgaagtttagccatttgagcagaaatatgaccttgcagaggactatgaagctataccgccttcctgatgtgaccaaaacaagcgggctgaggccaatggagcccaaagacatcaaatctgtacgggaactcattaatacataccttaagcagttccatctggcccctgtcatggacgaagaagaggtggctcattggttcttacctagagagcacatcatcgacacgttcgtggtggaatcgcccaacggcaagctcacagacttcctgagtttttacaccctgccatccaccgtgatgcaccaccccgcacataaaagcctgaaagccgcatattcgttctacaacattcacactgagacccctctgctggacctgatgagcgacgcgctgattttggccaaatccaagggattcgacgtgttcaatgccttagaccttatggaaaataaaacatttttggagaagttgaagttcggtatcggcgatggcaatcttcagtactacctctacaattggagatgtcccggaacagacagtgagaaggtggggcttgttctgcagtag

SEQ ID NO: 232856 - DNA, 459 bp, synthetic construct
  misc_feature 1..459: note = Description of Artificial Sequence: Synthetic coding sequence
  source 1..459: mol_type = other DNA
atggaagctgttctgaatgagctcgtcagtgtggaggatttattgaaatttgagaaaaagtttcaaagcgagaaggccgctgggagcgttagcaagtctactcagtttgagtatgcttggtgcctggtgcgatctaaatacaacgatgacattagaaagggaattgtgttgttagaggaactgctccctaagggctccaaagaagagcagagggattatgtcttttatctggctgtgggtaactaccggctgaaggagtacgaaaaagcccttaagtatgttagaggactactgcaaaccgagccacagaataaccaggctaaagagctggaacggctcatcgacaaggctatgaaaaaggatggactcgtgggcatggccattgtcggtggcatggcactgggagtcgccggtttggcaggtctgatcggactcgccgtttccaagagtaaaagctag

SEQ ID NO: 232857 - DNA, 2076 bp, synthetic construct
  misc_feature 1..2076: note = Description of Artificial Sequence: Synthetic coding sequence
  source 1..2076: mol_type = other DNA
atggcactgttgctgacactgacctccccagacctggaaggcacctgggacactagggacaaagatggcttcaaagcccaggagggtccacctctggccgtgcccgaattcccagtctgtgggctgtacaggatctatggcgtttgtgggtcattctcaagctttttcatcatccgatgtagcctctgcgcactggagacattaaaatctcctcaacatgacccactcgagatccccgaacagtcgctgaagctgatcccattagtaagtggtaagcgtgagctgacccggggtcaaaaagctggcgagaaaccgttagccgctggacccggagaagaggaactgctcagaggctccgcccctcatgctcaggacacccagagtgaagagctcccaccaagttgcaccatttctggggagaagaagcctcccgcagtgtccggggaagcaacaggggcagacgcagggagactctgccctccaccccgatccagggctccacataaggacagaaccctggcgagatcaaggccgcagactcagggggaagattgctctctacctgtgggtgaagtaaaaatcgggaagcgatcatactcaccagctcccggtaaacaaaaaaagccaaacgcaatgggactggcccctacttccagccccggagcacccaattctgctagggccacgcacaaccccgttccttgtggcagcgggaggggcccatgtcatctggccaatctgctgagcacactggcccagtccaaccagaacagggaccataagcagggacccccagaggtgacatgccagatcaggaagaaaacgaggaccctttaccggtccgatcaactggaggaattagagaagatttttcaggaagaccattaccctgactcggataagagaagggagatagctcaaaccgttggagtgaccccccaacgaatcatggtgaagggcgcagggtcgctcgttgccggttggagcggagggggacccactatagagacgctcgagcttcagagcgaaaggtccgctgtggcctgggtgtggtttcagaaccggagggcaaagtggcgcaaaatggagaaacttaacggtaaagagtcaaaagacaaccccgcagcgccaggacctgctagtagccagtgttcctccgccgcagagattctgccagctgtgcctatggagcctaagcctgacccgtttcctcaggagagcccactggacacatttcccgaaccacccatgctgcttacttcagatcagaccctggcaccaactcagccatcagagggtgcacagcgtgtggtgaccccaccactgttcagtcctccgccagttcggcgagccgacctgccatttccgttaggacctgtacacacaccacaactaatgcccctacttatggacgttgctggcagtgactccagccacaaggatggtccatgcggatcatggggcacatccataacattaccccctccatgtagttacctggaagagctggaaccacaggactaccagcagagtaaccagcccggaccatttcaattttctcaggcccctcaacccccactatttcagagcccgcagccgaagcttccttatctcccaacttttccttttagtatgccgtcttctctcacccttcccccaccggaggactcattgttcatgttcccgtgtggcccatccggcggaactagccaggggtactgcccgggtgcttcttctggccaaatcctgatgcagccccctgcaggtaacatagggacggcttcctggtccgatccctgtctgccagagctgcccttccccggacccttctgcccccaggcactcggccacccccctggaggtgatggctatttccccgatttgttcccgacaccttgtcctcaggcccttggcaggcagccatcctcagcgcttagttggatgccagagggggctcgcccaggaactggtcccctcctatctaaggccaaagaagagcctcctgccgcttccttagatcagcccagcgccctagaggaagctcgcggtgacgacaagaatagccacgtcccgtag

SEQ ID NO: 232858 - DNA, 699 bp, synthetic construct
  misc_feature 1..699: note = Description of Artificial Sequence: Synthetic coding sequence
  source 1..699: mol_type = other DNA
atggagcggtgccccagcctgggtgtaacactgtacgccttagtcgtggtattagggttgagagccacacctgccggaggtcagcactacctgcacatccgtcccgctccatccgacaatttgcctttggtggacctaatcgagcatcctgatcccattttcgaccccaaagagaaggatctaaatgagactctcctgaggagcttattggggggacattatgatcccggatttatggccaccagtccccctgaagacaggccaggcggagggggaggcgcagccggaggcgctgaggatcttgcagagctggatcaactgctgcggcagcgcccttcaggagcaatgccttccgaaattaagggactggagttttctgaggggctcgcccagggcaagaagcagcgcctttcaaaaaaacttcgaagaaagctgcagatgtggctctggtcccagacgttctgtcccgtgctctacgcttggaacgacttaggcagccgattctggcctagatacgttaaagtcggcagctgcttttccaagcgttcttgtagcgtgccggaaggaatggtatgcaaaccttcaaagagcgtacacttgacagtactccgatggcgatgccagcggcgtggagggcagaggtgcggctggattcccatccagtatcccatcatctcagagtgtaagtgtagctgctag

SEQ ID NO: 232859 - DNA, 990 bp, synthetic construct
  misc_feature 1..990: note = Description of Artificial Sequence: Synthetic coding sequence
  source 1..990: mol_type = other DNA
atgggcacagctgctgccgctgcggcagccgctgctgctgccgcagctggcgagggggctaggagtcctagtcccgctgctgtgtctctaggccttggtgttgcggtagtaagctctctggttaatggttcgacctttgtgctccagaaaaaggggatcgtgcgcgctaagcgtcgcggaaccagttacctgacagatattgtgtggtgggccggtactatcgcaatggcagtggggcagattggaaacttcctagcctatacagccgtgcccacagtgttagttactcctctcggagcactgggagtccctttcggttccatccttgcctcttacctgcttaaagaaaagcttaacatcctaggaaagcttgggtgcctgctgtcctgcgccggaagtgtcgtcttgatcatccacagccctaagtcggaatccgtaaccacacaggcggagctggaagagaagctgacgaatcctgtttttgtggggtacctgtgcattgtattactgatgctcctcctcctcattttctggatagccccagctcacgggccaactaatataatggtgtatatctctatctgcagtctgttgggcagctttacagtgccatctaccaaagggatagggcttgccgctcaggatatactgcataacaatccgtcttcccagcgggcactgtgcctttgcctggtgttgctggcggtcctggggtgttctatcattgtgcagtttaggtacatcaacaaggctcttgaatgttttgatagttctgtgttcggggctatttattacgtcgtgttcactacgcttgtgctgttagctagcgcaatcctctttagggagtggtctaacgtaggcctcgtggacttcctgggaatggcttgcggctttaccactgtgtctgttggcattgtcctcattcaggtgttcaaggaattcaatttcaatctcggggagatgaacaaaagtaatatgaagactgactag

SEQ ID NO: 232860 - DNA, 765 bp, synthetic construct
  misc_feature 1..765: note = Description of Artificial Sequence: Synthetic coding sequence
  source 1..765: mol_type = other DNA
atggccgtagggcagataggaaacttcctagcctacacggccgttccaactgtcctggttaccccgttaggagccctcggcgtcccgttcggttctatacttgcaagttaccttctgaaggagaaacttaacatactgggcaagttgggctgcctgttatcctgtgctggctctgttgtgctcattatacattcccctaagtcggagtcagtcaccactcaggcagagttagaggaaaagctgaccaaccccgttttcgttggatatctgtgcatagtcctgctgatgcttcttctgctgatcttctggatcgctccagcacacggcccaacaaacatcatggtttatatctccatttgttctcttctgggctcctttactgttccgagcacaaagggaataggtctagctgctcaagacattttgcacaacaacccgtcctctcaacgtgccctctgtctctgtttggtgctcctggcagtcctagggtgctccataatcgttcaattccgctatatcaacaaagctctggaatgcttcgacagttccgtttttggagcgatctactatgtcgtgttcacaacacttgtactcctggcctccgcgattttattccgagaatggtcaaacgtgggcctcgtagacttccttgggatggcctgcggatttactactgttagcgtggggattgtattgattcaggtattcaaggaatttaattttaacttgggtgaaatgaataagtccaacatgaaaaccgattag

SEQ ID NO: 232861 - DNA, 480 bp, synthetic construct
  misc_feature 1..480: note = Description of Artificial Sequence: Synthetic coding sequence
  source 1..480: mol_type = other DNA
atgcttctcctgctcattttttggattgccccagcccatggaccaactaacatcatggtgtacatctctatctgcagtcttctgggttccttcacggtcccatccactaagggcattggcttagccgcacaggatatcctgcacaacaatccctctagtcagcgagccctgtgtctgtgtctcgtgttgcttgccgtcttagggtgctctattattgttcaattccggtatattaataaggccctggaatgtttcgattcatcagtgtttggcgcaatctactacgtggtctttaccaccttagtgcttctggcctccgcgatcctgttccgcgagtggtctaacgtgggacttgttgatttcctcgggatggcttgtggtttcacgacagtctccgttggtatagtgctcattcaagtgttcaaggagttcaacttcaatctgggcgaaatgaataaaagcaacatgaagaccgattag

SEQ ID NO: 232862 - DNA, 765 bp, synthetic construct
  misc_feature 1..765: note = Description of Artificial Sequence: Synthetic coding sequence
  source 1..765: mol_type = other DNA
atggccgtggggcagattggcaatttcctggcatacaccgccgttcccactgtgctggtaaccccgctgggcgcacttggagtgccattcggctcgattcttgcatcatacttgctcaaagaaaagctgaacattctcggaaagctcggctgcctcttatcttgcgccggtagtgtcgtgctcataatccactctcctaaatcggaatcggtgacaacacaagcggagctggaagaaaaactgaccaatccagtcttcgttgggtatctgtgcatagtgctgctcatgctccttctcctcatattttggatagctccagcacatggtcccaccaatatcatggtgtacatttcgatttgctccctgttgggctctttcactgtgccttcaacaaaagggattgggctggccgctcaggacatcctgcacaataatccatcttcgcagagagcactttgtttgtgtctggtgcttctggcagtgctagggtgttcaatcattgttcaattcaggtatattaataaagccctggaatgctttgacagctcagtttttggggcaatctactacgtagtctttactacactggtgctccttgcatccgctatcctgtttcgagagtggtctaacgtgggacttgttgacttcctaggcatggcgtgtgggtttacgaccgtgagtgtggggattgtgctcatccaggtgtttaaggaattcaatttcaatcttggggaaatgaacaaaagcaacatgaaaacagactag

SEQ ID NO: 232863 - DNA, 1083 bp, synthetic construct
  misc_feature 1..1083: note = Description of Artificial Sequence: Synthetic coding sequence
  source 1..1083: mol_type = other DNA
atgagccagggcaggggaaaatatgacttctacattggtctgggcctcgctatgagtagttcaattttcattggaggaagtttcattctgaaaaaaaaaggccttctccgcctggccagaaaaggatctatgcgtgcaggccagggtggacatgcatacttaaaggagtggctctggtgggccggacttctgagtatgggggctggcgaggtcgctaatttcgcagcctatgcgtttgcacccgctacattagtgacaccccttggtgccctgtctgttttagtgtccgccattttatcatcctatttcctgaacgagcggctgaatttgcacggcaagatcgggtgtcttctgtccatactagggtccacagtcatggtgattcatgccccaaaagaggaggaaatagagaccctcaatgagatgtctcataaactcggcgatcccggattcgtggtttttgccaccctcgtggtaatcgtcgctcttattctaatttttgtggttggacccaggcatggacagacgaacattttggtgtacatcaccatctgctctgtaataggggcattctccgtgtcctgcgtgaaggggctgggtatcgctatcaaagagctgttcgcaggtaagcctgtcctcaggcatccactggcttggattttgttgctgagtctgattgtgtgtgttagcactcagattaattatctcaatagggcactggatatttttaacacctccattgttactcccatttactacgtgttcttcactacctccgtgctaacttgttccgcgattttattcaaagagtggcaagacatgcccgtagatgatgtcatagggaccctgtcaggattttttactattattgtaggcatttttctgctccacgcatttaaagatgtctccttttccttagccagtttgcctgtgtcttttcggaaagatgaaaaggccatgaatgggaacctctctaacatgtacgaggtgctcaataacaacgaagagtctctgacctgcggaatcgaacagcacactggagagaatgtctcacgcagaaacggcaaccttacagctttttag

SEQ ID NO: 232864 - DNA, 1026 bp, synthetic construct
  misc_feature 1..1026: note = Description of Artificial Sequence: Synthetic coding sequence
  source 1..1026: mol_type = other DNA
atgtcgcaaggccgtgggaagtatgatttctacatcggactggggcttgctatgtcaagctcgatattcatcggaggatcatttatcttaaaaaagaagggccttctaaggctggccagaaagggcagtatgcgtgccgttggcgctggagaagtggcgaacttcgccgcttacgcctttgccccagccaccttagttactcctctaggagccttaagcgtgttggtgagcgcaatcctgtcttcctatttcctaaacgagcgtctgaacctccatggaaagattgggtgtctgcttagcatcttaggaagtactgtgatggttattcatgcccctaaagaagaagaaatcgagacactcaatgaaatgtcgcataaactgggggaccctggattcgtggtctttgccacgctggtggtaatcgtcgcgctgatcttaatatttgttgtgggccctcggcatggccaaacaaatattctggtctatattaccatatgttcggtgatcggagcattcagcgtgtcatgtgtcaagggtctgggcatcgctataaaggagctgttcgctggcaagcccgtactccgccatccattggcctggatcctgctgctgagcctaatcgtttgcgtctccactcagatcaactacttaaatagagccctggacatcttcaatacaagcattgtaactccaatctactatgtatttttcaccaccagcgttctgacatgctccgccatccttttcaaagagtggcaggatatgcccgtcgacgatgtgatcgggaccctgtctgggttttttaccataatcgtggggatctttctccttcacgcctttaaggatgtgtccttttccctggcatccctgcctgtctcgtttaggaaggacgagaaggccatgaatggaaatctctcaaatatgtatgaagtactgaacaataatgaggagtcactgacgtgtggaattgaacagcatacaggagaaaacgtgtccagaaggaatggcaacttaactgcgttctag

SEQ ID NO: 232865 - DNA, 1083 bp, synthetic construct
  misc_feature 1..1083: note = Description of Artificial Sequence: Synthetic coding sequence
  source 1..1083: mol_type = other DNA
atgtcccagggtcgtggaaagtatgacttctatatcggcttgggactggctatgtctagcagcatttttatcggaggttcttttatcctgaagaagaaaggcctgcttcgcctggcgcgtaaggggtcgatgcgggcagggcaaggagggcatgcatacctcaaggagtggctgtggtgggccggactgctgagcatgggagctggagaagtggccaattttgccgcatacgccttcgcaccggcaaccctggtcacccccctgggcgctctgtccgtactggtgtcagctattcttagctcttactttctgaacgaaaggctcaacctccatgggaagataggttgcctgctgtctatactggggtccacagtgatggtgatacacgctcccaaggaagaggagatcgaaactctcaacgagatgtcccacaaattgggggaccctggttttgtggtattcgctacccttgtcgttatagtagcccttattctgatcttcgtggtgggcccaaggcacggacagaccaacatcctagtttacatcaccatttgttctgtaatcggagctttctcagtgagctgtgtcaagggcttgggcatcgccatcaaagagctatttgctggaaaaccagtcctgcggcaccctctggcctggattcttttactgtccctcattgtttgtgttagcacacagataaactatttgaaccgtgccctagatatatttaacacaagcatagtcactccaatttactatgtgtttttcaccactagtgtcctgacctgctccgctattctgttcaaggaatggcaggacatgcccgtagacgatgtgatcggcactctgtccggtttttttactatcatcgtcggcattttcttgctgcacgccttcaaagacgttagttttagcttagcttccctcccggtctcttttcggaaagacgagaaggccatgaatgggaatctcagcaatatgtacgaggtccttaacaacaacgaggaaagcctcacatgcgggatcgaacaacatacaggtgagaatgtgagtaggcggaatggcaatctaaccgctttttag

SEQ ID NO: 232866 - DNA, 1083 bp, synthetic construct
  misc_feature 1..1083: note = Description of Artificial Sequence: Synthetic coding sequence
  source 1..1083: mol_type = other DNA
atgtctcagggaaggggcaagtacgatttttacatagggctgggccttgcgatgtcaagcagtatcttcatcgggggaagtttcatcctcaagaagaagggccttctaagactggccaggaagggatctatgcgtgcgggacagggcggtcacgcctatctgaaagaatggctctggtgggctgggctcctaagcatgggagcaggagaggtggctaacttcgctgcctacgcttttgctccagcaactctggtcaccccactgggcgcactctcagtgttggtgtctgcaatattgagcagctatttcctcaatgagcgcctgaaccttcacgggaagatcgggtgcctcctgtccatattgggctcaactgttatggtgatccatgcccctaaagaggaggagattgaaacccttaacgagatgagtcataaacttggtgaccccggatttgtggtgtttgctacactcgtggtcatagtggcgctaattttgattttcgtggtggggccaagacacggacagacaaatattctggtctacataacaatttgctccgttattggcgctttctctgtaagctgcgtgaaaggtttagggatcgccattaaggaactgtttgccggtaagccagtgctgcgccacccactagcttggattctactgctatcccttatcgtgtgcgtgtcgacccaaatcaactacctgaacagggcccttgatatctttaacaccagtatcgtgacccctatctactacgttttctttacaacctccgttctgacctgtagtgcaattctgtttaaggagtggcaggacatgccagtggatgacgtcatcggtactctcagtggtttttttacgattatcgttggtatttttttgttgcacgccttcaaggacgtcagctttagcctggcctctcttcctgtgtcctttcgaaaagatgagaaagccatgaacggtaacttaagcaacatgtacgaggttctcaacaataacgaggagagcttgacgtgtggcatcgaacaacataccggcgaaaacgtctcacgacggaacggaaacctgacggccttttag

SEQ ID NO: 232867 - DNA, 1026 bp, synthetic construct
  misc_feature 1..1026: note = Description of Artificial Sequence: Synthetic coding sequence
  source 1..1026: mol_type = other DNA
atgtcgcagggccgaggtaagtacgacttttatatcggcttgggcttagcaatgtcatctagcatcttcatcggtgggtcctttattcttaagaagaagggcctgctgcggctggccagaaaagggtctatgcgagccgtgggggctggggaggtggctaacttcgctgcgtacgcattcgctcctgctaccctggtgactccgctgggtgctctgagtgtccttgtatcagctatcctgtcgtcctactttctgaacgaacgtttgaatttgcacgggaaaatcggttgcctcctaagtattctgggcagcacagtgatggtaattcacgcaccaaaagaagaggaaattgaaactctcaatgagatgtcacataaacttggtgaccctggcttcgttgtgtttgccaccctagtcgtcatcgtggctctgattctgatcttcgttgtggggccacgacatgggcagaccaacatactcgtctacatcaccatctgcagtgtcataggcgctttttctgtttcctgcgttaaaggtctggggatcgccataaaagaactatttgcgggaaagccagtactacgtcacccccttgcctggattctgctcttgagccttatcgtttgcgtgagcactcagatcaactacctcaatcgagcactggatatcttcaatacttccattgtaaccccaatatattacgtcttctttactacttccgtgttgacatgctcagcaatcctgtttaaggaatggcaggacatgcctgtagatgatgttatcggcacattatctgggttctttaccattatcgtcggaattttcctcttgcatgcctttaaggatgtaagctttagcttagcctccctgccagtgtcgtttcggaaagatgagaaggcgatgaacggaaacctgagtaatatgtacgaagtcttgaataacaacgaggagtcactgacatgcggtatcgagcagcatacgggcgaaaatgtgtctcgtcggaacggaaacctgacggcattctag

SEQ ID NO: 232868 - DNA, 180 bp, synthetic construct
  misc_feature 1..180: note = Description of Artificial Sequence: Synthetic coding sequence
  source 1..180: mol_type = other DNA
atgtcacagggaagaggcaaatacgacttttacataggtctgggacttgctatgtcgagctccatctttattggcggtagcttcatattgaagaaaaaggggctgctgaggcttgctcgcaaaggcagcatgagagccggtcaggggggacacgcttacctgaaggaatggctgtggtag

SEQ ID NO: 232869 - DNA, 900 bp, synthetic construct
  misc_feature 1..900: note = Description of Artificial Sequence: Synthetic coding sequence
  source 1..900: mol_type = other DNA
atggaagagttggaacagggactgctgatgcagccatgggcatggcttcagttagcagaaaattcgctgctggccaaggtctttatcaccaagcaggggtacgctctgctcgtgtctgaccttcagcaagtatggcatgagcaggtagatacttcagtagtttcccagcgggctaaagagctcaataagcgcctgacggcccctcctgctgctttcttgtgccacctggacaatctgttgagacccctgttaaaagacgctgctcacccctctgaagccaccttttcctgtgattgtgtggctgatgctctgatactgcgtgtgcgaagcgaactcagtggcctgcccttttactggaacttccattgcatgcttgcaagcccgtctctggtctcccaacatcttatccgcccacttatggggatgtcactcgccttacagtgtcaggtgcgagagctcgccacattgcttcatatgaaagacctggagattcaggactatcaagagtctggcgctaccctcattcgggaccgcctgaagaccgaaccatttgaggagaatagttttctggagcagttcatgatcgaaaagttgccagaagcatgcagcattggcgatgggaaacctttcgtcatgaacttgcaggacctgtacatggctgtgactacgcaagaagttcaagtcgggcagaagcatcaaggtgccggagaccctcatacgtcgaatagcgcaagtctacagggtatcgacagccagtgcgtcaatcaacccgagcagctggtgtcatctgctcccaccctctctgctccagaaaaagagtccacaggtaccagcgggcctctgcagcgaccccagctttctaaggttaagagaaagaagcctagaggtctcttttcttag

SEQ ID NO: 232870 - DNA, 951 bp, synthetic construct
  misc_feature 1..951: note = Description of Artificial Sequence: Synthetic coding sequence
  source 1..951: mol_type = other DNA
atggaagaacttgagcaggggctactgatgcagccttgggcctggctgcagttagccgaaaactccctgctagctaaagtgttcatcaccaaacagggatatgccctgctggtgagcgatctgcaacaggtgtggcatgagcaagtggatacatccgtcgtctcccaacgggctaaagagttgaacaaaaggctgacagctccgcctgccgctttcctctgtcacctagacaatctcctgaggcctctgctgaaagatgctgcccacccctccgaggccaccttttcttgtgattgcgtcgccgatgccctgattctgagagtgaggagcgagctctctggtctccccttctactggaacttccactgcatgctggcaagcccttctctggtatcccagcacctgatccgacccttgatggggatgtctctggcactgcagtgtcaggtgagggaactggcgactctgctgcacatgaaagacttggagatccaggactaccaagagagtggagctaccctcataagagaccgcctcaagactgagccctttgaagaaaactccttccttgagcaattcatgattgagaagctgccagaggcttgtagtataggggatggaaaaccctttgtcatgaatttgcaggatctctacatggcggtcaccactcaggaagttcaggtgggccagaagcatcagggcgctggagatccccacacatcaaactctgcgtctctgcagggaatcgatagtcagtgtgtgaaccaaccagagcaactggtgagtagcgctccaacactctccgctccggagaaggaaagcacagccctctgcagggacctgagctgccaacgttcccggggaaggagccagggggtgtcttctgtgaacctgttatggcctcagctgctgagaatggacctggagaattccttccaggcctctccgtag

SEQ ID NO: 232871 - DNA, 690 bp, synthetic construct
  misc_feature 1..690: note = Description of Artificial Sequence: Synthetic coding sequence
  source 1..690: mol_type = other DNA
atggaggagctggaacagggcttactcatgcagccttgggcctggctccagttggctgaaaacagccttctggcaaaggtgttcattacgaaacaggggtacgcgctgctcgtgagcgatcttcagcaggtgtggcacgagcaggtcgacacctccgtggtgagccagagagccaaagaactaaacaaacgtcttactgctccacccgcagctttcttatgccacctggataacctgctgagaccacttctcaaagatgccgctcatccatctgaggcaaccttctcttgtgactgtgttgcagacgcacttatcctgcgggttcggagtgagctgagcggcctgcctttctattggaattttcattgcatgctggcctcccccagcctggtttcccaacacttgatcagaccgcttatgggtatgtcactggctcttcaatgtcaggtaagggaactggctactctgcttcacatgaaggacctagagatccaagattaccaggaaagcggagctacccttataagagaccgactgaaaaccgagcccttcgaggaaaattcctttctcgagcagttcatgatcgagaagctgcccgaggcttgcagtattggcgatggtaaaccatttgttatgaacctgcaggacctctatatggctgtgaccacacaggaggtgcaggtcggatag

SEQ ID NO: 232872 - DNA, 804 bp, synthetic construct
  misc_feature 1..804: note = Description of Artificial Sequence: Synthetic coding sequence
  source 1..804: mol_type = other DNA
atggcaaattgcgaaaggacattcattgccatcaagcccgacggcgtccagaggggactagtaggcgaaatcatcaagagatttgaacagaagggcttcaggcttgtggggctgaaattcatgcaggcctcagaggatctcttgaaagaacactatgtcgatctaaaggaccggccattcttcgccggtctggtgaaatacatgcactccggccctgtcgtggcgatggtctgggaagggttgaatgtagtcaaaaccggaagagtgatgttgggggaaaccaatccagccgactcaaagcccggtacgattcgaggtgatttctgtattcaggtaggccgtaccatggctaacttggagagaaccttcatcgcaatcaagcctgatggagtacagagagggctcgtgggagaaatcatcaagaggttcgaacagaagggattccgcctggtggctatgaaatttctgagagcgtccgaggagcacctgaaacagcactacatcgatctgaaggatcggccattttttccaggactggtaaaatacatgaacagcggcccagtggtcgctatggtgtgggagggccttaacgtcgtcaaaacagggagggtcatgctgggtgaaacaaatcctgccgattcaaaacccggaacaatcagaggcgacttctgcattcaggttgggcgaaacatcatccatgggtccgactccgtcaaaagtgcagagaaagagatctcactgtggttcaaacccgaggagctcgtcgactataagagctgtgcacacgattgggtgtatgagtag

SEQ ID NO: 232873 - DNA, 234 bp, synthetic construct
  misc_feature 1..234: note = Description of Artificial Sequence: Synthetic coding sequence
  source 1..234: mol_type = other DNA
atggtatgggagggtctgaacgtcgtgaaaaccggaagggttatgcttggggagactaatcctgctgactctaagcccggaacaatcagaggggacttctgcattcaggtgggcaggaacatcatccacgggtcggattctgttaaatcagcggaaaaggagatcagtctgtggtttaaacccgaggaactggtcgactacaagagctgtgcacacgattgggtctacgaatag

SEQ ID NO: 232874 - DNA, 234 bp, synthetic construct
  misc_feature 1..234: note = Description of Artificial Sequence: Synthetic coding sequence
  source 1..234: mol_type = other DNA
atggtgtgggagggactgaatgtggtgaagactggccgagtcatgctgggtgagacaaatcccgcagactcaaagccaggtacaattcgcggagatttctgcatacaagtaggtagaaatatcattcatgggtcagattctgttaaaagtgccgagaaagaaatttcactgtggttcaagccagaggaacttgtcgactataaatcttgcgcacatgactgggtctatgagtag

SEQ ID NO: 232875 - DNA, 459 bp, synthetic construct
  misc_feature 1..459: note = Description of Artificial Sequence: Synthetic coding sequence
  source 1..459: mol_type = other DNA
atggcaaatctggagaggaccttcattgccattaaaccagatggcgtccagcgaggattagtgggcgaaatcattaaaagattcgaacagaaaggcttcaggctggtggctatgaagttccttagagcttccgaagaacacctgaaacagcactatattgatttgaaggacagacctttctttcctgggctcgtgaagtatatgaatagcgggccagtggtcgcaatggtgtgggaaggcctgaatgtggtaaaaactggcagagttatgctgggggaaaccaaccccgcagatagcaagccgggaacaattcgaggagacttctgtatccaagttgggcgtaacatcatccacggcagcgactcagtgaaatctgccgaaaaggaaatcagcctgtggttcaaaccagaggaactggtggattataaaagctgcgcacatgactgggtgtatgagtag

SEQ ID NO: 232876 - DNA, 459 bp, synthetic construct
  misc_feature 1..459: note = Description of Artificial Sequence: Synthetic coding sequence
  source 1..459: mol_type = other DNA
atggcaaacttagaaaggacctttatcgcaatcaagcccgacggtgtgcagagggggctggtgggcgagatcattaagaggttcgagcaaaagggcttccgactcgtggcaatgaagtttctgcgtgctagcgaggaacacctgaagcagcactatatcgacctcaaggacagacccttcttccccggtctggtcaaatatatgaacagcggacccgtagtagctatggtgtgggagggtctaaacgtggtaaagacaggcagagttatgctgggcgagactaatccagccgacagcaaaccgggtacaatccgcggtgatttttgcatccaagtggggcgaaatatcattcatggatcagactcggtgaagagcgcggagaaagagatcagtctttggtttaagcccgaggagctcgtggattataaatcctgtgcgcacgattgggtgtatgaatag

SEQ ID NO: 232877 - DNA, 459 bp, synthetic construct
  misc_feature 1..459: note = Description of Artificial Sequence: Synthetic coding sequence
  source 1..459: mol_type = other DNA
atggccaacctcgagaggacttttatagctattaaacccgacggtgtacagagaggtctcgtaggagaaattatcaagcgcttcgagcaaaaagggttcaggctggtggctatgaagtttcttcgcgcaagcgaggaacaccttaaacagcactatatcgacctaaaggacaggcctttctttccaggacttgtcaaatatatgaattccggcccagtagtagcaatggtgtgggaagggctgaatgtggttaaaactggcagggtgatgctcggcgagaccaaccccgctgactctaagccgggaaccatacggggagatttctgtattcaggtcggcagaaacattattcacgggagcgactccgtgaaaagtgccgaaaaggaaatctctttatggtttaagcctgaagagttagtggattacaagagttgtgctcacgattgggtatacgaatag

SEQ ID NO: 232878 - DNA, 459 bp, synthetic construct
  misc_feature 1..459: note = Description of Artificial Sequence: Synthetic coding sequence
  source 1..459: mol_type = other DNA
atggccaacttggaacgcacattcatcgctattaaaccggacggagtgcagcgcggtcttgttggcgagatcatcaaacgctttgagcaaaaaggcttccggctcgtcgcaatgaaatttctcagggcatcggaagaacatctaaagcagcactatattgatctcaaagatcggccatttttccccggtctcgtcaagtacatgaattccggcccagtcgtcgccatggtgtgggaaggtcttaacgtcgtgaaaacagggagagtgatgctcggagagacaaaccctgccgatagcaaacccggtacaatccggggagatttctgtattcaggtggggaggaatatcattcatggcagtgactctgtgaaaagcgcagaaaaggagatatcattatggttcaagcccgaggaactcgtggattacaagtcctgtgcacacgactgggtatatgaatag

SEQ ID NO: 232879 - DNA, 459 bp, synthetic construct
  misc_feature 1..459: note = Description of Artificial Sequence: Synthetic coding sequence
  source 1..459: mol_type = other DNA
atggctaatcttgagcgtacattcatcgccattaaacccgatggggtgcagcggggactagtcggcgaaatcattaaaaggttcgagcaaaaaggattccgcctagtagctatgaaattccttcgggcatctgaggaacaccttaaacaacattatatcgacttgaaggatcgtcccttctttcctggccttgttaagtatatgaactccggcccagtcgtggccatggtatgggaaggtctgaatgtagtcaagactgggcgagtgatgctgggtgagacaaaccccgcagattcaaagccagggaccattcggggagacttctgcatacaggtgggacgtaatataatccacgggagcgatagcgtgaagtcagccgagaaagagataagcctttggttcaaacccgaggaactggtggactataaatcatgcgcccatgactgggtctatgagtag

SEQ ID NO: 232880 - DNA, 879 bp, synthetic construct
  misc_feature 1..879: note = Description of Artificial Sequence: Synthetic coding sequence
  source 1..879: mol_type = other DNA
atggtcctgctctcaacattaggcatagtttttcagggcgagggaccaccaatcagtagttgtgataccgggacgatggccaactgcgagcgaacctttatcgctattaaacctgatggcgtgcaacgaggtcttgtaggagagatcattaagaggtttgagcagaaaggattccgcctggtgggtctgaagtttatgcaggctagcgaagatctgctcaaagagcactatgtggacctgaaagaccggccattctttgcagggttggtgaagtacatgcactcaggaccagtggtggcgatggtgtgggaaggcctcaacgtggtaaaaacagggcgtgtcatgctgggagaaacaaatcccgcagatagcaagcccggtactataagaggggatttttgcatccaggtcggcagaacaatggctaatcttgagaggactttcattgccataaaaccggacggcgtccagagggggctcgtcggagagataataaagcgatttgagcagaagggcttccgtttagttgccatgaaattcttgagagcttccgaggaacacctcaaacagcattacatcgacttgaaggacaggccatttttccccggtctggtgaagtatatgaactcagggccagtggtggccatggtgtgggagggactcaacgtcgtgaagacaggcagggtgatgctcggcgagactaaccctgcagacagcaaaccgggaacgatccgcggtgatttttgtatccaggtgggcaggaacatcatccacggttcagattccgtgaagtctgccgaaaaggagatttccctgtggttcaagcctgaggagctcgtagattacaaatcctgtgcccatgactgggtgtacgagtag

SEQ ID NO: 232881 - DNA, 1188 bp, synthetic construct
  misc_feature 1..1188: note = Description of Artificial Sequence: Synthetic coding sequence
  source 1..1188: mol_type = other DNA
atggtcagcgccgctggtttatcaggtgatgggaagatgagaggggtgttgctcgtactcctcggcctgttgtatagtagcacctcatgcggtgtgcagaaagcctccgtgttttacggcccagatccaaaagagggcttggtgtcctctatggaattcccttgggtggtgtcccttcaggattcacagtatacacacttggcttttgggtgcatactaagcgaattctgggtgttgtctatcgcctccgcaatccagaaccgaaaagatatcgttgtgattgtgggaatcagtaatatggacccgagcaaaattgcacacactgagtatccggtcaacacaatcatcatacacgaggactttgataacaatagcatgtcaaataatattgcactactcaaaacagatacagccatgcatttcgggaacttagtccaatccatttgttttctgggacgcatgctccatactccgcctgtcctgcagaactgctgggtgagcggttggaatcccacctcggcaactgggaaccatatgacgatgtctgttctgcgtaaaatctttgtgaaagacctagatatgtgcccgctctacaagctgcaaaaaactgaatgtgggtcacacaccaaggaagagacaaaaacggcttgcctgggcgatccgggttccccaatgatgtgccagttacagcagtttgacctgtgggtgctgagaggggtattaaatttcggtggagaaacatgccctgggttgttcctctacacaaaagtggaggattattccaaatggattacttccaaagctgagcgggctggccctccattgtctagcctccaccattgggagaagcttatttcatttagccatcatggccctaacgccactatgacccagaagacttatagtgattccgagctcggacacgtgggttcgtacttgcaggggcagcggaggaccattacacactcacggttgggtaacagttcccgggacagtctcgacgtgagggagaaagatgtcaaggagtcgggacgctccccagaagccagtgtgcagccactttactacgattactacggtggagaagtcggcgagggacgaatttttgcgggacagaacagattgtaccaacccgaagagatcattctcgtcagctttgtccttgtcttcttttgtagtagcatatag

SEQ ID NO: 232882 - DNA, 639 bp, synthetic construct
  misc_feature 1..639: note = Description of Artificial Sequence: Synthetic coding sequence
  source 1..639: mol_type = other DNA
atggagatttcgatgccaccaccacaaatttacgtggaaaaaactttggccatcatcaagccagatatcgtagacaaggaagaagagatccaagacataatcctgcgctcaggattcacaatcgtccaacgcagaaagctgagactctcgccagagcagtgcagcaacttttacgtggagaagtatggaaaaatgtttttcccgaatctgaccgcctacatgagcagcggccctcttgtagccatgattttagcaaggcacaaagccatctcctactggttggaactgcttggtcccaacaactcactggtggccaaggaaactcaccccgactctttgcgcgctatatatggcaccgacgatctccggaatgcgctacatggcagcaatgacttcgccgctgctgaaagggaaatcagattcatgtttccagaagttattgtagagccaattcccatagggcaggcagccaaagattatcttaacttgcatatcatgcccacgctactagaaggacttacagagttatgcaaacaaaaaccagccgacccacttatatggctggcggactggcttctgaaaaacaaccccaacaagccaaaactgtgccaccaccccatcgtagaggaaccctattag

SEQ ID NO: 232883 - DNA, 561 bp, synthetic construct
  misc_feature 1..561: note = Description of Artificial Sequence: Synthetic coding sequence
  source 1..561: mol_type = other DNA
atggcctctattctccgttccccccaggctttgcaactcaccctggccctcatcaagcccgatgctgtcgctcaccctttaattcttgaggctgtgcaccagcaaatactaagtaataaattccttatagtacgtatgcgcgagctgctgtggcgaaaggaagactgccagcgcttttaccgggagcacgaagggaggttcttctatcagcgacttgtagaatttatggcttccggacctatccgggcttacatcctagcccataaggatgcaatccaactatggagaacactgatgggcccaactcgcgtttttcgtgcccgacacgtagcaccagatagtatacgcggatcctttggtctcacagatacccggaacaccacccacggctctgactccgtggtatctgcaagcagagaaattgctgcctttttccccgatttttctgagcagcggtggtacgaggaggaggaaccccagctacggtgcggacccgtttgctatagccctgagggcggagttcattacgttgctgggactggcggattaggacccgcttag

SEQ ID NO: 232884 - DNA, 585 bp, synthetic construct
  misc_feature 1..585: note = Description of Artificial Sequence: Synthetic coding sequence
  source 1..585: mol_type = other DNA
atgacgcagaatctgggtagcgaaatggccagcattctgagatccccccaggccctgcagctgacgctcgccttaattaagcccgatgctgtggcccacccactcatactcgaggccgtgcatcaacagattctgtccaacaagtttctgatcgtaagaatgcgcgaactcttatggcggaaagaagactgtcaaagattttaccgggagcacgagggcagatttttctaccagagattggtggagttcatggcatccggccctatcagagcatacatcctggctcacaaggacgcaattcaactgtggcgcacactgatgggaccaacacgggtgttcagggcaagacatgttgcacccgacagtattaggggcagtttcgggcttacagacactcggaatacaacgcacgggagcgacagcgtcgtgagtgcttcaagggagatcgccgcttttttcccggacttcagtgagcaaagatggtacgaagaagaagagcctcagcttcggtgcgggcctgtatgttactcgccagaggggggagtacattacgtagctgggaccggtggcttaggcccagcttag

SEQ ID NO: 232885 - DNA, 561 bp, synthetic construct
  misc_feature 1..561: note = Description of Artificial Sequence: Synthetic coding sequence
  source 1..561: mol_type = other DNA
atggcatcgattctgcggagtcctcaagcgcttcagctgaccctggcccttatcaagccagacgctgttgcacaccctcttatcctcgaggccgtacatcagcagatactctccaacaaattcctgatcgtccggatgcgagagctgctgtggcgtaaggaagactgccagcggttctacagggagcatgaaggcaggtttttctatcagagactggtggaattcatggcctctggaccaatcagagcatacatattggctcataaggatgctattcagttatggcgcacgctgatgggtcctactagggtttttcgcgctaggcacgtcgctccagatagcatccggggttccttcgggcttacagatacaaggaacaccacgcacggatctgactccgtagtttctgcgtcacgcgagatcgcagctttcttcccagattttagcgagcagaggtggtatgaagaagaagaaccacagctcaggtgcggccctgtctgctacagtcccgaaggcggagtccattacgttgcaggaaccgggggtctcggtcctgcctag

SEQ ID NO: 232886 - DNA, 360 bp, synthetic construct
  misc_feature 1..360: note = Description of Artificial Sequence: Synthetic coding sequence
  source 1..360: mol_type = other DNA
atggcttccattttgcgttcaccccaggcactccagttaactctggctctgatcaaacccgatgccgtggctcacccccttatcttggaagctgtacaccagcagatactctcaaacaagtttttgattgtaagaatgagggagttgctgtggagaaaggaagactgtcagagattttacagagagcatgaagactcagttgtgagtgcctcccgtgagattgccgcattcttccctgacttcagcgaacaacggtggtatgaggaggaagagccccagcttcgctgcggcccagtctgttactccccagaagggggtgttcactacgtcgccggaacgggcggactgggacctgcctag

SEQ ID NO: 232887 - DNA, 561 bp, synthetic construct
  misc_feature 1..561: note = Description of Artificial Sequence: Synthetic coding sequence
  source 1..561: mol_type = other DNA
atggccagcatcctccggtctcctcaggctctccagctgacattggctctcattaagcctgacgccgtcgcccatcctctgattcttgaggcggtccatcagcaaatactcagcaataagtttctgatcgttaggatgcgagagttgctgtggaggaaggaagactgtcagcgattttatcgggaacatgaaggccgtttcttttaccagagactcgtcgagtttatggcatctggaccaatcagagcctacatcttggcccacaaggacgccatacaactttggaggacgctgatgggtcctacacgggtctttagggcgcgacatgtggcccctgatagcattagagggtcgtttggactgaccgacacccgtaacacaacacatggaagcgactccgtggtaagcgctagcagggaaattgcagcgtttttcccagatttctctgaacaaaggtggtacgaggaagaagaaccgcaacttcgctgtgggccagtatgttacagccctgaaggcggagtgcactacgtggcaggcaccggcggactgggccctgcttag

SEQ ID NO: 232888 - DNA, 492 bp, synthetic construct
  misc_feature 1..492: note = Description of Artificial Sequence: Synthetic coding sequence
  source 1..492: mol_type = other DNA
atggcatcaattctgcgaagcccacaagccctacagttaaccttggcattgattaaaccagacgcggtcgcccaccctctgattctcgaagccgttcaccagcagatcctgagtaataagtttctgatagtgcgcatgcgggagttgctgtggagaaaggaagattgccagcggttttacagagaacatgaggctggacagtctgaaccaactagcttacctacccggatgccttcttcgtcaggcggacggagctgggacccgccagagtgctccgagcacgctatgtggccgcagatcctgagcgtgggagtgtccgcaagtttaacacctgccacgccccctatggtgagaactttgtggtttcagccagctgagcgcttacaacccagctctttgaccagcgtcaactcagctggcatgcgccgaaaaagtccatcctgtgcagtagcgttatgcgcgattgcccaaagggaagtgagcacaatgtag

SEQ ID NO: 232889 - DNA, 561 bp, synthetic construct
  misc_feature 1..561: note = Description of Artificial Sequence: Synthetic coding sequence
  source 1..561: mol_type = other DNA
atggcaagcatactacggtcacctcaagctttgcagcttacactggcgctcatcaaacctgatgctgtcgctcacccgttgatattggaagctgtccaccaacaaattctcagcaacaaatttctgatcgtaagaatgcgcgagctattatggcgcaaggaagattgccagagattttatagagagcacgagggcagatttttttaccagcggctggtagaatttatggctagcggacccatcagagcctacatcctcgcccacaaggacgccattcagttatggcgcactctgatggggccaacgcgagtcttccgggctcgacatgtagctcccgattcgattcgtggctcatttggactgacagacacacgaaataccacacatggttctgattcagttgtgagcgcctcccgggagatcgcagccttcttccccgattttagcgaacaacgatggtacgaggaagaggaacctcaactcagatgcggtccagtgtgctattccccagaggggggagttcactatgtggcaggaacagggggattgggacccgcatag

SEQ ID NO: 232890 - DNA, 1131 bp, synthetic construct
  misc_feature 1..1131: note = Description of Artificial Sequence: Synthetic coding sequence
  source 1..1131: mol_type = other DNA
atgaaccacagcgagaggttcgtgtttatcgccgaatggtatgacccaaacgcaagccttcttagaagatacgagctgctgttttatccaggggatggatccgttgagatgcacgacgtcaaaaaccacaggacttttctaaagcggacgaagtacgacaacctgcacttggaggatctgtttattgggaataaagtgaacgtgttctcccgtcaacttgtgctgatcgactacggtgatcagtatacagctagacagttagggtctagaaaggaaaaaacgctggccctaatcaaacccgacgctatcagcaaggcgggtgagatcatcgagataataaataaggccggatttacaatcaccaaattgaagatgatgatgctaagccgtaaagaagcacttgattttcacgtggatcatcagagtagacccttttttaacgagctcattcagtttataacaactggcccaataatcgcaatggagattctccgtgacgatgccatatgcgagtggaagaggttgttaggacctgcgaactctggagtagcacgcaccgacgcctccgagtctatccgcgctcttttcgggactgacgggatcagaaatgccgcacacggaccagactctttcgcaagcgctgctagggagatggaactgttttttccctcatccgggggttgtggacctgccaacaccgcgaagttcaccaattgtacttgctgtattgtgaaacctcatgcagtatccgaaggattgctcggaaagattcttatggcaatacgagatgccggtttcgaaatctccgctatgcagatgttcaacatggacagagttaatgttgaggagttctacgaggtgtacaagggcgttgtgacagaatatcatgatatggtcaccgagatgtacagcggcccttgcgtggcaatggagattcagcagaataatgccaccaaaacttttcgcgaattttgcggtcctgcggatccggaaattgccagacatctcaggccgggaactctgcgtgcaattttcggcaaaacaaaaatccagaatgccgtccactgtacagatttgccagaggatggcctgctggaagtgcaatacttttttaaaattcttgacaactag

SEQ ID NO: 232891 - DNA, 1023 bp, synthetic construct
  misc_feature 1..1023: note = Description of Artificial Sequence: Synthetic coding sequence
  source 1..1023: mol_type = other DNA
atgcacgacgtgaagaatcatcgtacctttctgaaacgcacaaagtatgacaatctgcatctggaagacctcttcattggaaataaggttaatgtcttctccaggcaactggtgcttattgactacggggaccagtacacagcacggcagctggggagtcgaaaggagaagactttggctctgattaaacctgatgctatatcgaaagctggagagattatcgagattataaacaaagccggatttaccattaccaagttgaagatgatgatgctgtcaagaaaggaagcactggatttccatgtcgatcaccagtcacgccctttcttcaatgagctgatccagttcataacgacgggcccaatcattgctatggaaatcctgcgcgacgatgccatatgtgagtggaaacggttgttaggtcccgctaatagtggggtggctcgcactgatgcaagcgaatccatccgcgcattgtttggaaccgacgggataagaaacgccgcacatggacccgattcttttgcaagcgccgcaagagagatggagttgtttttcccatcctccggcggatgcggcccagcaaacactgccaaattcaccaattgcacttgctgtattgtgaaacctcatgcagtgtccgaaggcctactcgggaagattttgatggcgatccgagatgcaggatttgagatttctgccatgcagatgtttaacatggacagggttaacgtggaagaattctatgaagtttataagggagtcgtcaccgagtaccatgatatggtgacagagatgtattcagggccatgcgtggctatggagattcagcagaataacgcgacgaagacttttcgtgagttctgcggtcctgcggacccagagattgcacgacacctgcgcccaggtaccctgcgagccatcttcgggaaaaccaaaatacagaacgcggtgcattgcaccgacttgcctgaagacggcctgctggaggttcagtatttttttaaaatcttagacaactag

SEQ ID NO: 232892 - DNA, 1416 bp, synthetic construct
  misc_feature 1..1416: note = Description of Artificial Sequence: Synthetic coding sequence
  source 1..1416: mol_type = other DNA
atgcagagtaacaaaacatttaatttggagaagcagaaccacacccctcggaaacatcatcaacaccaccaccagcagcagcatcaccagcaacagcagcaacagcctccgccaccgccaatcccagcgaacgggcagcaggccagctctcaaaacgaggggctcaccatagatctgaagaattttcgaaagcccggagaaaagacatttactcagcggtctaggctgtttgtggggaacttgcctcccgacatcaccgaagaggagatgaggaaactgtttgagaagtatggcaaggctggagaggtttttatccacaaggacaaggggttcggattcattagactggaaacccggacactcgccgagatcgccaaggtggagctcgacaatatgccactacgagggaagcagctgcgagttaggttcgcttgtcatagcgcatccctaaccgtccgtaacctcccacagtatgtctccaacgagctgctagaggaggccttcagcgtcttcggtcaagtggagcgcgcagtcgtgatcgtcgatgacagagggaggccgagtgggaaaggcatcgtggagtttagcggcaagcctgcagcaagaaaggccctggatagatgtagcgaaggctctttcttgctgacgacgtttccacgacctgtgacagtggagcccatggatcagcttgatgatgaggagggcctgcctgaaaagttggtgatcaaaaatcaacaatttcataaggaaagggagcaacccccacggttcgcgcagccaggctccttcgaatacgaatacgccatgcgctggaaagctttaattgagatggagaaacagcagcaggaccaagtagaccggaacataaaagaggctcgggaaaaacttgagatggaaatggaggccgcaagacacgagcaccaagtgatgcttatgaggcaggatctgatgcgacgccaggaggaactgcgcaggatggaggaactccataatcaagaagtgcagaagagaaagcaactggagcttaggcaggaggaagaacgccgacgaagagaggaagagatgcggagacaacaggaggagatgatgaggagacagcaagaaggctttaaaggcacttttcccgatgcccgagaacaagaaatacgaatgggccagatggctatgggcggagccatgggtatcaacaatagaggggctatgcctccggcacccgtgcctgccggaacccctgcccctcctggacccgctaccatgatgcccgacgggacattaggcttgacccctcccaccaccgagaggttcggccaagccgcaacgatggaggggatcggggctattggagggacacccccagcgtttaatcgtgccgctcctggggcagaatttgccccaaataaacgtcggcgatattag

SEQ ID NO: 232893 - DNA, 1416 bp, synthetic construct
  misc_feature 1..1416: note = Description of Artificial Sequence: Synthetic coding sequence
  source 1..1416: mol_type = other DNA
atgcagtcaaacaaaacatttaatcttgagaaacagaaccacaccccaagaaaacaccatcaacaccaccatcagcagcagcaccaccagcaacagcagcaacaaccacccccaccacccattcctgccaacggacagcaagctagcagccagaatgagggtttgaccatcgacctgaagaattttcgtaaacccggtgagaaaactttcacccagcggagccggctgtttgtaggaaacctgcctcctgatatcaccgaggaagagatgaggaaactgtttgagaagtatggcaaggccggtgaggtgttcatacacaaggacaaaggcttcggattcatcagactggaaacccgcactttagcggagatcgcaaaagttgagttggataacatgccgttgcgcggtaagcagctccgcgttcggtttgcctgccacagcgcatcactgactgtgagaaatctgccacagtacgtatccaacgagctactggaggaagcatttagcgtgttcggccaggtggaaagagccgtcgttatcgttgacgataggggtcggccatcaggcaaaggcatcgtggaattcagcggcaagcccgcagctaggaaagcattggatcgctgttctgaggggtcttttcttcttacaacgttcccgagacccgtcactgttgagcctatggaccaactagacgacgaagagggccttcccgaaaaacttgttattaagaaccaacagttccataaagaaagggagcagcctcccagatttgcgcagcctggctcttttgaatacgaatatgctatgcggtggaaagccctcatagaaatggagaagcagcagcaggatcaagtcgatcgcaatattaaggaagccagagagaagcttgaaatggaaatggaagccgctcggcacgagcaccaggtcatgctcatgcggcaagacttaatgcgtcggcaagaggaactgcggcgaatggaggaattgcataatcaggaggtgcaaaagcgcaagcagttagaactgcgccaggaggaagagcggcgaaggagagaagaggagatgcgcagacagcaggaagagatgatgagacgccagcaggaagggtttaagggaacgtttcctgatgcacgggagcaggagattcgcatgggccagatggctatgggaggggcaatgggaattaataatcgcggagcgatgcctcccgctccagtgccagctggaacacccgctccacctggccctgctaccatgatgcccgatggaacactcggacttaccccgcctacaaccgagcggttcggccaagccgcaaccatggagggtattggggctattggcggaaccccaccagctttcaaccgggcagcccctggcgctgagttcgcccctaataaacggaggcgatattag

SEQ ID NO: 232894 - DNA, 1416 bp, synthetic construct
  misc_feature 1..1416: note = Description of Artificial Sequence: Synthetic coding sequence
  source 1..1416: mol_type = other DNA
atgcagagtaacaagacgtttaatttagaaaagcagaaccacaccccaagaaagcaccaccagcaccaccatcagcagcaacatcaccagcagcaacagcaacagcccccaccccctcccatccctgccaacggtcagcaggcgtcttcccaaaacgaggggcttaccatcgatcttaagaacttccggaagcccggagagaagacgttcacacagagatcccgccttttcgtaggcaatctcccccctgacatcaccgaagaagagatgaggaaattgtttgagaaatatgggaaggctggtgaagtcttcatacataaggataagggattcggcttcattaggctagagacccggacgttagctgagattgcaaaagtcgaactggacaatatgcctctgaggggtaaacagctaagagtgcgattcgcatgccattcagcctccctcacagtccggaacctcccgcagtatgtgagtaatgagctactggaagaggcattttcggtcttcggtcaggtggagcgagcggtcgttatcgtggatgaccgaggacgcccttcaggtaaggggatcgtggaattctccggtaagcccgctgctagaaaggccctggatagatgttcggaggggtccttcctgctcaccacattccctcgtccagtgaccgtagagcctatggaccaattagacgatgaggaggggttgcctgagaagttagtaataaaaaatcagcaattccacaaggagcgagaacaaccgccaagattcgcccagcctgggagcttcgagtacgaatatgctatgcgctggaaagccctgatagagatggagaagcaacagcaggatcaggtggacaggaatattaaagaggcccgagagaagctcgaaatggagatggaagcagcccgtcacgaacaccaggtgatgcttatgcgccaagacttaatgagacggcaggaagagctgcgccgtatggaggaattacataatcaggaggtgcaaaagagaaaacagctcgagttaagacaggaggaggagcgccgtaggagggaggaggaaatgcgacgtcaacaggaagaaatgatgcggaggcagcaggaaggcttcaaggggacattcccagacgcccgtgagcaagaaatacggatgggacagatggccatgggtggggctatgggcataaataatcgaggtgccatgccccctgcacctgttcccgctggcactccagcaccacccggacccgctacaatgatgccagacggcactctcggtctcacacccccaacaacagagagattcgggcaagccgctacaatggaggggattggcgcaattggagggacaccccctgctttcaatagggcagccccaggagcagagtttgccccaaataaacggaggaggtattag

SEQ ID NO: 232895 - DNA, 747 bp, synthetic construct
  misc_feature 1..747: note = Description of Artificial Sequence: Synthetic coding sequence
  source 1..747: mol_type = other DNA
atgcagtctaataagactttcaacctggaaaagcagaatcacactccacgaaagcaccaccagcaccaccaccagcagcagcatcatcagcagcagcagcagcaaccccctccacctccaatcccagctaatggccaacaggcgtctagccagaacgagggattgaccattgacctgaagaactttcgcaaaccaggagaaaaaacatttacccagcgatctcgcctgtttgtcggcaacctgcccccagatattactgaagaagagatgaggaaactattcgaaaagtatggtaaagcgggtgaggtcttcatacacaaggacaagggttttgggtttatcaggctggagactcgcactctggctgaaattgcaaaggtggagcttgacaacatgcctctacgtgggaagcagctccgcgtccggtttgcctgccatagcgctagcctgaccgtccgaaacttgccccaggagcgcgaacagccccctcggttcgcacagccagggtccttcgagtatgagtatgccatgcggtggaaggccctcatcgagatggagaagcagcaacaagaccaggtggatagaaatataaaggaggcgcgagaaaagctcgagatggaaatggaggcagccagacatgagcatcaggtgatgctgatgagacaggatctcatgcgacgccaggaggagctgcggcgtatggaagagctgcacaaccaggaagttcaaaaaagaaagcagctgtag

SEQ ID NO: 232896 - DNA, 708 bp, synthetic construct
  misc_feature 1..708: note = Description of Artificial Sequence: Synthetic coding sequence
  source 1..708: mol_type = other DNA
taaccagatattactgaagaggagatgcggaagctttttgagaagtacgggaaagccggtgaggtcttcattcacaaggacaagggctttggctttatccgtctcgtcgagcgagccgtggtaattgtggacgacaggggccgtccatccggtaaaggtatcgtcgaattctcaggaaagccagcggctaggaaagccctggacaggtgttccgaggggtcgttcttacttactactttccccaggccagtgactgtggagcccatggatcagctggatgacgaagaagggttgccagaaaagctagttattaagaatcagcagttccacaaggagcgagaacagccgccacggtttgcacagcctggcagttttgagtacgaatacgcgatgcgttggaaggccctgatcgagatggaaaaacaacaacaggaccaggtggatagaaacattaaggaagctcgcgagaagctggagatggagatggaagctgctaggcacgaacaccaggtgatgcttatgcgacaagatctcatgcgaagacaggaggaactgcgccgtatggaggagctgcacaatcaggaggttcagaagcgcaagcagctggagttgcggcaggaggaagagcgccgacgacgggaggaggagatgagacgccagcaggaggaaatgatgcggagacagcaggaagggttcaaggggacatag

SEQ ID NO: 232897 - DNA, 375 bp, synthetic construct
  misc_feature 1..375: note = Description of Artificial Sequence: Synthetic coding sequence
  source 1..375: mol_type = other DNA
atgcagagcaataaaacgtttaacttggaaaaacagaaccataccccccgtaagcaccaccagcaccaccatcagcagcagcatcatcagcagcagcaacaacagccccctccaccacccatccccgcaaatggccagcaagcgtcctcacaaaacgaaggattaaccatcgatctcaaaaacttccggaagcccggagagaagacatttactcagcgtagtcggctgtttgtcgggaatctaccccctgatatcactgaggaggagatgcggaaattgtttgaaaagtatgggaaggagactagaaccctggccgaaatcgcaaaagtggaacttgataatatgcccctcagaggcaaacagctgcgggtgtag

SEQ ID NO: 232898 - DNA, 201 bp, synthetic construct
  misc_feature 1..201: note = Description of Artificial Sequence: Synthetic coding sequence
  source 1..201: mol_type = other DNA
atgcagagtaacaagacattcaatcttgaaaagcaaaaccatacacccaggaagcaccaccaacatcaccatcaacagcaacatcatcagcagcagcagcagcaaccacccccacctccgatccctgcgaatggccagcaggcaagctctcagaatgaaggactgactatcgacctcaagaacttcagaaaacccggatag

SEQ ID NO: 232899 - DNA, 624 bp, synthetic construct
  misc_feature 1..624: note = Description of Artificial Sequence: Synthetic coding sequence
  source 1..624: mol_type = other DNA
atgcagtccaacaagactttcaatttagagaaacagaatcatactcctcgcaagcaccaccagcatcaccatcagcagcaacatcaccagcagcaacaacaacaaccaccaccccctccaatccccgctaacggacaacaggccagctcccagaacgaaggattgaccatagatttaaagaactttcgcaagccaggggaaaaaacattcacacagagatctcggctttttgtcgggaatttgccacccgatatcaccgaagaggaaatgcgcaagctctttgagaagtatggcaaagcaggggaggtgtttatccacaaggacaaagggttcgggttcatcaggctggagacaaggactctggccgagattgcaaaagttgagttggacaacatgcctctaagagggaaacagctgagggtccgctttgcttgtcactcagcctccctgaccgtgcgtaatctgccccagtacgtcagcaacgagcttctggaggaagcttttagcgtttttggccaggtggaaagggccgttgtgattgttgacgatagaggcagaccgagcggtaaaggaatcgtcgaattcagcggcaaacccgcagcccgaaaagcccttgatagatag

SEQ ID NO: 232900 - DNA, 1149 bp, synthetic construct
  misc_feature 1..1149: note = Description of Artificial Sequence: Synthetic coding sequence
  source 1..1149: mol_type = other DNA
atgcggaagctctttgagaaatacggcaaggctggcgaggttttcatccacaaggataagggtttcggcttcattcgcttggagacacggaccctcgccgaaatcgccaaagtcgaactcgacaatatgccactgagaggtaaacagcttagggtacggtttgcctgtcattccgcaagtctgactgtgcgtaacctgcctcagtacgtatcaaacgagttactcgaagaggcgttttcggtgttcgggcaggtggagagggcagtcgtaatcgtggatgacagggggaggcctagtgggaaaggcattgtagaattctccgggaaacctgcagctcgcaaggccttggatcgctgcagtgaaggctcttttctgctaaccactttcccacggccagtgacagtcgaacctatggatcagctcgatgacgaagagggactccccgaaaagctcgtgattaagaatcagcagttccacaaagagagagaacagcccccacggttcgcacaacccggttcgttcgagtatgagtatgcaatgagatggaaggccttgatagaaatggaaaagcagcagcaggatcaggtcgaccgaaatattaaggaagcgagggagaagttggagatggagatggaggcggctcgtcacgaacaccaggtgatgctgatgcggcaggatcttatgcggaggcaggaggaactgaggagaatggaggaactacacaatcaagaggtgcagaagcggaagcagctcgaactgagacaggaggaagagagaaggcggagagaagaggaaatgcgaaggcaacaggaggagatgatgcgcagacagcaagaagggttcaagggcactttccccgacgcgcgtgaacaggaaatacggatgggccaaatggccatgggcggagccatgggtattaacaaccggggagccatgccgccagctcctgtaccagctgggactccagctccgcctggacccgctaccatgatgcccgacggaactctcggattgacaccgccaactactgagcgattcggccaggcagctactatggaaggtatcggagccatcggcggtaccccaccagcgttcaacagggctgcaccaggcgctgaattcgcgcctaataagcggcgacggtactag

SEQ ID NO: 232901 - DNA, 3048 bp, synthetic construct
  misc_feature 1..3048: note = Description of Artificial Sequence: Synthetic coding sequence
  source 1..3048: mol_type = other DNA
atgggagccgagagaagactcttatccatcaaggaggcctttcgcctcgcccagcagccccaccagaatcaagcaaaacttgtcgtcgccttgtcgcggacatacaggaccatggacgataagaccgtcttccatgaagaatttatacactatctaaagtacgtcatggtggtgtataaacgcgaacctgccgtggagcgggtgatagagttcgcggcaaagttcgtgactagtttccaccagagtgatatggaggatgatgaggaggaagaagatggtgggttgttaaattacctgttcacttttctgctaaagtctcatgaggctaatagtaacgctgtgcgctttcgtgtctgcttactgatcaacaaactcttgggtagcatgccggaaaacgctcagatcgatgacgatgttttcgataaaatcaacaaagcaatgctaattaggcttaaggacaaaattcctaatgtcaggatccaggccgtactggcgctgagccggctccaggacccaaaagatgacgagtgtcctgtggttaatgcctatgcaactctgatagaaaacgattctaacccagaggttaggcgggcagttctgtcatgtattgccccttctgctaaaaccctgcctaaaatagttgggagaactaaagacgtcaaagaagcagttcggaagctagcctaccaggtgctggccgagaaagttcatatgcgcgcaatgagcatcgctcagcgggttatgctccttcagcagggcttgaatgataggagtgacgccgtgaagcaggccatgcagaagcatttactgcagggctggctgaggttctccgaaggcaacattctggaactactgcacagactggacgttgagaacagcagcgaagttgccgtcagtgtgctgaacgcccttttttcaatcaccccactgagcgagctcgttgggctgtgcaagaacaatgatggtcgtaagttgatccccgtggagactctaacccctgaaatcgccctgtactggtgtgccctgtgcgaatacctgaaaagcaaaggcgacgaaggggaggagtttttagagcagattctgcccgagcccgtcgtgtatgcagattatctgctgtcttatatccagtccattcccgtagttaacgaggagcacagaggagatttctcctacatcgggaacttgatgactaaagaatttattgggcagcaactgattctgattatcaagtccctggatacctctgaagagggaggcaggaagaagctgctcgccgtgctccaagagatactgattctccctacgatccctatatccctggtgtcattcctcgtggagcgcctgcttcacattataatcgatgacaacaagcgtacacaaatcgtcaccgagatcatatccgagattcgggcacccatagtaacagtgggggtgaataatgatccggctgacgtgagaaagaaggaactcaagatggccgagattaaagtcaaactgatcgaggctaaagaggcgctcgagaattgtatcacattacaggatttcaacagggccagcgaactcaaggaggagatcaaggccctggaggatgctaggatcaaccttctaaaagagacagaacaacttgagataaaagaggtccatatagagaaaaatgatgctgaaacgctgcagaaatgcctaatcctttgctacgagttgctcaagcagatgtccatcagtacgggactttccgcaaccatgaacggcattattgaatctcttatcctgcccggtatcatctcaatacatccagtggtccggaatctggcggttctgtgtctgggctgttgcggtcttcagaaccaagattttgccagaaagcacttcgtgctgttactgcaagttcttcaaatcgacgacgtgacaattaagatttccgccttgaaagctatatttgaccagctgatgacattcggcatcgagccgtttaagacaaagaagatcaaaaccctgcactgtgaaggtacagagatcaattccgacgacgagcaggagtctaaggaggtcgaagaaacggctacagctaagaatgtgctcaaattgctttctgacttcctcgactctgaagtgtcagagctccggaccggagctgcggaaggactggcaaagctaatgttttccggactgctagtctcttctcgtatactctcacggctgatactgctgtggtataatcccgtaactgaggaagatgtgcaactgaggcattgtctaggggtgttctttcccgtcttcgcatacgccagtaggactaaccaggaatgcttcgaggaggcgttcttaccaacactccagaccttggctaatgccccagcctccagtccccttgccgagattgacatcactaacgtcgctgaactcctggtggacctgactcggcctagtggtctgaatccgcaggccaagaccagtcaggactatcaagccctgacagtgcacgacaacctggcaatgaagatttgcaacgagatcctgacgagcccatgctcgcccgagattagagtgtacacaaaggccctatcctctctggaactgagcagccatcttgccaaggacctgctggtccttctgaatgagatcctggagcaggttaaagatcgtacctgtcttagagcattagaaaagatcaaaattcagctggaaaagggaaacaaggagttcggggaccaagctgaggccgcacaggatgctaccctgacaaccaccacgttccagaacgaggacgaaaagaacaaagaggtctatatgacccccctccgtggcgttaaagccacgcaagcttctaagagtacgcagcttaaaacaaataggggccagagaaaggtaactgtttccgccagaacaaaccgacggtgccagaccgcagaggcagacagtgagtccgaccacgaagttcccgagcctgagagcgagatgaagatgcgcctgccaagacgggctaaaacggctgccctggagaagtctaaactgaatctggcccagtttctgaacgaagatctgtcctag

SEQ ID NO: 232902 - DNA, 951 bp, synthetic construct
  misc_feature 1..951: note = Description of Artificial Sequence: Synthetic coding sequence
  source 1..951: mol_type = other DNA
atgagcggcgacagtagcggtagaggccctgagggccgaggccgaggccgagaccctcatcgggatcgcacacggtctaggagtcgatctcgcagccccctctcccctcgatctaggagggggtcagctcgggaacggagggaggccccagagagaccaagccttgaggataccgaaccttccgactccggcgacgagatgatggatcctgctagcctcgaagccgaggccgaccagggattatgccgtcaaattagacaccagtaccgggctctgatcaattcagtacagcagaaccgagaagatatcttgaatgccggagacaaattgacagaggttctggaagaggccaacacgctgttcaacgaggtttcccgcgctagagaggccgtgcttgatgcacactttcttgtgcttgctagtgatctgggcaaggagaaggctaaacaactgaggagcgatctgtcaagctttgatatgttgcggtacgtggaaaccctcctgacccatatgggagtcaacccactagaggccgaggagcttattagagatgaagacagccccgatttcgagtttatagtgtacgattcatggaagatcaccggtcgcaccgccgagaatacctttaataagacacataccttccacttcctgttgggctcaatttacggagaatgtcctgttcccaagccacgcgttgatagaccccgaaaggtacccgtaatccaggaagagcgcgcaatgcccgcacaactgcgcaggatggaagaatctcatcaggaggccacagagaaggaggtggaacgcatcttgggcctgctgcaaacttacttcagagaagatcgagacagcctgaccttgagtcccagactcgaatgtagtggcacgataagcacacattgcaacctgcatctactcgattctagtaattcaccggcttctgccagctag

SEQ ID NO: 232903 - DNA, 1158 bp, synthetic construct
  misc_feature 1..1158: note = Description of Artificial Sequence: Synthetic coding sequence
  source 1..1158: mol_type = other DNA
atgtccggtgactccagcgggcgtggtcccgaaggtcgcggtagaggccgagatccacaccgggaccgcacccgttcccgctcccgctccaggagcccactttcaccgagaagccgtcggggaagcgcacgcgagcgacgcgaggccccagagaggcctagcctggaagacaccgagccaagtgatagtggcgacgaaatgatggacccagcttctcttgaggcagaggccgatcaaggactgtgccggcagatccgtcatcagtatagggcgctcatcaattcagtacagcagaaccgcgaggacattctgaacgctggtgacaaactgaccgaggttctggaggaggccaatacattgtttaacgaagtatcccgagccagagaggccgtgttagacgcccacttcctggtccttgcttccgatctgggcaaagaaaaagccaaacagttacgcagcgatttatcttcctttgacatgctgcggtacgttgagaccctgctaacgcatatgggcgtcaatcccttggaagcagaagagttgattcgcgacgaggacagcccagactttgagttcattgtgtacgacagctggaagattacaggcaggaccgccgaaaatacattcaacaaaacccacacctttcactttctgcttggatccatctacggcgaatgccctgttcccaagcctagggtggatcggcctcggaaagtccctgtgatccaggaggaacgcgctatgcccgcacagctacgtcgcatggaagagtcacatcaggaggctacagagaaagaggtggaaaggattcttggactcctccagacgtactttcgtgaggatcccgatacaccaatgtccttcttcgatttcgtggttgatccacacagttttcctaggactgtggagaacatttttcacgtctctttcattatccgcgacggatttgcgaggatccgtctggatcaagatcggttacccgttatcgagcctgtgagtattaatgaggaaaatgaagggttcgaacataatacccaagttcggaaccagggtattatcgctctgagctaccgcgactgggaggagatagttaagacattcgagatttcagagcccgtaattactcccagccagaggcagcagaagccgtctgcctag

SEQ ID NO: 232904 - DNA, 519 bp, synthetic construct
  misc_feature 1..519: note = Description of Artificial Sequence: Synthetic coding sequence
  source 1..519: mol_type = other DNA
atgctccgctatgtggagaccctgctgacacacatgggcgtaaatccactagaagcagaggaacttattcgcgacgaggattctccagattttgagtttatcgtgtacgattcttggaaaataacgggacgaaccgcggagaacacattcaacaaaacacacacttttcattttctgcttgggagcatatacggggaatgcccagtccccaaacccagagtggacagaccacgcaaggttcctgtgattcaagaggaaagggcgatgccagcacagctgaggcggatggaggagtcacatcaagaggccaccgaaaaggaggtggagcgaattctgggcctgcttcaaacctacttcagagaagaccccgataccccaatgagtttttttgattttgtagtggacccccacagctttcctaggaccgtcgagaatatttttcacgtctctttcatcataagggacggattcgcacgaattcggctcgatcaagaccgcctgcctgttatcggtaaatag

SEQ ID NO: 232905 - DNA, 2574 bp, synthetic construct
  misc_feature 1..2574: note = Description of Artificial Sequence: Synthetic coding sequence
  source 1..2574: mol_type = other DNA
atggcaaaggccaaaaaggtgggtgctcgcaggaaggcaagtggagccccagcaggtgctagaggtggcccagctaaggccaacagtaatccattcgaggtcaaagtaaacaggcagaagtttcaaatcctcgggaggaaaactcgacatgacgtgggactgccgggagtctctcgagcccgtgcactgagaaagaggactcaaactctgcttaaggagtataaggaacgtgataaatcaaatgtgtttcgggataaacggtttggcgaatataacagcaatatgtcacccgaagaaaagatgatgaaaaggtttgctctggagcagcagcgccaccatgaaaaaaagtccatttacaaccttaacgaagacgaagagctcacacactacggccagtcgttggcagacatcgagaaacacaacgacatcgtcgacagtgatagcgatgctgaggatcgcggtacactgtctgccgagctcacagccgcacacttcggagggggtggcggattgcttcacaagaaaacacaacaggaaggcgaggagcgggagaagcccaagtcacgtaaagagcttatagaagagctcattgctaagagtaaacaggagaaacgggagcgccaagcccaaagggaagatgcgctggaacttacggagaagctagatcaagactggaaggaaatacagaccctcctaagtcataagacaccaaaaagtgagaatagggacaaaaaagaaaagccgaagcccgacgcttacgatatgatggtgcgggagctgggctttgaaatgaaggctcagccttctaacaggatgaagactgaagccgagctggcgaaggaggagcaggagcatctccgcaagttagaagcggaaaggctgagaaggatgcttggtaaggacgaagacgagaacgtcaagaaaccaaagcacatgagcgctgacgacctgaatgacgggttcgttctggacaaagacgaccgcagacttctgtcctacaaggacggaaagatgaatgttgaggaggacgtccaggaagaacagagtaaggaagcttcagatcctgagagtaatgaagaagagggggattccagcgggggtgaggacaccgaggagtccgacagccccgactctcatctcgacttggaaagtaatgtggaatccgaagaagagaacgagaaaccagctaaggaacagcggcagacaccgggtaagggtttgatttcaggtaaagagcgagccggtaaggccactcgggacgagttgccatataccttcgccgctcccgaatcctacgaggagctgcgcagcttgctgcttggacgtagcatggaagaacagctccttgtggtggagcgcattcagaagtgcaatcacccttctcttgccgaggggaacaaagcaaagctagagaaactcttcgggtttttgctagagtatgtgggcgacctagccacggacgacccccctgacctgaccgtgatcgacaagctcgttgtacacctctaccacctgtgccagatgttccccgaatcagcctctgatgccattaaattcgtcctccgtgatgcgatgcatgaaatggaggaaatgattgagaccaaggggagggccgctcttccgggactcgacgtgctcatatacctcaagattaccgggttgcttttcccgacttctgatttttggcacccggtggtaacgcctgcattagtatgcctgtcccagctgctgaccaaatgtccaattctgtctctgcaagatgtggttaaggggttattcgtctgctgtttgtttcttgagtacgttgccttgagccagaggttcattcccgagctcatcaacttcctactcggcatcttatatatagccaccccgaacaaagcatctcagggctcaactctcgtgcaccccttcagggcactggggaaaaactcagagctgttggtagtgagcgcgagggaggacgtggcaacttggcagcagtcttccctgtctctgcgatgggcatctaggcttcgggctcccaccagcaccgaggcgaatcacattcggctgtcctgcctcgcggttggcctagccttactgaagaggtgcgttttgatgtatggcagtctaccaagtttccatgccattatgggcccactgcaggccctgttaaccgatcacctggcggactgctcccaccctcaggagctccaggaactttgtcagagcacactcacagagatggagagtcagaagcaactgtgtcgacctctgacctgtgagaaatcaaagccggtcccgctgaagctatttactccgagattggtgaaggttctggagtttggtaggaaacaaggatcctccaaggaggagcaggagcgcaaaaggcttatccacaaacacaagcgcgagttcaaaggagccgttagggaaataaggaaggataatcaatttttggcacggatgcaattgagcgagattatggagagggatgcagaacggaaacgcaaggtgaagcaattgttcaatagtcttgcaactcaggaaggcgagtggaaggccctcaagcgtaagaagttcaagaagtag

SEQ ID NO: 232906 - DNA, 2421 bp, synthetic construct
  misc_feature 1..2421: note = Description of Artificial Sequence: Synthetic coding sequence
  source 1..2421: mol_type = other DNA
atggcaaaggctaaaaaggtgggcgcaaggcgcaaagcatctggggctccggcaggcgcacggggtggcccagccaaggccaacagcaacccattcgaggttaaggtgaatcgccagaagttccaaatcctcggtaggaagacacggcacgatgtgggcctaccaggagtgtctagagccagggctttacggaagagaacacaaactctgctgaaggagtataaggaacgggataaaagtaacgtttttcgcgataaacggttcggcgaatataactccaatatgtcccctgaagagaagatgatgaagcgcttcgcacttgaacagcaacgccatcatgagaagaagtctatctacaacctcaatgaggatgaggaactcacccattacggccaaagcttggccgatatcgaaaaacacaatgatatcgttgattccgacagcgatgccgaggatcggggaacactgagcgctgagctaactgcggcacacttcggcggagggggtggtcttctgcataagaaaacgcaacaggaaggtgaggagagagaaaaacctaagtcgcgaaaggagctgattgaggagctcatcgccaaatccaagcaggagaaacgggaacgtcaagctcagcgagaagacgcactggagctcactgaaaagctggatcaggactggaaagagatacagacgttgctgtcacataaaacccccaaatccgagaatagggataagaaggagaagcctaaacctgacgcatatgatatgatggtgcgggaattgggctttgagatgaaagctcagccgagtaatcggatgaaaacggaggccgagcttgctaaggaagagcaggaacaccttagaaaactcgaagctgaaaggttgcgcaggatgcttgggaaagacgaagatgagaacgtgaaaaagcctaagcacatgtcggcagacgatctgaatgatggctttgtgctggataaagacgataggagacttctgagttacaaggatggaaagatgaacgtagaagaagatgtgcaggaggagcagtcaaaggaggcttcagacccagagtcaaacgaggaagaaggagattcaagcggcggagaggatactgaggagagcgattcccctgacagccaccttgacctggaatccaatgtcgagtccgaggaagaaaacgagaaaccggctaaagaacagaggcagacacccggtaaaggcttgatctccggaaaggagcgggctggcaaggctactagagatgaactgccttatacttttgctgcacctgagtcatacgaagagctgaggagtcttcttttagggaggtccatggaggaacagttactagtggttgagaggattcagaaatgtaaccatcccagcctggctgagggcaataaggcgaagctcgaaaagctatttggcttcctacttgagtacgtgggagacttagcgactgatgatccacccgacctaactgttattgataagctggtcgtgcacctgtatcatctgtgccagatgtttcccgaatccgctagtgatgccattaagttcgtattacgagacgctatgcatgaaatggaagagatgatagaaactaaaggaagagcagcacttccagggctggacgttctgatctacctgaagattactggcctgcttttccccacttcagacttctggcaccctgttgtcacgcctgccttagtttgcctcagtcagcttctgactaaatgtcctattttgtctctccaggacgtggtgaaaggactgttcgtatgctgcctgttcctcgagtacgttgccctctcacagaggttcatccccgagttaattaacttcttactgggtatactttatattgccaccccaaacaaggcgtcccaggggtccacattagtgcatccatttagggccctcggcaagaactctgaactgttggtggtatcagcaagagaggacgtggcaacctggcagcagagttcactgtccctacgctgggcctcccggttgagagcaccgacatcaaccgaagccaaccacatcagactttcctgtctcgctgtggggttagcgttgctgaagagatgcgtcctcatgtatggtagcctaccatcgtttcatgcgatcatgggacctctgcaggctctactcaccgatcatctggctgactgcagccacccccaagaacttcaagagttgtgtcagtccacccttaccgaaatggagtcacaaaaacaactgtgtcgtcccctgacctgcgagaagtccaagcccgttcctctgaaattatttactcctagactggtctccaattcaaggccacaggtgattcatctgccctggccacccaattaccgttgcgagccgcaacaccccgcaaagaaggtgattttcttccgagtcataatgctgtag

SEQ ID NO: 232907 - DNA, 2574 bp, synthetic construct
  misc_feature 1..2574: note = Description of Artificial Sequence: Synthetic coding sequence
  source 1..2574: mol_type = other DNA
atggctaaagctaagaaagtaggagctcgcaggaaggcctccggggcacccgctggggctcgcggtggtcctgctaaggcgaactcaaatccattcgaagtgaaagttaacaggcagaaatttcagatactgggtaggaagacaagacatgatgtggggcttcccggagttagcagggccagggccctcagaaagcggacccagaccctgctcaaggaatacaaagagcgtgataaaagtaacgtgtttcgcgacaagcggtttggtgaatacaattccaatatgagccctgaggagaagatgatgaagcggtttgccctggagcaacagagacaccatgagaaaaagtctatctataatctgaatgaggacgaagaactcacacattacgggcagtccctcgcagacattgaaaaacacaacgatattgtggattcagattccgatgccgaagacaggggtaccctgtcagcagagctgacagccgcacattttggaggcggagggggacttttgcataaaaaaactcagcaggaaggggaagagagggaaaagcccaaatcccgtaaggagctgatcgaggagcttatcgcaaagagcaagcaggagaaaagagagagacaggctcaaagggaagatgccctagaactgaccgagaaacttgatcaagattggaaggaaattcagactctgctcagccataagacacccaagtcggagaatagggacaaaaaagaaaagcctaagcccgacgcttatgacatgatggtcagagagctcggtttcgaaatgaaggcccaaccttccaacagaatgaagacagaagctgagttggctaaggaggagcaagaacatctgaggaagctggaagctgaacgactccgccgtatgctcggaaaagacgaggatgagaacgtgaaaaagcccaagcacatgtctgcagatgacctgaatgacggattcgtgcttgataaggatgacaggcgattgctcagttataaggacggcaaaatgaatgtggaggaagatgttcaagaagagcagtcaaaggaagcaagcgaccccgaaagcaatgaggaggagggtgattcctcaggcggagaagataccgaagagtcagattccccggatagccacctggatctggagagtaacgtggaaagcgaagaagagaatgagaaacccgctaaagaacagcggcagacccccggtaaaggactgataagcgggaaggagcgcgctggaaaggccacgcgggatgagctgccgtatacgttcgctgcccctgagtcgtatgaggagctccggagtttattgttgggtcggagtatggaagagcaacttctggtggtggaaagaatccaaaagtgcaaccacccatcgctggcagagggcaataaggccaaattggagaaactgttcggcttcctccttgagtacgtgggggacctggccacggacgacccccctgacttgactgtcattgataagttggtcgtccatctgtatcacttgtgtcagatgtttcctgagtcggcttcggacgcaatcaaatttgtactccgagatgccatgcacgaaatggaggagatgatagaaaccaaaggcagagccgcactcccaggtctcgatgtcttgatatacctgaagattaccggcctactgttccctacatctgatttttggcatccagtggtcacacctgcattggtgtgtctgagccagctcctgaccaaatgccctatactctcactgcaggacgtggtgaagggcctctttgtctgttgcttgttcctggagtacgttgctctcagtcaaaggttcattcccgaactgatcaattttctgctggggatactgtacatagccacgcccaataaggcatctcaggggtcaacactggttcacccttttcgtgctttgggcaaaaactctgagctgttggtggtgtcagcccgagaggacgtggccacttggcagcaatcttcccttagtctcagatgggcctcccgactgagagcaccaactagtacggaggcgaatcacatcagactgagctgtcttgcagtcggcctcgcactgctgaaacgctgcgtcctgatgtatgggagtttaccgagctttcacgcaatcatgggccctcttcaggctctattgaccgatcacctagctgactgttcccacccacaggagttacaagaactgtgtcagtctacactcacggaaatggagtctcaaaaacagctgtgtagacctcttacatgcgagaaaagtaaacctgtgccactgaagctgtttacaccaaggctggtgaaggtcttggaattcggcagaaagcagggatcttctaaggaggagcaggagcgaaagcggctcatacacaagcacaagcgtgagtttaagggtgccgttagagagatccgcaaagacaatcagtttctcgccaggatgcagttaagtgagatcatggaacgcgatgctgagcgaaaacggaaagtcaaacagctgttcaactccctagctacacaggaaggcgaatggaaggccctgaaacggaaaaagtttaagaaatag

SEQ ID NO: 232908 - DNA, 1728 bp, synthetic construct
  misc_feature 1..1728: note = Description of Artificial Sequence: Synthetic coding sequence
  source 1..1728: mol_type = other DNA
atgaagcggttcgctctggagcagcagagacaccacgaaaagaagtccatctataatctgaatgaggatgaggaacttactcattatggccagtctctcgcagacatcgagaaacacaacgacattgtagacagcgattcagacgctgaagataggggcaccttatctgctgagttgactgcggcacactttggcggtgggggaggtctgctgcacaaaaagactcagcaggaaggggaggaaagagagaagccgaagagccggaaggaactaattgaagaactcatcgcaaagtccaagcaggagaaaagagagagacaggctcagcgtgaggacgcactcgaacttaccgagaaactggaccaagattggaaggaaattcaaactttattgagccacaaaacccccaaaagcgaaaatagagataaaaaggagaagcctaaacctgatgcttatgacatgatggttcgtgaactgggcttcgagatgaaggcccagccttccaatcgtatgaaaactgaggcagaactcgcaaaggaagagcaggagcatctgagaaagctcgaggcagaacgcctgcgcaggatgctcgggaaagatgaggatgagaatgttaagaaacccaagcacatgagtgctgatgacctgaatgatggcttcgtcctggataaagatgaccgcagactgctctcctacaaggatgggaaaatgaatgtcgaagaggacgttcaagaggagcagagcaaagaagctagcgaccccgaatccaacgaagaagaaggggattctagtggcggtgaagatacggaagagtctgacagcccagactcccatctggatctggagtccaatgttgaatccgaggaggagaacgaaaagccagccaaggagcagcggcaaacccctgggaagggtctgatttcggggaaggagcgggctggcaaagctacccgagatgaacttccctacaccttcgccgcacctgaatcatatgaggaactgaggtctctcctactgggaaggtcaatggaggaacagctgttagtcgtagaaagaatacagaagtgtaaccatcccagcctagcggaggggaataaagccaagttggagaaacttttcgggtttctcctggagtacgtgggagacttagccacagatgacccacctgatctgacagtgattgacaaattggttgtccatctgtaccacctgtgccagatgttcccagaaagcgcatctgacgccatcaagttcgtgctccgtgacgccatgcacgagatggaggaaatgattgagaccaagggacgtgcagctctcccaggactggatgtgctcatttacctgaagattactggcctgctgttccccacttccgacttctggcacccagtggtcacgcccgcactagtctgtttatctcagctcctcaccaaatgccctattctgtccctgcaagacgttgtgaaagggctctttgtgtgctgcctgttcctggaatacgtggccctttcccagcgctttatcccagagttgattaattttctgctagggattttgtatatcgccacccctaacaaagccagtcagggttccacactcgtgcatcctttccgcgctctggggaagaattccgagctgttagtggtttcagcaagggaggacgtcgctacttggcagcagagttcactctccctacgctggtggagcaggattccagatctcaggtag

SEQ ID NO: 232909 - DNA, 2304 bp, synthetic construct
  misc_feature 1..2304: note = Description of Artificial Sequence: Synthetic coding sequence
  source 1..2304: mol_type = other DNA
atgggtagacggtctcggggacgcagactgcagcagcagcagcggccagaggacgctgaggatggcgctgaaggcggagggaagagaggtgaggctggctgggagggtggctatcccgagatcgtgaaagagaataaactgtttgaacactattaccaggaactgaaaatcgtgcctgagggcgaatggggacagtttatggatgccttacgagagccgctccctgcgactctgcgaataaccggctacaaatcgcacgcgaaagaaatcttgcattgtcttaaaaataaatattttaaggaattggaggacttggaggtggacgggcagaaggtagaggtacctcaaccgctgagttggtatcccgaggagctggcttggcataccaatctgtctaggaagatattaagaaagtctccgcatcttgagaaattccaccagttcctcgtttctgagacagaatcaggcaacatctccagacaggaggccgtttccatgattccaccgcttctcctaaatgttcgtccgcatcacaagatcctggatatgtgtgccgctccagggagtaagaccacccagcttattgaaatgctgcacgctgatatgaatgtgcctttcccagagggcttcgtcatcgccaacgatgtggataacaaacgctgctatctgcttgttcaccaggccaagagactcagctctccatgtatcatggtcgtcaaccacgacgcaagcagcattcctcggctgcagattgacgtagatggaagaaaagaaatccttttttatgatagaatcctatgcgatgtaccctgtagcggagacggcacgatgcggaaaaacattgatgtgtggaaaaagtggaccacattaaactccctgcagctgcacggtttgcaactgcgcattgctacaagaggcgctgagcagctggccgagggcggacggatggtgtattccacatgcagcctgaatccaatagaagacgaggcagtcattgcatcactgctggagaaaagtgaaggtgcactggaactggccgacgtcagcaatgaactgcccggattgaagtggatgcccggtattacacagtggaaggtcatgaccaaagatgggcaatggtttaccgactgggacgccgtgccccattctagacacactcaaatcaggccaactatgtttccgcctaaggacccggagaaactgcaagccatgcatctggaacgctgtctccgcatcttgccccatcatcagaataccgggggttttttcgttgccgtgctcgtgaagaagtcttcgatgccctggaacaagaggcagccaaagctacaaggaaagtctgcagaaacacgtgagtccacccaacttagccctgccgatttaaccgagggcaagcctaccgatccttcaaaactcgaaagcccgtcgttcactgggaccggcgacacagaaattgcccatgccactgaggatttggaaaataacggttccaaaaaggatggcgtgtgcgggccacccccttcaaagaaaatgaagttgttcggcttcaaggaggaccccttcgtgtttatacccgaggatgatcccttgtttccgccaattgagaaattttacgccctggacccaagtttccccaggatgaacctcctgacacgaacaacggaggggaagaaacggcagctctacatggtgagcaaagaacttaggaacgtgctcttaaacaactctgagaagatgaaagtaattaatacagggataaaggtttggtgccggaataattctggagaagagtttgattgcgcctttaggctcgcccaagaaggaatctacacactatacccgttcattaattccagaattatcacggtctcaatggaggatgttaagattctgctgactcaggagaatcctttttttcgaaaactgtccagcgagacgtacagccaggccaaagatttagctaaaggttccatcgtcctgaaatacgaacctgattccgcaaaccccgatgcattgcagtgccccatcgttctctgcggctggcgcggaaaggcatcaattcgcaccttcgttcccaaaaacgaacgccttcattacctccgtatgatgggactggaggtcctcggcgagaaaaagaaagagggcgtgatcttgacaaacgaaagtgcggcttcaacaggacagccggacaacgacgtgaccgaaggacagcgagccggagaaccaaactctcctgatgcagaggaagcaaactctccagacgtgactgctggatgcgaccccgcaggggtgcaccccccacgttag

SEQ ID NO: 232910 - DNA, 1596 bp, synthetic construct
  misc_feature 1..1596: note = Description of Artificial Sequence: Synthetic coding sequence
  source 1..1596: mol_type = other DNA
atggtcgtgaaccatgatgcttcctctatcccacgtctacaaatcgatgtcgacggacggaaagagatactattctatgatcgcattctgtgcgatgtgccctgttccggcgacggaacaatgagaaagaacatagacgtgtggaaaaagtggacaacacttaactcacttcaacttcatggactgcagctgaggatcgccactcggggagcagagcaattggccgaaggcggacgaatggtatattctacatgcagtctcaaccctattgaagatgaagctgtcatcgccagcttactggaaaaatcggaaggagcgctggaactggcggacgtgtccaacgagcttccagggctgaaatggatgccaggaatcacccagtggaaggtcatgacaaaagatgggcagtggttcaccgactgggatgccgtcccccactccaggcacacccagatcagacccaccatgttcccacccaaggaccccgagaagctccaggcaatgcacctggaacgttgcctgaggatcctaccgcaccaccagaatactggagggttttttgtcgccgttctggtgaagaagtcatcaatgccttggaacaaacgccaacctaagctgcagggtaaaagcgccgagacgcgcgagtctactcaattgtcaccagctgatctgactgaaggcaagccgacagatcctagcaaattggaatcccccagctttacaggcaccggagatacggaaatagctcatgctaccgaagatctggagaacaacgggtcaaaaaaggacggcgtgtgtggacctccgccttcaaaaaaaatgaagcttttcggattcaaagaggatccttttgtgtttatcccagaagacgatcctctattccccccaatcgagaaattttacgcccttgacccgagcttccctcgaatgaacctgctcaccaggactaccgagggaaaaaaacgtcaattatatatggttagcaaagagttgcgtaacgttctgctcaataattctgagaagatgaaggttataaataccggaatcaaggtctggtgccgaaacaattctggagaagaattcgattgtgcatttcgtctggcccaggaggggatttataccttatatccctttataaacagtcgtataattactgtgagcatggaagacgtgaagattcttttgacacaggagaatccgttcttcagaaagctgtcttctgaaacttatagccaggctaaggacttggctaaagggagcattgttctgaagtatgagcccgattccgccaaccccgatgccctgcagtgcccaatagttttatgcggctggcgcggaaaagccagcatccggacattcgtcccaaagaacgagagactacactaccttcggatgatgggtttagaggtcttgggagagaagaagaaggagggagtcatactgacaaatgagtctgccgcaagtacgggacagccagataatgatgtgactgagggacagagggctggagagccgaacagccccgatgcagaggaagcaaacagccccgatgtgaccgccggatgcgatcccgcaggcgttcacccccctcgctag

SEQ ID NO: 232911 - DNA, 2199 bp, synthetic construct
  misc_feature 1..2199: note = Description of Artificial Sequence: Synthetic coding sequence
  source 1..2199: mol_type = other DNA
atgggacgaaggagcagagggagacgcttacagcaacaacagaggcctgaggatgctgaagatggggctgagggcggaggcaagcgtggtgaggccggttgggaaggaggatacccagagatcgtcaaggagaacaagctgttcgaacactactatcaggagttgaagattgtaccagagggagaatggggacaattcatggacgcactgagagaaccattaccggctaccctgcgtatcaccggctataagcgataccccgaggaactcgcatggcacacaaacctttctcgtaagattctgcgaaagagcccacacctcgagaagttccaccagtttctggtcagtgaaactgagagcggaaacatcagtcggcaggaggccgtctctatgattcccccactgctgctgaatgtgagacctcaccacaagatcctggacatgtgcgccgctcccggaagcaagactacacagctaatagaaatgctgcacgctgacatgaatgtgccctttccagagggttttgtgattgccaatgacgtagataacaagcgctgctaccttctcgtgcatcaagcaaaacgactcagctctccttgtataatggtagtgaatcatgacgcaagctccattcccaggctgcaaattgacgtggacggccgaaaagaaatccttttttatgatcgcattttgtgtgacgtaccctgcagtggcgatggtactatgaggaaaaacatagatgtttggaagaaatggaccacactgaattctttacagctgcatggtctgcagcttcgcattgcgactaggggcgctgagcagcttgcggagggtggtaggatggtctactccacatgttcgcttaatccaattgaggatgaagctgtgattgcttcattgctggaaaagtctgagggggctctcgaactagcggatgtttctaacgaacttcccggacttaaatggatgcccggaattacccaatggaaagtgatgactaaagatggacagtggtttaccgactgggacgcagtgcctcattctagacatacacagatacgccctactatgttcccccctaaggatcccgagaagctccaagcaatgcatttagaacgctgtctgcggatattgcctcatcatcaaaacactggagggttttttgtcgccgtgctcgtcaagaagtcctccatgccctggaataaacgacagcctaagctccagggaaagtccgccgaaacccgggaaagtacacagctgagccccgcagatctgactgagggcaaaccgaccgatccaagcaagctggaaagtccatcctttaccggcacaggtgacaccgagattgctcacgccaccgaagatctcgagaataatggttctaaaaaagacggcgtgtgcgggccaccaccctccaagaaaatgaagctgttcgggttcaaggaggatcctttcgtgtttatacctgaggacgaccccctcttccctcctatcgaaaagttctatgctttggacccaagcttcccccgtatgaacctgttaacacgaactaccgaggggaagaaacgccaattgtatatggtctccaaggagctgcgcaacgttctgctgaataactctgagaaaatgaaggtgattaatacagggataaaggtgtggtgccgtaataactccggggaagaattcgactgcgcattccgcctagcccaggaaggcatttacacactctacccatttatcaactcccggatcattacagtctctatggaggatgttaaaattctgctgacacaggaaaatcccttttttcgaaaactctcctctgagacctatagtcaggcaaaggacttggccaagggtagcattgtactcaaatacgagcctgatagtgccaatccagacgccctccagtgccctattgtcctgtgcgggtggcgtggcaaagcaagcattcgtacgttcgttcctaagaatgaacggctgcactacctgcggatgatgggtctggaagtcctgggtgagaaaaagaaggagggtgtcatcctaacaaacgaatccgccgctagcaccggtcagcccgacaacgacgtcactgaagggcagcgcgctggggaacctaactcacccgatgccgaggaagcgaactcacctgatgttactgcgggatgtgatcccgctggggttcatccaccccgatag

SEQ ID NO: 232912 - DNA, 1785 bp, synthetic construct
  misc_feature 1..1785: note = Description of Artificial Sequence: Synthetic coding sequence
  source 1..1785: mol_type = other DNA
atggtcttactgcacgtactctttgagcatgcagtcggctatgccttgctggccctcaaggaggtcgaagagatcagcctgctgcaaccgcaagtggaggagtccgtcctaaatctgggaaaatttcactctatcgtgaggctggtggcattctgccccttcgcgtcaagccaggttgccctggaaaacgccaacgccgtctcggagggcgtggtgcacgaagacctgcgcttgttgctggagacacatcttccgagcaagaagaaaaaggtgcttttgggcgtcggtgacccgaagattggagccgcaattcaggaggagctggggtacaattgccagacgggaggcgtgattgccgagatcctaaggggggtgcgactccactttcacaacttggttaaagggctgactgatttatctgcctgtaaggctcagcttggcctgggccacagttactctagggctaaggtgaaatttaacgttaatagagttgacaatatgatcatacagagcataagtctgctcgaccagcttgataaagacattaacacgttctcgatgcgggtaagggagtggtacggctatcatttccctgaactcgtcaaaattatcaacgataacgccacatactgccgcttggcccagtttattggtaaccgcagggaattaaacgaggacaagctagagaaattggaggaactgactatggacggcgctaaggctaaagctatcttggacgcttcgagatccagcatgggaatggatatctccgctatagatctgatcaatattgagtcattctcgagccgtgtggtctcattgtccgagtaccggcagagtctacacacttacctccgcagtaaaatgtcacaggtcgcccctagcctatcagctctgattggggaagccgtgggcgcacgactcatcgctcatgctggatccctgacaaacctcgcaaaataccccgcaagcaccgtccagattctaggcgctgagaaggccctctttcgagccctaaaaaccagaggaaatacgcctaagtatggcctgatattccactccacattcattggcagggcagcggctaagaataagggtcgtatatcccgttatttagcgaacaaatgctccattgcttctcgaatcgattgtttctctgaggtgccaacttccgtctttggcgaaaaactgagagagcaggtggaagagaggctaagcttttatgaaaccggcgaaatcccaagaaagaacctggacgtcatgaaagaagctatggtgcaggccgaggaggccgctgctgagatcacaagaaagttggagaagcaggaaaaaaagcggctgaagaaagagaagaaaagactagccgctctagctctggctagctccgagaactccagcagcacgcctgaagaatgtgaagaaatgtctgaaaagccaaagaagaagaagaagcaaaagccccaggaggtaccccaggagaatggaatggaagacccatccatatccttttcaaagcccaaaaaaaagaagtctttcagtaaggaagagttgatgagctcagacctggaggagaccgcaggcagcacatcaatccctaagaggaagaaatctacacccaaggaggaaaccgtgaatgatcctgaggaggctggacatcgttccggttctaaaaaaaagaggaaattctccaaagaggaaccagtgtcttccggacccgaggaagctgtggggaaatcttcttccaagaagaagaaaaagttccataaggcatctcaggaggactag

SEQ ID NO: 232913 - DNA, 678 bp, synthetic construct
  misc_feature 1..678: note = Description of Artificial Sequence: Synthetic coding sequence
  source 1..678: mol_type = other DNA
atggatatcagtgccatcgatctcattaatattgaaagcttcagttctcgggtggtatcccttagtgagtatagacaatcgctacatacctatcttcggagcaaaatgtctcaggtggctcccagcctatcagccctgatcggtgaagctgtgggcgcaagactgatcgctcatgccggtagcctgacgaatctagcaaaatatccggctagcactgtgcaaatactcggggcagaaaaagcactgttcagagccttaaagaccaggggtaacactcctaaatacggcctaattttccattccacctttattgggagggcagcagctaaaaacaagggtagaatctctaggtacctcgctaataaatgctcaatcgcctctcgtatagactgcttctcagaggtgcctaccagcgtgtttggcgagaagctgagagagcaggtggaggaaagactatcattttatgagaccggcgagattcctagaaagaacctggacgtgatgaaagaggcaatggtccaggcagaggaggccgctgctgaaataacgaggaagctcgagaagcaagagaaaaagcgtctcaagaaagaaaagaaacgactcgctgccctcgctctcgccagttcggagaatagttcatccacccccgaggagtgcgaggaaggagacagatgctag

SEQ ID NO: 232914 - DNA, 660 bp, synthetic construct
  misc_feature 1..660: note = Description of Artificial Sequence: Synthetic coding sequence
  source 1..660: mol_type = other DNA
tagctcattaacatcgaaagcttcagcagccgggttgtttctttgagcgaatatcgccaaagcttgcatacttatctgcgatctaaaatgtctcaggtcgcacctagcttgagcgccctcatcggagaggccgtgggtgccagacttatcgctcatgcgggaagcctgactaatttagccaaataccctgcatcaaccgtccagatcctgggtgcagaaaaagcactgtttcgtgcgctgaaaacacgagggaatacccccaaatatggactcatttttcacagcacattcattggcagggcagccgctaagaataaaggacggatcagtcgctatctggctaacaagtgttccattgctagtcggattgattgctttagcgaggtcccaactagtgtcttcggggaaaaattacgtgagcaggtcgaggagaggcttagtttctatgaaacaggcgagattccacgtaagaacctggacgtgatgaaagaggcaatggtgcaggctgaagaagccgcagcagaaatcacccggaagctggaaaagcaggagaagaaacggctaaaaaaggagaaaaaacgtctcgcagccctcgctctggcatctagcgagaattcatccagtacgcctgaggaatgtgaagagggggacagatgttag

SEQ ID NO: 232915 - DNA, 846 bp, synthetic construct
  misc_feature 1..846: note = Description of Artificial Sequence: Synthetic coding sequence
  source 1..846: mol_type = other DNA
atggtgctcctacacgtgttgttcgagcacgcagtgggctacgcacttttggctctgaaggaggtcgaagaaatcagcctcctgcagccccaagtcgaggaatcagtcttaaacctcgggaaatttcactctattgtaagacttgtggcgttctgtcccttcgcctcttcccaggtggcactggagaacgccaatgcggtctccgagggggtggtgcatgaggacctgaggttgctcttagagacccacttaccgagcaaaaaaaaaaaagtgctgctgggcgtgggcgatcctaaaattggcgcagccatccaggaagagctggggtataactgtcagaccggtggcgtcatcgctgaaattctgcgcggtgttcgcttgcatttccacaacctggtcaaaggactgactgacctctccgcatgtaaggcccagttaggcctgggccacagttattcacgggctaaggtgaagttcaatgttaaccgcgtcgataacatgatcatacagtccattagcttgttggaccagctagataaggacattaacactttttcaatgagagtacgtcagagtcgctgcggggaaggcaaggctgtcgccctctggttcctgatgaagcagctgggccaaggtgttaccgtcgccctttgtcgagaatggtatggctaccactttcctgagcttgtcaagataatcaacgataacgcgacttactgtagactcgcccagttcataggaaatcgacgcgaattaaacgaggataagctcgagaagctggaggaacttaccatggacggtgcgaaagcaaaggccatcttggacgccagcaggtcaagcatgtag

SEQ ID NO: 232916 - DNA, 402 bp, synthetic construct
  misc_feature 1..402: note = Description of Artificial Sequence: Synthetic coding sequence
  source 1..402: mol_type = other DNA
atgcggaagcacgtgttggccgcatctttttcaatgttgagcttgctggtgatcatgggggatacagacagtaaaactgatagttcctttataatggatagtgaccctagacggtgtatgcggcaccactatgtcgattccatatctcatcctctgtacaagtgctcaagcaagatggtccttttagcacggtgtgaggggcattgtagccaggcaagcaggtccgagccacttgtgagcttttcgacagtgctcaagcagccattcagatcaagctgccactgttgtcgccctcagactagcaaactaaaagctctcagactaagatgttctgggggtatgcggctgacggctacttaccgctacatactctcttgtcactgcgaggagtgcaatagctag

SEQ ID NO: 232917 - DNA, 7416 bp, synthetic construct
  misc_feature 1..7416: note = Description of Artificial Sequence: Synthetic coding sequence
  source 1..7416: mol_type = other DNA
atgcccgctctgaggcccgcacttctgtgggccctgttggcactctggctttgctgtgctgccccagcgcacgccctgcagtgtcgagacggatatgaaccctgtgttaatgagggcatgtgcgtgacataccataacggcacagggtactgcaaatgcccggaaggattcctgggcgaatactgccaacatagggatccgtgcgaaaagaacaggtgccagaatggtgggacgtgtgtcgcacaagccatgttggggaaggccacatgccgctgcgcttccggttttaccggagaggactgccagtattctacttcccatccctgctttgtatctagaccctgtctgaacggtggtacttgtcacatgctctctagagacacgtatgaatgcacttgccaggtcggctttacaggaaaggaatgccaatggactgatgcatgtctgagtcacccctgcgcgaatggcagtacttgcacaactgtagcaaatcagtttagttgcaaatgtctcaccggttttacagggcagaaatgtgaaaccgacgtcaatgagtgcgatatcccaggtcattgccagcacggcggaacatgcttaaacctgccagggtcttaccagtgccaatgcccacagggtttcaccggacaatattgtgactcattgtatgttccttgtgcaccaagtccctgcgttaacgggggtacctgccggcaaaccggtgactttacctttgaatgtaactgcctgcccggatttgagggctctacatgtgagcggaatattgacgattgccccaatcaccgctgccaaaatggcggtgtgtgcgtagacggcgtcaacacttacaattgtcgatgtccccctcagtggaccggacagttttgcacggaggacgtcgacgagtgtttgttacaacctaacgcttgccagaatgggggaacttgcgctaataggaacggagggtacggctgtgtttgcgtcaatggttggtctggagacgactgttctgaaaatatcgatgattgcgcatttgccagctgcacacccggaagcacttgtatagatcgcgtagcttctttctcgtgtatgtgtccagagggcaaggcgggattactctgccatctcgacgatgcttgtatctccaacccgtgccacaaaggggctctttgtgataccaatcctttgaatgggcagtacatctgtacctgtccacagggctataaaggagccgactgcactgaagacgtggatgagtgtgcaatggccaactccaatccctgtgagcacgccggaaaatgcgtcaatacagatggagcattccactgcgagtgcctgaaaggttatgccggtccccgttgtgaaatggacataaacgaatgccactcagatccctgtcaaaacgatgcaacttgtctagataagatcggcggattcacttgcctctgcatgcctgggtttaaaggtgtccactgcgagcttgagataaatgaatgccagtctaacccttgcgttaataacgggcaatgcgtggacaaagttaatagattccagtgcctgtgtccgcctggcttcactggacctgtatgtcagatcgacattgatgactgttcatctacaccgtgcttaaatggagccaagtgtatagaccatcccaacggctacgagtgtcagtgcgcgacagggtttacaggggtgctctgcgaggagaacattgacaattgtgatcccgacccatgtcaccacgggcagtgtcaggacggtattgactcatacacatgcatctgtaaccctgggtacatgggtgcgatctgtagtgatcagatagacgagtgctacagcagcccctgtctaaacgacggcagatgcattgatctagtaaacggctatcaatgcaactgtcagcctggaacctcaggtgtcaattgcgaaatcaactttgacgattgtgcttcgaacccttgcatccatggcatttgtatggacggcataaatcgctactcatgcgtatgctctccagggtttacgggccaacgctgcaacattgacatagacgagtgtgcaagcaacccctgtcggaaaggtgcgacctgcattaatggcgtcaatggctttagatgtatatgccccgagggcccacaccatcccagttgctatagtcaggtgaatgaatgcctctctaacccatgtattcacggcaactgtactgggggtctgagcggctacaaatgtttatgcgacgctggatgggttgggatcaactgcgaagttgacaagaacgaatgcctgtccaacccctgtcagaacgggggtacttgcgacaatctcgttaatggatatcgctgcacctgcaagaaagggttcaaggggtacaactgtcaagtcaacatagatgagtgcgcatctaatccatgtctcaaccaggggacttgcttcgacgacatctccggctacacttgtcattgcgtcctgccttacacaggaaaaaattgccaaacggtcctggccccatgctctcctaacccatgtgaaaatgccgcagtctgcaaggaatctcctaactttgaaagttatacatgcttatgcgcacctggctggcagggacagcggtgtaccattgacatcgacgaatgtattagtaaaccatgcatgaatcatggcctgtgccacaatactcagggaagctacatgtgtgaatgcccccctggtttttctggcatggactgtgaagaggacatcgatgactgcctcgctaatccctgccagaatgggggatcctgcatggacggcgttaatactttctcttgtctgtgcctgcccggattcaccggcgacaaatgccagaccgatatgaatgagtgcctgagcgagccttgcaagaacggcggaacctgtagtgattacgtaaactcatacacctgcaaatgccaggctgggtttgacggcgtgcactgtgagaacaacattaatgagtgtactgaatcatcatgcttcaacggtggaacatgtgtggatggcattaactccttcagctgcctgtgtcctgtgggattcacaggatcattctgcctgcatgaaattaacgagtgctctagccacccctgtctgaatgagggcacctgtgtcgacgggctggggacttaccggtgttcttgtccattaggatatactgggaaaaattgccagacgctggttaacctctgtagcagatccccctgtaagaataaaggaacttgcgtccaaaagaaggccgagtcccagtgcctgtgcccgagcgggtgggcaggggcatattgcgatgtgccgaatgtgagctgcgacatagctgcctccaggaggggcgtcctggtcgagcacctgtgtcaacactcgggcgtttgtatcaacgctggaaatacccactattgccagtgtcctttgggatatacaggcagctattgcgaggaacagctcgacgagtgtgcttccaatccttgtcagcacggtgctacctgctcggatttcattgggggataccggtgcgagtgcgtgcccggttatcagggtgtcaactgcgagtacgaggtcgacgaatgccagaaccagccttgtcaaaatggcggtacctgcattgacctggtgaatcactttaagtgttcctgccccccaggtactagggggctcctatgcgaagaaaacatcgacgactgcgccaggggcccacactgtctgaatggaggccagtgcatggaccgcatcggcggatattcctgccggtgcctccctggcttcgccggagaacgttgcgaaggagatataaacgagtgcctgagcaacccctgctcatccgaaggcagcctcgattgtatccagttgactaatgactacctttgcgtgtgcagatccgcatttacagggagacattgcgaaacattcgtggatgtgtgccctcagatgccttgcctgaacggagggacttgcgctgtggcatccaatatgcctgatggtttcatctgcagatgccctccaggatttagcggcgcacgctgtcaaagctcatgtggccaggtgaagtgcaggaagggggaacaatgcgtgcataccgctagcggcccacgatgtttttgcccttcaccaagggattgtgagtcaggttgcgcctccagcccatgtcagcatggcggttcctgccatcctcaacggcagccgccttactattcttgtcagtgtgcccctccgttttcaggatccaggtgtgagctctatacagcgccaccaagtactcctccggctacatgcctgagccaatattgcgcagacaaggccagagacggagtctgtgatgaggcctgcaattcgcatgcatgccagtgggatggtggagattgtagtcttaccatggagaacccttgggcaaactgtagcagcccgctgccgtgctgggactatatcaacaatcagtgcgacgagctgtgtaacaccgtcgaatgcctgtttgacaattttgagtgtcaggggaatagcaagacctgcaaatatgacaaatactgtgccgaccatttcaaagacaaccattgtgaccagggttgtaatagcgaggaatgtggttgggatgggctggattgtgccgctgaccaaccagaaaacctggccgagggcactctggttattgttgttctgatgccgcctgaacagctcctgcaggacgctcggtcatttctgagggctctcggaacgttgcttcacaccaacttacgcatcaagagagactctcagggggaactgatggtgtatccatactacggagaaaagagtgctgccatgaagaagcagcgaatgaccaggaggtctctccctggagagcaggaacaggaggtagctggaagcaaagtatttctcgaaatcgacaacaggcaatgtgtccaggacagcgatcactgttttaagaatactgacgcagcagctgcacttctcgcgtctcatgctattcaagggacactgtcttaccctcttgtctcggtagtctcagaatccctaacacctgaaagaacccagctcctttacctgctcgcagtggcagttgtgattattctgttcattatcctgttgggggtcatcatggcaaaacgcaagcggaagcacggaagcttgtggctgcccgagggattcactctccgccgtgacgcctctaaccacaagcgcagggaacccgtcgggcaagacgccgtgggcctgaaaaacctgtccgtccaggtgtccgaggcaaaccttattgggactggcacttctgaacactgggtagatgacgaggggcctcagcccaaaaaagtgaaggctgaagacgaggccctgttgtctgaagaggatgaccccatcgaccgacgtccatggactcagcaacacctggaagcagccgacattaggcgaacgccctctttagctttgacccctccccaagccgaacaggaagtggacgtgctggatgtcaacgtgaggggccctgacggatgcacaccattgatgctggccagtctccgaggcggatccagtgatctgtccgacgaggatgaagacgccgaagactccagtgcaaatataataacagatctggtctaccagggtgccagcctgcaggcacaaaccgaccgcacaggagagatggccctgcaccttgccgctagatattcccgggcagacgccgctaaacggttgctcgacgctggggcagatgccaacgcacaagacaatatgggaagatgtccactacacgccgctgtggctgctgacgcccagggcgttttccagatcctcatccgtaatagagtgacggacctggacgcaagaatgaatgatggtaccacaccacttatcctcgccgctcggttagccgttgaaggaatggtcgcagagctgatcaactgccaggccgatgtcaacgccgtcgacgatcatggcaagtctgctctgcattgggccgctgccgtcaacaacgtggaagccaccttattgctgctcaagaatggggcaaatagggacatgcaagataataaggaagaaacacctctcttcctcgctgctcgtgagggatcctatgaagccgctaagatattgctggaccacttcgcgaaccgggatattacagaccacatggacaggctgcccagggatgtagccagagacaggatgcatcacgacatcgtgcgactgttggacgaatacaacgtcaccccgtctccccctggcaccgtgctgacgagcgccctgtctcctgtgatatgtggcccaaaccgtagcttcctgtcactcaaacacacccctatgggaaaaaagtctcggcgaccctcagcaaaatctactatgcccacctccttaccaaatctcgctaaggaagccaaagatgcaaaggggtctcgtagaaagaaatccctttccgaaaaggtccaactgtctgagtcctcggttaccttatcccccgttgatagcttagaaagcccccacacatacgtgagcgatactaccagctcacccatgatcactagcccaggaatattgcaggcttcacctaaccctatgttggctactgccgctcctccagccccagttcacgcgcagcatgcgctgagcttcagcaatcttcacgaaatgcaaccactcgctcatggggcaagcaccgtgctgcctagtgtgtcccaactgctgtcacaccaccatatcgtgtctcctgggtccggatctgctggtagtctgtcccgcctccacccagtgcccgtgccagccgattggatgaataggatggaagtcaacgaaactcagtacaacgaaatgttcggcatggtgctcgcccctgccgagggtacccacccaggcatcgcaccgcagtctaggcctcccgagggtaagcatattactacacctcgagagcctcttccacccattgtgaccttccaattgatccctaaaggttccattgcgcaacccgcaggcgctccccagccccaatctacgtgcccccctgccgttgcaggacctttacccaccatgtatcagattcctgaaatggccaggctcccttccgtagcctttcctactgctatgatgccccaacaggacggtcaggtcgcacaaaccattctacccgcataccaccccttcccagcctcagtggggaaatacccaactccaccatcccaacacagctacgcctcctccaatgcggctgagcggactcctagccacagtggacatctccagggtgagcacccttacttaactccttcccccgagtcaccagatcagtggagttccagctctccccattccgcatcggactggtctgacgtgacaaccagccctacccccggtggagccggaggtggccagcgaggtccgggaactcacatgagcgaaccccctcataataatatgcaggtttatgcatac

SEQ ID NO: 232918 - DNA, 711 bp, synthetic construct
  misc_feature 1..711: note = Description of Artificial Sequence: Synthetic coding sequence
  source 1..711: mol_type = other DNA
atgtgcgtcacttaccataatggaacaggctactgcaaatgtcctgaaggcttcttaggggagtactgccagcatcgcgatccgtgcgaaaagaatcggtgtcagaacggagggacttgcgtggcgcaggccatgcttggcaaagcgacttgtcggtgtgcaagcggcttcaccggagaggactgtcagtattccacttcacatccatgtttcgtgtctcgtccatgtctcaacgggggaacctgccatatgctctcaagggatacttacgagtgtacgtgccaagtgggattcacagggaaagagtgccaatggacagatgcctgcttgtcgcatccttgtgccaacggaagcacatgcactaccgttgctaatcagtttagctgtaaatgcctcacaggcttcacaggccagaagtgtgaaacagatgtgaatgagtgtgatattccaggacactgtcagcacggtggcacgtgtctgaatctcccaggcagctaccaatgccagtgtcctcagggcttcacagggcaatactgtgattcgttgtatgttccttgcgctccaagcccttgcgtcaatggagggacctgtaggcagactggagatttcactttcgagtgtaattgcctgcccgagaccgtgaggcgcggaacagaattatgggagagagatcgtcaagtgtggaacggcaaggagcacgatgaaaattag

SEQ ID NO: 232919 - DNA, 720 bp, synthetic construct
  misc_feature 1..720: note = Description of Artificial Sequence: Synthetic coding sequence
  source 1..720: mol_type = other DNA
tgcagggatggttatgagccatgtgtgaatgaggggatgtgcgtaacttaccataacgggactggctattgcaaatgtcccgaaggctttctgggagagtactgccaacacagagacccatgtgagaaaaaccgctgtcagaatggcggaacatgcgtcgcgcaggctatgctggggaaggccacctgtcgttgcgcttccggatttaccggagaggattgtcaatacagcacttcacacccttgcttcgtatctcgcccttgcctgaacggcggtacatgccacatgctttctcgagatacctacgagtgcacatgccaagtcggcttcactgggaaggaatgtcagtggaccgacgcttgtctgtcgcacccctgtgcaaacggctcaacctgtaccacagtggcaaatcaatttagctgtaagtgtcttaccggattcacaggacaaaaatgtgagacagatgtgaatgagtgtgacatccctgggcactgtcagcatggagggacttgtctgaatctgcctggctcttatcaatgccaatgcccacagggcttcaccggccagtactgcgactctttgtatgttccgtgtgcaccctccccttgtgtaaacggaggcacctgccgccaaaccggcgacttcacgtttgaatgcaattgtctccccgcttgttggcctcggactccagacctgagactcctactgggggaaaagtag

SEQ ID NO: 232920 - DNA, 672 bp, synthetic construct
  misc_feature 1..672: note = Description of Artificial Sequence: Synthetic coding sequence
  source 1..672: mol_type = other DNA
atgtggatttgtccgggaggcggaggtggtgggggtggcggaggcgatcgggaggacgcaagaccacctctgtgctgtggacgttgctggcggagcggatgcgcagcaaggccgccaaggatggtgtcaattggactgaggggcgctgtccgcggagcccgaggatgccatctcgggcgaccttttagtcccagtgtgttactgtgcgtgggcaggcctggctctgctgcgggagccgagcggggacattccctgggctcgcaggaattcgggcatcgccgaggcccattgccctggtgcccagcaaaccgcaggggaagtccaccctctgcaccaagaggcccagggcctctgacacgcctgctgggtagacgggaagccggatctaagagccagaagctgttgtttcgaagcgctagagtccaggggggaggacagttttgtcctagcggaagcgcctttcttggcgtagaaagagagccgactgcgggattgggcggagctgaaaggcgaaatgctagattttggcgcggagaaaggggtcagggcagacaggccaagagacccgcaccctcccagcctgccagccccttacctgggggaggaacttgggccggatgtgtgggtctcgtctggatgggcaccggcttctgcggggctccagagttttag

SEQ ID NO: 232921 - DNA, 2592 bp, synthetic construct
  misc_feature 1..2592: note = Description of Artificial Sequence: Synthetic coding sequence
  source 1..2592: mol_type = other DNA
atgtgcgtcacttaccataatggcacaggttactgcaaatgtccagagggatttctaggggaatattgccagcacagggacccttgtgaaaaaaataggtgtcaaaatggcggtacttgtgttgcccaggccatgctggggaaagccacctgccgatgcgctagcggcttcaccggtgaagattgccagtactccacgtctcatccctgctttgtgtctagaccatgcctgaacggcggtacatgccacatgctgtctagggacacttatgagtgtacctgccaagtggggtttactgggaaggaatgccagtggacagacgcttgtcttagccatccttgcgcaaatgggagcacatgtacgacagtggcaaaccagtttagctgcaaatgcttgaccggcttcaccgggcaaaagtgcgagactgatgtgaacgagtgtgacattcccggacattgccagcacggaggcacctgtcttaatctcccgggatcgtaccagtgtcagtgtccacaaggctttacgggacagtactgtgactccctctacgtgccatgtgcccctagcccatgcgtcaatggcggtacatgccgccagaccggagatttcacattcgaatgtaattgtctacccggatttgaggggagtacgtgcgagcggaatatagacgactgtccgaatcacagatgccagaacgggggtgtttgtgtcgatggtgtcaacacttacaactgccggtgtcctcctcagtggaccggtcagttttgcacggaagacgtggacgagtgcctcctccagcccaacgcctgccagaatggcggaacttgcgccaacaggaacgggggttatgggtgcgtgtgcgtgaacgggtggtcgggcgacgattgctcagaaaatattgatgattgcgcttttgcatcatgtacaccaggcagcacttgcatcgacagagtagcgtcgttctcttgtatgtgtccagagggaaaagctgggctgctgtgtcacctggacgatgcatgcatcagtaatccctgtcataagggagccctctgtgacacaaatccactgaacggccagtatatctgtacatgccctcaggggtataagggcgcagattgcaccgaggacgtggacgagtgcgccatggctaacagtaatccatgtgaacacgctggcaagtgcgtgaataccgatggggcatttcactgcgagtgcctgaagggatacgccggtcccagatgcgagatggacattaatgaatgccattcagatccctgtcaaaacgacgctacctgtctggataagattgggggattcacgtgcctgtgtatgcccggtttcaaaggagtacattgcgaactggaaattaacgaatgtcagtctaatccttgcgttaataatggccaatgtgtggacaaagttaaccgattccaatgcctctgtcctccaggatttactgggccagtttgtcagatcgatatcgatgactgcagtagcacaccatgcctgaacggcgctaagtgcattgatcatccgaacggttatgagtgtcagtgcgctactggcttcaccggcgtgttgtgtgaggaaaacatagacaattgcgacccggatccttgtcaccacggccagtgtcaggacggcatcgactcctatacttgtatttgtaatcctggttacatgggcgctatctgctcagatcaaattgacgaatgctattcatccccttgtctgaacgatggtcggtgtattgatctggtgaacggatatcagtgcaattgccagcccggtacctcaggtgttaattgtgaaattaattttgatgattgcgcaagtaatccatgcatccatggtatttgtatggacggaatcaaccggtacagctgcgtgtgttcccccggtttcaccgggcagagatgcaatattgatatcgatgagtgcgcctccaacccatgtagaaagggggcaacatgtatcaacggagttaacgggttccggtgtatttgccccgaggggcctcatcaccccagctgttattcacaggtgaatgagtgcttgagcaatccatgtatccacggtaactgcaccggtggactctcgggatacaaatgtctgtgtgacgccggttgggttgggatcaactgcgaggtggacaaaaacgagtgtctatctaatccctgccagaatggcggtacctgcgataatttggtaaacgggtatcgctgcacctgcaagaaggggttcaaagggtataactgtcaggtgaacattgacgagtgtgcctctaacccctgtctgaaccagggcacgtgtttcgacgacatttccggttatacttgtcactgtgtcttgccatatactggcggttcttggcgatatcagcaaggacctgaaggcatcctggaccttgctctgagcgtcccagaaagtcagtgtcctgggctgtgggggtgtaatgcccctccacgggctcattcgagtgtagtgttgccagcattcaccgattggattctttcattcgaagagactttgtggcctcccaaaatgcaggtcgtcgatagtcatctgcccaccctgtacttcagcatatag

SEQ ID NO: 232922 - DNA, 6966 bp, synthetic construct
  misc_feature 1..6966: note = Description of Artificial Sequence: Synthetic coding sequence
  source 1..6966: mol_type = other DNA
atgggcccaggcgcacgcggtagacgacgcagacggagacccatgagccctccacctccgccaccccctgtgagggccttgcccctccttctgctgctggctggcccaggcgctgccgcacctccatgcctggacggctctccctgtgccaacggcggtagatgcacccagctgccctcacgcgaggccgcatgcctctgcccacctggctgggtcggggaacggtgtcagctggaggacccatgtcacagcgggccatgtgccggaaggggtgtgtgtcagagctccgtggtcgctggtacagcaaggttctcctgtcgctgcccaaggggcttcaggggccctgactgtagcctgcctgacccatgtctgtcatccccatgcgcccatggcgcacgttgtagcgttggtccagatgggaggttcctgtgctcctgcccccctgggtatcagggaaggtcatgtcgatccgacgtggacgaatgccgggtgggcgagccctgcaggcacggaggcacctgtctgaacaccccaggatccttcaggtgccagtgcccagcaggctacaccggcccactatgtgagaacccagctgtcccctgcgctccttccccttgtcgcaatggagggacctgtcggcagtctggggacttgacatacgattgcgcctgccttcctggatttgagggtcaaaattgtgaggtgaacgtagatgactgccctgggcaccgatgtctgaacgggggaacatgtgtggacggcgtgaacacatacaattgccaatgcccccctgagtggacagggcagttctgcacggaggacgtggacgaatgtcagctccagcccaacgcatgtcataatggcggtacctgtttcaataccctgggcggacactcctgtgtatgcgtgaacgggtggacaggagagtcctgtagtcagaatatcgatgactgtgcaactgcagtgtgctttcatggagctacctgtcatgatcgagtcgcatctttctactgcgcttgtcctatgggcaagacagggttgctgtgtcatctggacgatgcttgtgttagcaatccatgtcacgaggatgcgatttgtgacaccaatcccgtgaacggccgtgcaatctgtacttgcccacccggttttacgggcggagcatgtgaccaggatgtagatgaatgcagcatcggcgctaatccctgcgagcatctcggccgatgcgtgaatacccagggaagcttcctttgtcaatgtgggcgaggctacaccgggcctcgctgtgagacagacgtgaacgaatgtctctccggcccttgtcgaaaccaggccacttgtctggataggatcggtcagtttacatgtatctgcatggctgggtttactggcacctactgtgaggtggacattgatgagtgccagtccagtccttgcgtgaatggcggtgtgtgcaaggacagggttaacgggtttagctgtacctgtcccagcgggttttctggttccacctgccagctagatgtggatgagtgtgcctcaacaccctgtagaaatggcgcaaaatgcgtcgatcagcctgatggctacgagtgccgttgtgcagaaggctttgagggtacactctgtgaccgcaatgtcgacgactgttccccggatccctgccaccatggacggtgcgtagacggaattgccagtttcagctgtgcctgtgccccaggttatactgggaccagatgcgagtcacaggtggacgagtgtcggagccagccatgccgtcacggtggtaaatgtctggacttggttgataagtacttgtgccgctgtccatccgggaccaccggggtgaactgtgaggtgaacatcgacgactgtgccagcaatccatgcacctttggagtgtgcagagatggaatcaaccgctatgattgcgtctgtcagcctgggtttactggtcctctatgtaatgtagagatcaatgagtgcgcatcctcgccttgcggcgagggaggatcatgtgttgatggcgagaatgggtttagatgtctgtgcccccctggctccctgcctcctctttgccttcccccatctcatccctgtgcccatgagccttgcagccacggcatttgctacgacgccccagggggatttaggtgcgtatgcgagccagggtggagcggccctcgctgctcccagtcactggctcgtgacgcttgcgaatcacagccatgccgagctggagggacttgctccagcgacggaatgggattccattgcacatgcccaccgggagtccaaggtcgacagtgtgagctcctgtcaccttgtactccaaacccgtgtgaacatggcggacgatgcgagtccgcgcctggacagctaccagtgtgtagctgtccccaggggtggcagggcccaaggtgtcagcaagacgtggatgagtgtgccggacccgctccttgtgggccacatggaatatgtaccaacctggctggcagctttagctgcacttgtcatggcggatacacaggaccgtcttgtgaccaggacatcaatgattgcgatcccaacccttgtctgaatggaggcagctgccaggacggtgtgggatcttttagctgcagctgccttccgggatttgccggtccgcgttgtgccagggatgttgacgaatgcttatctaacccttgcggacccggaacctgtacagatcacgtcgctagtttcacctgtacttgcccgcctggatatggcggattccattgtgagcaggacctgcctgattgcagtccctcctcctgtttcaatggaggaacctgtgtggatggggtgaatagcttctcttgtctgtgcaggcccggttatacaggcgctcattgccagcatgaggccgacccttgcttatcacggccatgtcttcatgggggtgtgtgcagcgccgctcaccccggatttcggtgcacatgtctggagtcattcaccggccctcagtgccagaccctcgtggattggtgctcaaggcaaccgtgccagaatggtggtaggtgcgtgcaaaccggggcttactgtctgtgccctcccggttggtctgggaggttatgcgatattcgctctctgccttgtagagaagccgctgcacaaataggggtccggctcgagcaattgtgccaggccggaggccagtgtgtcgatgaggatagctcccattactgcgtgtgcccagagggacgtactggttcccactgtgaacaggaggtggatccctgtctggcccagccctgtcagcatggcggaacttgccgcggttatatgggtgggtatatgtgcgagtgcctgcccggatacaacggggacaactgtgaggatgatgttgacgaatgcgcttctcaaccctgtcagcatggtgggtcttgcatcgaccttgtggcacgctatctctgttcatgtcctcctggaaccttgggcgtcctgtgtgagattaatgaagatgattgcggacctgggccaccgctggatagtggccctaggtgtttgcataatggaacctgcgtggacctcgtcggtggctttcgctgtacctgcccacccggatacacagggctacgctgcgaagcagatataaatgagtgcaggagcggcgcatgtcacgcggcacatacccgcgattgcttgcaggatcccggtgggggattccggtgtctctgccatgccggatttagtggaccgcgttgccagaccgttctctccccttgcgagagtcagccctgtcaacatggcggtcagtgtagacctagccctggcccaggcggaggcctgacattcacttgccactgtgcgcagccattttgggggcctcggtgcgagagagtggccagatcttgtcgggaacttcaatgccccgtcggagtgccttgtcaacaaaccccaagaggccctaggtgcgcttgtccccctggcttatccggacccagctgtcgcagcttccctggaagcccgcctggggcatccaacgccagttgcgccgcagccccttgcttgcacggaggttcatgccgcccagcacctctggcacccttcttcagatgtgcctgcgcccagggatggactggacctagatgcgaggcccctgctgccgcaccagaagtcagcgaagagccgagatgtcccagggccgcttgccaggcgaaacggggtgaccagaggtgtgaccgagagtgcaatagccccggatgtggctgggatggtggggattgtagccttagcgtgggagatccctggcgtcaatgtgaggcccttcagtgctggcgcctctttaacaacagtcgttgcgacccagcatgcagttcacctgcctgcctttacgataattttgattgccatgcaggtggccgtgaacggacatgcaatcccgtgtacgagaaatattgtgcagatcacttcgcagacggacgatgtgatcagggatgcaacactgaagagtgcggctgggacggcttggattgtgcctccgaggtgccagccctgctggcgaggggcgtgttggttcttacagtactcctgccacccgaggagctcctgcgttccagtgcggatttcctgcagcggctgagcgcaatcctcagaaccagcctccgttttagacttgacgcccatggtcaggctatggtttttccctatcatcggccaagccccggttctgaaccaagggccagaagagaactggcccctgaagtgataggcagcgtggtgatgctcgagattgataataggttatgtctacagtcaccggagaatgatcactgtttcccggatgctcagagcgccgcagactacctcggcgctctgtcagcggtcgagagactggactttccttatccattacgcgatgtgaggggtgagcctctcgaaccgcctgagccatcagttccactgcttcctttgttggttgccggagctgtgcttctgttagtgatactggtgctcggggtgatggtcgctagaagaaagagagaacatagcacattgtggttcccggaagggttctctttgcacaaggatgtcgcctccggacataaaggccgaagggaaccagtgggccaggatgccctgggaatgaagaatatggctaagggggagtcactcatgggtgaggtagctacggactggatggacaccgagtgtcccgaggcaaagcgcctcaaagtggaagaaccaggcatgggagctgaagaagctgtggattgccgccagtggacccagcaccacttggtggccgctgacattagggttgcgccagccatggccctaacccccccacagggcgatgctgacgccgacggtatggatgtaaacgtccggggtccagacggtttcacacctctgatgttagcttcattttgcggaggagccctggaacctatgcccactgaagaggacgaagctgacgacacttctgccagtataatctcagacctcatttgccagggagcccaactcggcgctagaaccgaccgcacaggagagactgccctgcatctggccgctcggtatgcaagggcggatgcggcaaagaggctgctggacgcaggagcggatactaacgcccaggatcactctggccgaaccccgctacatactgccgttacggcggacgcccagggagtctttcagatcttgattaggaatagatcgaccgatctggacgccaggatggccgatggttccacagcattaatcctggccgctcgtctggccgttgaaggaatggttgaggaactgatagccagccatgcagacgtcaacgctgtcgacgagctgggcaagagcgctctccactgggcagctgctgtgaacaatgtggaagccaccctggcccttctcaaaaacggagcgaataaagacatgcaagattctaaggaagaaactcctctttttttggccgcacgagaggggtcctacgaagccgctaagttattactagatcattttgcgaaccgagaaatcacagaccacctggatagactccctcgcgacgtggcccaggaaagactccaccaagatatcgtccgcctgttggatcaaccaagtgggcctcgtagccctccagggcctcatgggctgggaccactgctctgtccaccaggggctttcctccccggattgaaggccgcacagtctggttcaaaaaagagtaggcgtcctccagggaaagcaggactcggcccacaaggacccagaggacgcggaaagaagctgaccctggcgtgccccggtcccctcgctgactctagcgttactttgagcccagttgattccctggatagccctcgtccttttgggggacctcccgcatctcccggagggttccccttagaaggaccatacgcagccgcaaccgcaactgcagtttctctggcccagctgggagggcctggcagggctggactcggcagacagccacccggaggatgcgtacttagcctggggttgctcaaccccgtcgccgtgccactggattgggctcgactccctcccccagccccacctgggcctagctttctgctgcccctcgccccaggcccacaacttttgaatcccggtacaccggtttctccacaggagaggcctcctccctatttggccgtccccggtcatggagaggagtacccagccgcaggggcacattcaagccctcctaaggcaaggttcctgcgcgtgccgagcgaacacccctacctgacacctagccctgaatctcctgaacattgggcgtcaccctctccaccaagtctgtccgactggtcggagagtacaccatccccagcaactgccactggtgcgatggccaccaccactggggctctcccggctcaacctcttccccttagtgtgccatctagtttggcccaggctcagactcaactcggcccacagccagaagtgacaccgaagcggcaggtgctggcatag

SEQ ID NO: 232923 - DNA, 3867 bp, synthetic construct
  misc_feature 1..3867: note = Description of Artificial Sequence: Synthetic coding sequence
  source 1..3867: mol_type = other DNA
gccgctatgggacccggtgccaggggaaggcgcaggcgtaggcgacccatgtcacctcctccaccgccaccccctgtccgggctctccctttgcttctgctgctcgccggaccgggagccgcagctcctccatgcctagatggatccccctgcgctaacgggggaaggtgcacacagcttccttctcgggaagctgcttgcctctgcccaccagggtgggtgggcgaacgctgccagcttgaggatccctgccatagcggaccttgtgccggtcgcggagtgtgtcagagtagcgtggtcgccggaacagctagattcagttgccgctgccccagaggttttagaggacctgactgttcccttcccgacccctgcctgagctcaccatgcgcgcatggcgctcggtgctcagtcggacccgacgggagattcttgtgctcttgcccaccaggctatcaaggtcgctcgtgccgatctgacgttgatgaatgcagagtcggagagccctgtcgacacggcggaacatgcctaaacacacccggatccttcaggtgtcagtgtcctgctggctatacagggcctctctgcgagaatcccgctgttccctgcgcaccttctccttgtcgtaatggaggaacgtgtcggcaatcaggagatttgacatacgactgcgcctgtctgccgggtttcgaaggccagaactgtgaagtcaacgtggatgactgcccaggtcatcgctgcctaaatgggggaacatgcgtggatggagtgaacacttacaactgccagtgtcctcctgaatggaccggacagttctgcacagaagacgtggatgagtgtcagttgcaacccaacgcatgccataatgggggtacctgctttaacaccctcggtggtcatagctgcgtctgcgtgaatggatggaccggagaatcctgtagccagaacattgatgattgcgcaaccgccgtgtgttttcatggcgcaacctgtcacgatagagtcgcctctttttactgtgcgtgccccatgggcaaaactgggttgctgtgccacttagacgacgcctgtgtgagcaacccttgccacgaagacgccatctgcgacaccaaccccgtcaacggtagggctatttgcacctgcccccctggatttacagggggtgcctgcgaccaggatgtggacgagtgttccataggggcaaacccttgcgagcacttgggccgatgcgttaacacccagggcagtttcctgtgccagtgtggtcgaggctacacgggacctcgatgtgaaactgacgtgaatgagtgcctgtctggaccatgcagaaaccaggccacctgtctcgatcgtattggtcaatttacatgtatttgtatggcgggattcaccggtacttactgcgaggtcgatatcgacgaatgtcagtctagcccatgcgtaaacggcggagtctgtaaggatagggtcaacggattttcatgtacgtgtccctccggcttctcggggtctacctgtcagctcgatgttgatgaatgcgctagtactccgtgtagaaacggcgctaaatgtgtcgaccaacctgatggctatgaatgtcggtgtgcagaaggttttgaagggacgctgtgtgaccggaatgtggatgactgcagccccgacccctgccaccatgggagatgcgtagacggaatcgcttcattttcatgtgcttgtgctcccggatatacgggcactcggtgcgagtcccaagtggacgaatgccggagccaaccctgtagacacgggggaaaatgtctcgacctcgtcgacaaatacctctgccggtgcccaagcggtactacaggagttaactgcgaggtgaatattgacgattgcgcctcaaacccttgtacttttggtgtgtgtcgcgatggaattaacagatatgattgtgtatgccagcccggattcactggtcccttgtgtaatgtcgagatcaatgaatgcgcgtcctcaccgtgtggagagggaggatcttgtgtggacggggaaaatggctttagatgcttgtgtcccccaggctctttacctcccctgtgcctgccacccagccatccttgcgctcatgaaccatgctcccatgggatatgttacgacgccccaggcggatttcgctgcgtatgcgagcccggttggagcggccctcgatgctctcagagcctcgctcgtgatgcatgtgagtctcagccttgtcgcgcaggaggaacctgttcatccgatggcatggggttccattgcacctgtcctcccggagttcagggaaggcagtgcgagctcctctcgccatgcactccgaacccatgcgaacacgggggtcgttgcgaaagtgcgccaggtcagttgcctgtttgtagctgccctcaaggatggcaggacccctgcctcaacggaggcagctgccaggacggggtggggtctttttcatgttcgtgcctccccggatttgcgggtccaagatgcgcacgagacgtagacgaatgtctgtcgaatccgtgcggaccgggtacatgcactgatcatgttgcatcttttacttgtacatgtccacccggatacggcggtttccattgcgaacaagatctgccagactgctcccctagttcttgtttcaatggaggcacttgtgtggatggggtcaattccttcagctgcctctgccgcccaggttataccggcgctcattgtcagcacgaggctgatccctgcctgtctcggccatgtcttcacgggggtgtctgctccgccgcacatcctggatttaggtgcacctgtctggaaagtttcactggccctcaatgtcagacattggtcgactggtgttctagacaaccttgccagaacggcggaaggtgtgtacaaactggcgcttactgtctctgcccccctgggtggagcgggagattatgtgatatccgctcactgccgtgtagagaggccgctgcccagatcggcgtgcgtttggagcagctgtgccaggccggtgggcaatgcgtcgatgaagacagcagtcactactgtgtgtgccccgaggggcgtacaggctcacattgtgaacaagaagtagatccttgcctcgcacagccctgtcaacacgggggtacatgcagaggctatatgggcggatatatgtgcgaatgtctgccagggtacaacggggacaattgtgaagacgatgtcgatgagtgcgcatcacaaccatgccagcatggcggatcctgtattgatttagtggcacgctatttatgttcatgtccacccggaaccctgggtgtcctctgtgaaattaacgaagacgattgtggtcccggtcctcccctcgattccggccctaggtgcctccataatggaacatgcgtcgacctggttggcggtttccgttgtacatgccccccaggctataccggcttaaggtgcgaagctgacatcaacgaatgccgaagtggagcctgtcacgccgcacacacaagagattgtctgcaggatcccggaggtgggtttagatgcctgtgccacgcagggtttagtggccctcgctgtcagacagtgctttccccatgtgaatcccagccttgtcagcacgggggacagtgtcgccctagccctgggccaggcggagggctcacatttacttgccactgcgcacagcctttctggggcccacggtgtgaacgagtagctagatcctgtcgggaattgcagtgcccagttggggtcccctgtcagcaaaccccgcgaggccctaggtgcgcctgccccccaggactgtccgggccttcttgccggtcattcccgggatcccctcccggagcatctaacgcctcttag

SEQ ID NO: 232924 - DNA, 6011 bp, synthetic construct
  misc_feature 1..6011: note = Description of Artificial Sequence: Synthetic coding sequence
  source 1..6011: mol_type = other DNA
atgcagcctccatcgctgctcctgctgcttctgcttcttctgctgctgtgtgtgtctgtcgtgagacccaggggccttctgtgcgggtctttccccgaaccctgcgctaacgggggaacatgtctatcgttatccctgggccagggcacttgtcagtgcgcccctggctttctgggagaaacgtgccagtttcccgatccctgtcagaacgctcagctttgccagaacggtggcagttgtcaggcactccttcccgcacctttgggtcttccttccagtccttctccgctgaccccgagcttcctgtgcacgtgcctccccggattcactggcgaacgatgccaggctaaacttgaggacccatgtccaccatcattttgttctaaaagggggcgatgtcacatacaggccagcggcaggccccagtgctcctgtatgcctgggtggaccggcgaacaatgccagctgcgggacttttgcagtgccaacccatgcgtgaacggaggtgtgtgtctggcgacttaccctcagatccagtgccattgtcccccaggatttgagggccatgcctgtgaacgggatgtgaatgaatgttttcaagatcccggaccttgccctaaggggacctcatgtcataacacccttggttctttccaatgcctctgtcccgtgggccaggaagggcctagatgcgagctgcgtgcaggcccttgccctcccagggggtgttcaaatgggggtacgtgccagctcatgccggagaaagattccacattccatctctgtctttgcccgcctggatttatcggacccgattgcgaagtgaaccctgataattgcgtatcccaccagtgtcagaacgggggtacttgtcaggacggcctggatacttacacttgcctgtgtccagaaacctggaccggatgggactgctctgaagacgtggacgagtgcgaaacacaggggcctcctcactgccgaaatgggggtacctgccagaatagcgctggctctttccactgcgtgtgcgtgtctggatggggaggtacgtcttgtgaagaaaacctggacgactgcatcgcagccacctgcgccccaggttcaacttgcatcgatcgagtcggcagcttcagctgtctatgtccgcctggcagaaccgggcttctgtgccatctggaggacatgtgcctgtcacagccctgtcatggcgatgcccagtgctctaccaaccctctgactggaagcaccctctgcttgtgccagccgggttacagtggacctacatgtcaccaggaccttgacgagtgtctgatggctcaacagggaccatcgccctgcgagcacggcggaagttgtttaaacacacctgggtccttcaactgcctttgcccacctggatatacaggcagcagatgcgaagccgatcacaacgagtgtctaagtcagccatgtcacccaggcagtacatgccttgacctgctagccacgttccactgcctctgcccacccggattggagggacagctatgcgaggtcgaaaccaacgaatgcgcctccgcaccttgcctgaaccacgccgactgtcatgacttgctgaacggctttcagtgcatctgtctccctggtttctcaggcactagatgcgaggaggacattgatgaatgccggagctccccttgtgccaacggaggacaatgccaggatcagcccggtgcgttccactgcaagtgtctacccggtttcgagggacctcgatgtcagacagaagtggacgagtgcttaagtgacccttgccctgtcggcgcttcttgcctcgatctccctggtgccttcttttgtttatgcccgtccggctttaccggtcagctgtgtgaagtgccactgtgtgctcccaatctgtgccagcctaagcagatctgcaaggaccagaaggacaaggcaaactgcctctgcccagacggaagccccggttgcgcccctccagaggataattgtacctgccaccatggccactgccaacgatccagttgtgtctgcgacgtaggttggaccggaccagagtgtgaggccgaacttggcggatgtataagcgccccttgtgcccatggcggtacgtgttacccccagccatccggttataattgcacctgtcctacgggttacacagggcctacgtgttcagaagagatgaccgcatgccactctgggccttgcctgaacggaggttcctgtaacccatcccctggtggctactactgcacttgtcccccttcccacactggccctcaatgccagaccagtacagactactgcgtaagcgcaccatgctttaacggcggaacatgtgtgaaccggcctggcaccttctcctgcctgtgcgcaatgggattccagggccctagatgtgaggggaaactgcgaccaagttgcgcggactccccctgcagaaaccgagccacttgccaggattccccacagggaccgaggtgcttatgtcccacaggctacactgggggatcttgccaaaccctgatggatttatgcgcacaaaagccgtgcccaagaaatagtcattgcctgcagacaggcccatcctttcactgtttatgcctccaaggctggacgggaccactctgcaacctgcctctgtcatcctgtcagaaagccgcattgagccagggcattgacgtcagtagcctgtgtcacaatgggggactgtgcgtggattctggtccgtcctacttttgccactgtccgcctggatttcagggaagcctgtgtcaggaccacgtcaatccttgcgagtcaagaccatgccagaatggagccacatgtatggcccagccgtccggttatctgtgccagtgcgctcccggatacgacggccagaattgtagtaaagagcttgacgcctgccagagccagccctgtcataatcacgggacatgtacaccgaaacccggaggctttcattgcgcctgcccaccaggattcgtgggtctgaggtgcgagggcgatgtggatgaatgcctggatcagccttgccatcctacagggacagctgcctgccacagcctggccaatgctttctactgtcagtgtctgccgggacataccggacagtggtgcgaggtggagattgacccatgccacagtcaaccatgcttccatggaggcacttgcgaggccactgccggttctccactgggctttatctgccactgcccaaagggcttcgagggaccaacatgttcccaccgcgcaccgtcctgtggtttccatcactgccatcacgggggactgtgtctaccctcccccaaacccggattccccccaaggtgtgcttgcctctccggctacggcggaccagactgtctgacacctccagcaccaaaaggctgtgggcctccctctccttgtctctacaatgggagctgcagtgagaccaccggactgggcggtcccggattccggtgtagctgtcctcatagctcgccaggccctaggtgccagaaaccaggtgctaaagggtgtgagggcaggtcaggcgatggcgcttgcgacgcaggctgttcaggccctggaggcaactgggacgggggtgactgctccctgggagtaccagacccgtggaaaggctgtccttctcacagtcgctgctggctgctgtttagggatggccaatgccatcctcaatgcgactcagaagagtgcttatttgatggatacgattgcgaaacacccccagcctgtaccccggcttatgaccagtattgtcacgaccactttcacaacggacactgcgagaaagggtgtaacactgctgagtgcgggtgggatggcggagattgcagacctgaagatggcgaccctgagtggggcccttctcttgccctactcgtggttttgtcaccacccgcactggaccaacagctgtttgcattagcgagagttctttccctcaccctgcgagtgggattgtgggtccggaaagatcgcgacggacgggacatggtgtacccttaccccggagccagagctgaggaaaaactggggggtacccgcgaccccacctatcaagagcgggcagctccccagactcagcccctcggtaaggagaccgattctctgtccgcaggctttgtggtcgtaatgggcgtcgatttgtcacgctgcggacccgaccaccccgcaagccgatgtccatgggatcccggactgttgcttcggttcttggccgctatggccgctgtgggggcactggaacctttattgcccggaccactgctcgccgtgcatccacatgccggtactgccccacccgcaaaccaactaccctggccagtgctgtgtagcccagtggccggtgttatcctcctggcgttaggcgctctactggttcttcagttgatcagaagaaggcggcgagaacatggggctctctggttgcctccaggatttaccaggcgcccaaggacccagtccgctccccacagaagacgccctccccttggcgaggattccattgggctcaaagcgctgaaaccaaaagcagaagtggacgaagacggggtggtgatgtgtagtggtcctgaagagggggaagaggttggccaggctgaagagactggacccccatccacctgccaactgtggtcactgagcggtgggtgcggagcccttccacaggccgcaatgctgacaccccctcaggagtccgaaatggaagcccctgacctggatactaggggaccggacggggttacacctcttatgtccgctgtttgctgcggcgaggtccaatccgggacttttcagggagcttggctcggctgtcctgagccttgggaaccactcctcgacggaggcgcttgtccccaagcccatacagtgggtaccggcgagacacctttgcatctggctgccagattctcccgcccaactgccgcacggaggctgttagaagccggagcaaatccaaatcagccagacagggccggaaggacccccctccatgctgccgtggctgctgacgctagggaggtgtgccaactgctgctgaggtctcgtcagaccgccgttgatgcgagaacagaggatggcacgacaccgctgatgctggcggcacgcctggccgtcgaagatcttgtggaggagcttatagccgctcaggccgacgttggggcaagagacaagtggggcaagactgcactccattgggccgcagccgtgaataacgctcgggctgctcgatccctgctgcaggcgggagccgataaagatgcccaggataatcgggaacagacacccctgtttctggccgcacgcgagggcgcagtggaggtcgcacaactccttcttgggctgggagctgcaagagagctgcgcgatcaggctggcctcgcccctgcagatgtggcccaccagcgtaaccattgggatctactgacccttctggagggggcaggccctcccgaggccaggcacaaagctacgcctggccgagaagctggaccctttccacgggcacggaccgtgagtgtgtctgtgcctccacatggtggaggggcactacctcgatgcaggacacttagtgcaggggctggcccaagaggaggtggagcctgcctgcaggctcggacttggagcgtggacctggctgctcgagggggtggtgcttattcacactgtcggagcctgtccggagtaggcgctgggggtggcccaacccctagggggcgacgttttagtgcgggtatgcgaggaccaagacctaatccagctattatgcggggtcgctatggggtcgcggctggcagggggggtcgagtcagtactgatgactggccctgtgactgggtggcgctcggagcttgcgggtcagcctccaacatcccaatcccacccccttgtctcactccatcaccagagcgaggaagccctcagctggattgcggacctcctgcccttcaggagatgcctatcaaccagggtggtgagggaaaaaagta

SEQ ID NO: 232925 - DNA, 3147 bp, synthetic construct
  misc_feature 1..3147: note = Description of Artificial Sequence: Synthetic coding sequence
  source 1..3147: mol_type = other DNA
tgcgcacctgggtacgatgggcaaaattgctccaaggagctggatgcatgccaaagccaaccctgtcataatcacggaacatgcacccccaaaccaggtggatttcattgcgcgtgtccgcctggcttcgttgggctgcggtgtgaaggggacgtggatgagtgcctggaccagccctgtcatcccaccggcacagcagcatgccatagccttgctaatgctttttattgccagtgccttccagggcacaccggacaatggtgtgaagtcgaaatagacccctgccacagtcagccgtgttttcacggtggcacctgcgaagcaactgctggatctcctcttggctttatatgccattgtcccaagggattcgaagggcctacctgcagtcaccgtgctcccagctgtgggttccaccactgccaccatggaggtttgtgtctgccatcccccaaacctgggttcccccctcggtgcgcctgtctgtccggatacgggggacccgattgtctgaccccacctgctcctaagggttgcggcccaccctcgccctgcctgtacaatgggagctgtagcgagaccaccggcttggggggaccaggctttcggtgttcttgtccccatagcagccccggtccaagatgtcagaaaccgggtgcgaagggatgcgaggggagaagtggggatggtgcatgtgacgccggatgtagtgggcctggcggtaattgggatggaggcgattgtagtcttggagtgcccgatccttggaagggctgtccatctcatagtcgctgttggctgctgttcagggacggccagtgccatccgcagtgcgattccgaggaatgcctctttgacggctacgattgtgagacaccccctgcatgcaccccagcatatgatcagtactgccacgaccacttccacaacgggcattgcgagaagggctgcaatacggccgagtgtggttgggacggtggagactgtagacccgaagacggggatccagagtggggcccatcactggctttattagtagtgctgagtccaccagccctggatcagcagctgtttgcactggccagggtcttgtccctaacactccgggtcggcctgtgggttcgcaaggaccgggatggcagggatatggtgtatccataccctggcgctagagcagaggagaagcttggcggtacccgcgaccctacgtaccaagaacgggctgctccgcagactcaacctctcgggaaagagaccgactccctatcagctggatttgtggtggtgatgggagtagacctgagccgctgcggtcctgatcaccctgccagtcgctgcccgtgggatccaggacttctgctgcggttccttgctgcaatggcggcagtcggggctctcgaaccactcctccctggaccattactggccgtgcatcctcacgccggaacggcccctcccgctaaccagttaccatggcctgtactttgttccccagtggccggagtgatattgctcgctctgggcgcactccttgtgttgcagttgatcaggcgccgacggcgtgaacacggggctctctggttgccacctggatttaccagacgacctcggacgcaaagtgccccacatagacgtcgccctcccctaggggaggatagcatcggtttgaaagctcttaaaccaaaggcggaggtggatgaggatggcgtcgtaatgtgcagcggccctgaggagggagaagaggtgggacaagccgaagaaactggaccgccttccacttgtcagctctggagcctctcaggagggtgcggggctctgccacaggctgcgatgcttacaccccctcaggagtcagaaatggaggcacctgatctcgatactcgaggccctgacggcgtcacgcctctcatgtccgccgtctgttgcggcgaagtccagtctggcactttccaaggcgcttggttaggttgcccagagccgtgggagcctctgttggacggcggtgcctgcccccaggcacacactgtcggcactggtgagacccctcttcatctcgctgcgagattcagcagaccaacagccgcaagaaggctcctggaggccggtgcaaaccctaaccagccggaccgcgcaggtagaactccattgcatgcagccgtcgctgcggatgctagggaagtgtgccaactgttgctgcgaagccggcagactgctgttgacgcgagaactgaagacggaaccacaccattaatgctggccgctaggctcgccgtcgaggacctcgtggaggaactgatcgccgcacaagccgatgtaggcgcaagggataagtggggcaagactgcgcttcattgggccgcagcagtgaacaacgcgagggcggctaggagcctgctgcaagctggggcagataaggatgcacaggataaccgggaacagacacctctgttcctcgccgctcgcgagggagcagttgaggtggcgcagctgctgctagggctcggagctgcaagggaattgcgggaccaagccggactggctccagcggacgtggctcaccagaggaaccactgggatttgctgaccttgttagaaggagcaggcccacctgaagctcggcataaggcgacgcctgggagggaagctggccctttccctcgcgctcggacggtgtccgtgagcgtcccccctcatggcggaggagccctgcccaggtgtaggacactaagcgccggtgcgggaccccgtgggggaggagcctgtctacaggctagaacctggtctgtcgacctagccgctagaggtggcggagcatactctcattgccgcagtctgtcaggggtgggagcgggaggtggccctacccccaggggtagaagatttagtgccggaatgcggggaccaaggcccaatcctgcaattatgagaggcagatacggtgtcgctgccggtaggggtggccgagtgagcacagatgattggccctgcgactgggtggccttgggcgcatgtgggtcagcatccaatattccgatacccccaccatgcctaacccccagccctgagcgcggaagtccacaactggattgtggccctcctgccctacaggaaatgcctatcaaccagggtggagaaggcaagaagtag

SEQ ID NO: 232926 - DNA, 6017 bp, synthetic construct
  misc_feature 1..6017: note = Description of Artificial Sequence: Synthetic coding sequence
  source 1..6017: mol_type = other DNA
atgcagccccctagccttctcttacttctcttattgctcctgctcctcttattgtgtgtgagcgtagttcggcctagaggcctgctgtgtggcagtttccccgagccatgtgctaacggcggtacctgcctttctttatctctcggacaggggacctgccaatgtgcgcctggcttcctgggcgagacgtgtcagtttcctgacccctgtcagaatgctcagctttgccagaacggcggaagctgtcaggcactcctgcctgcacccctgggcttgccatcctcgccgagccccctgacacccagtttcctctgtacttgcctgcccggtttcactggtgagcgctgtcaagcccaactggaggacccttgccccccttctttctgctctaagaggggcaggtgtcacatacaggcatctgggcgaccccagtgttcctgtatgcctgggtggacaggagagcagtgccagcttagagacttttgcagtgccaacccctgcgtgaacggcggtgtatgcctcgctacgtatcctcagatccagtgccattgtccgcctgggttcgaggggcatgcgtgtgagcgcgacgttaacgagtgcttccaggatccagggccttgtccgaaaggcactagttgtcacaacacactgggaagcttccagtgtctatgcccagtgggccaggaaggaccgcgttgcgagctccgagcagggccttgcccaccaaggggctgctcgaatgggggaacttgccagctgatgcccgagaaagattccacgtttcacctgtgtctgtgcccacccggattcatcggcccagactgtgaggtgaaccctgataattgtgtgtcacaccagtgccaaaatggcggtacttgccaagacggactggatacatacacatgtttatgtcccgagacgtggacaggttgggattgtagcgaggacgtggatgagtgtgaggctcaggggcctcctcattgtcgcaacggaggcacctgccagaattcggctggaagctttcactgtgtctgtgtctctggatggggaggcacctcatgcgaagagaatttagacgactgcatagccgctacatgcgctccgggatcgacctgcatcgacagagtaggctcctttagttgtttgtgcccaccaggacgtaccggactactgtgccacctggaagatatgtgtctgagccagccctgtcatggagatgcccagtgttcaacgaatcccttgactgggagcaccctctgtctgtgtcagcctggatattctggccctacctgccaccaggacctcgatgagtgcctcatggcccagcagggaccttccccgtgcgagcatgggggatcttgccttaacacccctggttcatttaattgcctctgccctcctgggtataccggatctcgttgtgaagcagatcataatgagtgcctctcacagccgtgccaccccggtagcacatgcctggacctcctggccacttttcactgtctgtgccccccaggtctagaaggccagctgtgtgaagtcgaaacgaatgagtgcgcgagcgctccatgtctcaaccacgccgactgccacgacttactgaacggtttccaatgcatttgtttgcccggattctcaggtactaggtgtgaggaagatatcgacgagtgccgctcgagcccgtgcgccaatgggggtcagtgccaggaccaacccggtgccttccactgtaaatgcctgccagggtttgagggcccacgttgccagacggaggtggacgagtgtcttagcgatccctgccccgtgggcgcatcctgtctggatctcccaggcgcttttttctgcttgtgccccagcggctttacaggtcagctgtgcgaggtacccctctgcgctcccaacctgtgtcagcccaaacagatttgtaaggaccagaaggacaaagcaaactgcttatgccccgacggttcccctgggtgcgcgcctccggaggacaattgtacatgccatcatgggcactgccagcgctcgtcctgcgtttgcgatgtgggctggaccggccctgagtgtgaagccgagctgggaggttgtatcagcgctccttgtgctcacggtgggacttgttatccccagcccagcggctacaactgcacctgccccaccggatatacggggccaacgtgctcagaggaaatgacagcttgtcactccggcccttgtctgaacggcggaagctgcaaccccagtcccggaggttattactgcacatgcccgccaagccacacggggccacagtgccaaacaagcaccgattattgcgtcagtgcaccatgctttaatgggggaacctgcgtgaaccgacccggaaccttctcttgcctgtgcgcaatggggttccagggacctcggtgcgaaggcaagctgagaccatcctgcgctgattctccgtgcaggaacagagccacctgccaggactcaccacaaggacccagatgtctttgccccacaggttatactgggggttcctgccagaccctgatggacctttgcgctcagaagccatgccctcgcaacagccattgcctgcagaccgggcctagtttccactgtttatgtctgcagggttggacaggtcccctttgcaatctgcctctatcatcatgtcaaaaagccgcactgagccaggggatagacgtttcttctctgtgtcacaatggcggactctgcgttgactccgggccttcctacttctgtcactgccctcctggcttccagggctccctgtgtcaggaccacgtaaatccctgtgaaagccggccttgccagaatggagccacgtgtatggctcagccaagtggttacctttgccagtgtgcccctggctatgatggccagaattgctccaaggagcttgacgcttgtcagagccagccatgtcacaatcacggcacctgcacacccaaaccagggggatttcactgtgcctgtccccctggttttgttggccttagatgtgagggcgacgtcgatgagtgcctcgatcagccctgccaccctactgggacagcggcttgtcattcactggcaaacgccttctattgccagtgcctgcccggacacacgggccagtggtgtgaggtggaaatcgatccttgccactctcagccttgttttcatggaggaacatgcgaggccacggccggttctcctctggggtttatctgtcactgccccaaagggtttgagggccctacatgctcgcaccgtgcaccttcctgtgggtttcatcactgccaccacggcggtctgtgtttgcctagtcctaaaccaggctttccccctcgctgtgcatgtctgagtggatatggcggaccagattgtctgactccaccagcccctaaaggctgtgggccacctagcccctgtttgtacaacgggtcatgctctgaaaccactggccttggcggtcctggattccgatgttcatgccctcactcctcacctggccctagatgtcagaagcccggagcaaaaggctgtgaaggaagatctggtgatggcgcatgcgacgctggatgctccggacccggaggcaattgggacggtggtgactgctctctcggggtgccggacccttggaagggatgtccgtcccactctaggtgctggctgctgtttagagatgggcaatgtcacccccagtgcgacagcgaagagtgcttgtttgacgggtatgattgtgagaccccccctgcatgtacaccagcttacgaccagtattgccacgatcattttcacaacggccattgtgaaaaaggctgcaacacagctgagtgcggctgggatggcggagactgtaggcccgaggatggagatcccgagtgggggccttcactcgctctcctggtggtgctgtccccgccagctctggaccaacagttattcgctttagcaagagtgctgagtcttacactgcgggtcgggctctgggtaaggaaggatcgggacggcagggacatggtgtatccctatcccggtgctcgggctgaagagaaactcgggggaactcgcgaccctacatatcaggagagagcagcacctcaaacccagcctttagggaaggaaactgattccctttccgccggattcgtggtggttatgggcgtggatctgtcacgctgcggaccggatcacccagcatccagatgtccctgggacccgggactgctcttgagattccttgcagccatggcagccgttggggctttagaacctctgctgcctggcccactccttgctgtacatcctcacgctggcaccgcccctcccgctaatcagctcccgtggccggtgttatgcagccctgtggcaggagtcattctacttgcactcggcgcactactcgtcctgcagctgatacgcaggcgacggagggaacatggagccctatggttacctcctggctttaccaggagacccaggacccagagtgcgccacacaggaggaggccgccattgggcgaggactccatcggtttgaaagcattaaaaccaaaggccgaagttgacgaggatggagtggtcatgtgctcgggccctgaagaaggagaagaggttgggcaggccgaagaaacaggcccaccatcaacttgtcagctctggtctctgagcggaggctgcggcgctctgccacaagccgcaatgctaacgcccccacaagagtcagaaatggaggcaccagacctggacacccggggtccagacggcgtgacacccctaatgagtgctgtttgctgcggcgaagtgcagtcgggcacttttcaaggtgcatggttaggctgtcccgaaccgtgggagccactgctcgacggaggtgcttgcccccaggcgcacacagtcggcactggcgagactcccctacaccttgccgctcggttcagccgacctacagccgcacggagactccttgaggctggcgctaaccctaaccagccagatcgcgctgggaggacaccgctccacgcggcagttgcagccgatgccagggaagtgtgccaactactgttgcggagtcggcagaccgccgttgacgctcgtaccgaggatgggacaactccactgatgctggccgcaagactggcagtcgaagacttagtagaggaactgatcgccgctcaggcagatgtcggagctcgggataagtgggggaaaaccgccctgcactgggccgcagcggttaataatgccagggccgctaggagcctcttgcaggcaggagccgataaggatgcccaggataatcgcgagcagacccccctgttcctcgctgccagagagggagccgttgaagttgctcagcttcttctgggattgggcgctgctagggaactgcgagatcaagccggactggccccagctgacgttgctcaccagagaaaccactgggacctactgaccctgcttgagggggctggtccccctgaagccagacataaagctactcccggacgtgaggctgggccttttccaagggctcgtacggtgtctgtcagtgtgcctcctcatgggggaggcgcactacctaggtgccgcactctgagcgccggagccggtccccgtggaggcggtgcttgtctgcaagctcgtacatggtcggttgatttagccgctagaggagggggtgcttactctcactgtcggagtttatccggggtcggcgctggcggtggcccaacacctaggggcaggaggtttagcgctggcatgcgcggtcccagacctaatcctgctatcatgagagggaggtatggcgttgcagccggacggggtgggagagtgagcacggacgattggccttgtgactgggtggccctgggtgcatgcggaagcgcttccaacatccccattccaccaccctgtctgactcccagcccagagaggggcagtccccagcttgactgcggcccaccagctctccaggaaatgcccatcaaccagggcggagaggggaagaagta

SEQ ID NO: 232927 - DNA, 6011 bp, synthetic construct
  misc_feature 1..6011: note = Description of Artificial Sequence: Synthetic coding sequence
  source 1..6011: mol_type = other DNA
atgcagccaccttctctactcctgctcctgttacttctcttgctcctttgtgtgagtgtcgtgcggcctcgtggcttgctgtgtggctcttttcctgagccatgtgcgaatggaggaacctgcctgtcattgtccctcggacaaggtacctgccagtgtgcacccggtttccttggcgaaacctgccagtttccagacccctgccagaatgcccagctctgtcaaaatggtggtagttgtcaggccctcctgccagccccattaggtttaccatcctctccaagccccctcacgccgagcttcctgtgtacttgcctacccggatttacaggtgagcggtgccaggcccagttagaagacccatgccccccttccttttgttccaaacgtgggcgttgtcatattcaggccagtggcagacctcagtgttcctgtatgcccggttggaccggggaacagtgccaactgagagatttctgcagtgccaatccctgcgtcaacggcggagtctgccttgccacttatccgcagatccagtgtcactgtccgccaggttttgaaggtcatgcttgcgagcgtgacgtcaacgagtgcttccaggatccgggtccctgtccaaaaggtacctcttgtcacaacaccttgggctcctttcagtgtttgtgtcccgttggccaggaggggcctaggtgtgaattgagagccggaccatgccctccaaggggatgtagcaatggcggtacatgccagctgatgcccgagaaggattccaccttccatctatgcctctgtcctcctggattcattggacctgactgcgaggtaaatcctgacaattgtgtgtcccaccagtgccaaaatggcggaacctgccaggacggcctggacacatatacctgcctctgcccagaaacctggacgggatgggattgcagtgaggacgtggacgaatgcgaaacacaagggccaccgcattgcagaaacggaggtacctgtcagaatagcgctggcagcttccactgcgtgtgtgtgagcggttggggtggcacaagctgtgaggaaaatctcgatgactgcatcgccgcaacttgtgcaccaggttcaacttgcatcgaccgcgtaggatcttttagctgcctctgcccccctggtcggacaggcctcctgtgccacctggaggacatgtgtctgtctcagccgtgccacggagacgcccagtgcagcactaatccattaaccgggtccaccctgtgcctctgtcagcctggctatagcgggcctacttgccatcaagatctcgacgagtgtcttatggctcagcaaggacctagcccatgtgagcacggcggttcatgccttaacacgcccggtagtttcaattgcctttgtcctcctggctataccgggagtcgatgtgaggccgaccataacgagtgcctgtctcagccctgtcaccccggaagcacttgcctcgatctgctggcaacctttcattgcctgtgccctcctgggctggaagggcagctgtgtgaagtcgagactaatgagtgcgcttccgccccatgcctgaatcacgccgactgtcatgacctcctgaacggatttcagtgtatttgcctgcctggcttctcagggactcgctgtgaggaggacatagacgaatgcaggagcagcccttgtgccaacggtggccagtgccaggatcagccaggcgctttccattgcaagtgcctgcctgggttcgaagggcctaggtgtcaaactgaagtagatgagtgcttgtctgacccctgccccgtgggtgctagttgcttggatttgcccggtgcatttttctgtctgtgcccttccggattcaccggacaactatgtgaagtgccgctttgtgcacccaatctctgccagcccaaacagatctgcaaggaccaaaaagacaaagcaaattgcttgtgtcctgatgggtcccccggatgcgcaccaccggaggacaactgcacatgccaccacggacactgccagcggagttcgtgtgtttgcgatgttggctggactggaccagaatgtgaagcagagctgggcggatgtatctccgctccatgtgcgcacgggggaacatgttaccctcagccctctggctataattgcacctgccctacaggctataccgggccaacatgctccgaagaaatgactgcatgccacagcgggccatgcctcaacggcggaagttgcaacccgagtccaggaggatactattgtacctgcccaccttctcacaccggcccacaatgtcaaacaagcacagattactgcgtctcagcaccgtgtttcaacgggggtacatgcgtgaatcggcctggtacctttagctgtctgtgcgcgatgggtttccagggcccaagatgtgagggtaagttaagaccgtcctgcgccgactccccctgcaggaacagagcgacatgccaggattccccacagggacccagatgcctctgtccaaccgggtacacaggcggtagctgccagaccctgatggacctgtgtgcccagaagccttgtcctcgaaattcacactgtctgcagacaggcccttcttttcactgtctgtgtctgcaggggtggacaggcccactgtgtaacctgccgctcagcagctgccagaaagccgctctatcccagggtatcgacgtctcatctctctgccacaatggtggtttgtgtgtggattctggtcccagttacttctgccattgccctcccggattccagggctcactttgccaggaccatgttaatccttgtgaatccagaccatgtcagaatggtgctacctgtatggctcagccaagcgggtatctatgccaatgcgcacccggatacgacggtcagaactgttccaaggagctggatgcctgccagtcccagccgtgtcataatcacggcacgtgcacccctaagcccggagggttccactgtgcctgtccgcctggattcgtcggcctcaggtgtgagggtgatgtcgacgaatgcctggaccagccatgccacccgaccggaactgccgcatgtcacagtcttgccaacgccttctattgtcaatgccttccagggcatacggggcaatggtgcgaagtggagatcgacccttgccactcccaaccttgcttccacggcggaacatgtgaagccacggctgggtcccccctgggatttatctgccactgccccaaaggatttgaaggtccaacttgctcccacagagccccttcttgtggcttccatcactgccaccatggagggctgtgtttaccttcacccaagcctggattcccacctaggtgcgcctgtctgagcggttacggcggaccagattgcctgactcctcctgccccaaaggggtgcggaccgccttcaccctgcctgtacaacgggagctgctccgaaaccacaggcctgggtgggccaggttttaggtgcagttgtccacactccagcccgggaccacgttgtcagaagccaggcgctaaggggtgcgaaggcaggagcggggacggagcctgcgacgccggttgcagcggccctgggggtaactgggacgggggagattgttcgctgggggttcctgatccttggaaaggctgcccgagccacagccgatgttggcttttgtttagggacggccagtgtcacccacaatgtgattcagaggaatgtctgttcgatggatatgactgtgagacgcctcccgcatgtacccctgcgtacgaccaatattgtcacgaccatttccataacgggcactgtgagaagggttgcaacaccgctgagtgcggttgggacggaggcgactgtaggcctgaagacggagatccggagtggggccctagtctagctttgctggtggtgttgtcccctcccgcactggaccaacagctgttcgccctcgctagggttttgtcacttaccttaagggtgggtctttgggttcgcaaagacagagatggtagagacatggtatacccttatcccggtgcccgagccgaggaaaagctgggaggcaccagagaccccacttaccaagaaagggccgcaccacaaactcaacctctgggtaaggaaacagacagcttgagtgctgggttcgttgttgtgatgggagttgacctgtctaggtgtgggcctgatcacccagcttctcgttgtccgtgggatccagggctgctactcagatttttggccgcaatggctgccgtcggcgctctggaaccattactgcctggccctcttctggctgtgcatccgcacgccggaaccgcccctcccgctaaccagttaccatggcctgtcctctgtagtccagtggctggagtgatcttactcgctctgggagcactgctagttctgcaactcatcagaaggcggaggcgcgaacacggcgcactttggctcccgcctggattcactcgcagaccaaggacccagagcgctccccaccgccgacgccctcctttgggagaggactccattggattgaaggccctgaaaccaaaggccgaggtggatgaggatggagtcgttatgtgctccggcccagaggaaggcgaggaagtgggtcaggccgaggagactggtcccccttctacctgccagctatggtctctgtccggcggatgcggcgcactgccacaagccgcaatgttgacccctccacaggagtccgagatggaagctcccgacctggataccagaggccctgatggcgtaacccccctgatgtcagcagtttgttgcggcgaggtccagtcaggcacttttcagggtgcctggcttggatgtcctgagccttgggaaccactccttgatgggggagcttgtccccaggcgcatactgtgggtacaggagaaacccccctgcaccttgcagcgaggttttcccgtcctacagccgcacggaggctgctggaggcaggagccaatcctaatcaaccagatcgggctggtcggaccccattgcatgccgctgtggccgctgatgccagagaggtgtgtcaactcctgcttcggagccgccagacagccgttgatgctaggaccgaagacggtaccacacccctgatgttggcagcgaggctagctgtagaggaccttgtggaagagctcatcgctgctcaagctgacgtgggcgctcgagacaagtggggcaagacagctcttcactgggctgccgcagtgaataatgcccgtgcagctcgctctttgctgcaggccggagccgacaaggatgcgcaagataatcgggaacagacaccattattcctcgctgcgagggaaggagccgtcgaagtggctcagctgctcctgggcctgggagcagccagagaattacgagaccaagccggtcttgccccagccgatgtggcacatcaaagaaatcactgggatttgttaacccttttagagggcgcaggtccgccagaagcaaggcacaaagcgacgccaggcagagaggcaggcccatttccaagggcaaggacggtcagtgtgtctgtcccccctcacggaggcggagcactcccgagatgcaggacccttagtgctggcgcagggccaaggggaggcggagcctgcttgcaggcgcgaacatggtcagtcgacttggccgcacggggtggcggagcctactctcactgtcgatccctttcgggagtgggagcaggagggggacccacgcctagaggcagacgtttttccgctggcatgagaggacccaggcctaatcctgccattatgcgcggacgatacggcgtggccgctgggaggggtgggagagtaagcacagatgactggccatgcgattgggttgcattgggagcctgcggatcagcttccaacattcccatccctcccccttgtttgacgccctcacccgaacgcggaagcccccagctggattgcggccctcctgccctgcaggaaatgcctattaaccaggggggtgaggggaaaaaata

SEQ ID NO: 232928 - DNA, 561 bp, synthetic construct
  misc_feature 1..561: note = Description of Artificial Sequence: Synthetic coding sequence
  source 1..561: mol_type = other DNA
atgtctgccgtgtgctgtggcgaggtgcaaagcggtacctttcagggcgcatggctgggctgcccagaaccatgggagccactcctcgatgggggtgcttgccctcaggctcatacagtcggcacaggcgaaacaccacttcacctggcggctcggttttcccggccaactgccgcaagacgtctgctcgaagctggtgccaatcctaaccagcccgacagagccggtcggacacccctgcacgcagccgtcgctgccgacgcacgtgaggtttgccagctcttgctgcgttctagacagacagccgtggacgctagaactgaagatggcacgacaccactgatgctggcggctcggctggccgttgaggacctcgtggaagaactgattgccgctcaggcagacgtgggcgcacgagataaatggggtgccgacgccgctattccaggtggcgctggcagatcagggggaagtagtccggctacagccggagccggaggctcccctcgcgctgccggacccggttgggcaagcgccggtggaagaagatcacccacatag

SEQ ID NO: 232929 - DNA, 6008 bp, synthetic construct
  misc_feature 1..6008: note = Description of Artificial Sequence: Synthetic coding sequence
  source 1..6008: mol_type = other DNA
atgcagccacccagcctgttactccttctgttgctactgctgctctgcgttagcgtcgtgcgccctcggggtctgctgtgtggaagttttcctgaaccctgcgccaatggagggacgtgcctgagcctgagtctcgggcagggcacttgtcaatgcgcgccagggttcctgggcgaaacatgtcagtttcctgatccatgccaaaatgctcagctatgtcaaaatggtgggagttgccaggctctgctgcctgcacctctcggactgcccagttccccatcccccctgaccccttcttttctatgcacatgcctgcctggcttcacaggagaacgctgccaagcacagttggaagatccttgccctccctctttttgttccaaaagagggcgatgccacatccaggcaagcggccgaccgcagtgcagttgcatgccaggatggaccggcgaacaatgccagctgagagatttctgctcagcaaacccatgtgttaacggcggagtttgcctggcgacctatccccagattcagtgccactgccctcctggatttgagggccacgcctgtgaaagagacgttaatgagtgttttcaggaccctggcccatgtccaaaggggaccagctgtcacaacacactgggtagctttcagtgtttgtgccctgttgggcaagaggggcctcgttgtgagctcagggccggaccgtgcccccctcggggttgctccaatggagggacgtgccagctgatgcctgaaaaagactcaacttttcacttgtgcttgtgcccccctggcttcatcgggcctgactgtgaggtcaatcccgacaattgcgtttcccaccaatgccagaacgggggaacctgccaggatggcttggatacatacacctgcttatgtccagaaacatggacagggtgggactgctcagaggacgtagatgaatgtgaaactcagggccctccccactgccggaatggcggaacatgtcaaaactccgcaggatcctttcactgtgtctgcgtgagcggatggggcggtacttcctgcgaagaaaacctggatgattgcatcgctgccacttgtgcccctggcagtacttgtatcgatcgagtggggtctttcagttgcctctgcccccctgggagaactggactcttatgccatctcgaagatatgtgtctaagccaaccctgccatggcgacgctcagtgttccaccaatcccctcacgggctctacactgtgcctgtgccagcccggatacagcggaccaacctgccaccaagacttggacgaatgtcttatggcacaacaggggccatccccctgtgaacatggaggtagctgtctcaatacacccggttcttttaactgcctgtgtccccctgggtatactgggtccaggtgcgaagctgatcacaatgaatgcctgtcccagccgtgccatcccggatccacttgtcttgaccttcttgcgacattccattgcctctgcccacctggtctggagggtcagctgtgcgaagtggagaccaacgagtgcgcgtctgccccttgtttgaatcacgcagattgtcatgacctcctgaacggctttcaatgtatatgtctgcctggcttttccgggacccgctgcgaagaagacattgacgaatgccggagctctccttgtgcaaacggaggccagtgccaagatcagcccggagcgttccattgtaagtgcctccctggcttcgaagggccaagatgtcaaacagaggtggatgaatgcctgagcgacccatgcccagtgggtgcttcttgtctggacctgcctggggcatttttttgcctgtgtcccagcgggttcaccggccagctctgcgaggtgccgttgtgtgcgccaaatctttgccagccaaaacagatttgcaaagaccagaaggataaggcaaactgtctgtgccccgacggctctcccggttgtgccccaccagaagacaactgcacatgccaccatggacactgccagcgcagtagctgcgtctgcgatgtcggctggacaggccctgagtgcgaagcagaactggggggatgtattagcgctccgtgtgcacacggtggcacctgctatccccagccttccggttacaattgtacttgcccaaccgggtacaccggccctacctgcagtgaggagatgaccgcatgccatagtggcccttgcctaaacgggggaagctgcaatccttctcctgggggttactactgcacctgcccccctagccatactgggcctcagtgccaaacctcgacagactactgtgtgtccgctccgtgcttcaatggaggcacctgtgtcaacaggcctggcaccttctcctgtctctgtgctatgggctttcagggacccagatgcgaaggtaagctgcggccttcttgtgccgattctccgtgcagaaacagggcgacatgccaggacagtccacagggcccacggtgtctgtgtcccacaggctatacaggtggcagttgtcagaccttaatggatttgtgcgcgcagaaaccctgtcctaggaactcccattgtttgcaaactggaccttctttccattgtctctgcctgcagggatggaccgggccactgtgcaatctgcctttatcatcctgtcagaaagccgctctgagccaggggattgacgtgtcatctttgtgccacaacggcggactgtgcgtagactcaggaccgagctatttctgtcactgcccccctggattccaaggtagtctgtgccaggatcacgtgaacccctgtgaatctagaccttgtcagaatggcgctacctgcatggctcagccctccggctatctctgtcagtgtgctcccggttacgacggacagaactgcagcaaagaactggacgcatgtcagtcccagccatgtcacaaccacggcacctgtacgcctaagcctgggggatttcattgcgcatgcccacctggctttgtgggcctgaggtgcgagggggatgtggacgaatgtctggatcagccatgccaccctaccgggacagccgcatgtcacagcctcgctaacgcattctactgccaatgcctgcctggccacacggggcagtggtgcgaagttgaaatcgacccctgtcacagccagccttgctttcacggtggcacatgtgaagccactgctggcagcccattgggctttatctgccactgcccaaagggatttgagggaccaacctgttcacatcgggctccatcctgcggcttccaccattgccaccatgggggactgtgtttaccatctccaaagcctggatttccccctcgctgtgcttgtctgtctggttacggcggacccgactgcctgacccctcctgctccaaagggctgtgggcctccatccccctgcttatataatggttcctgctctgagacaacaggactgggcggaccaggctttagatgtagctgccctcacagtagtccgggaccgaggtgccaaaaaccaggtgccaagggttgcgagggccgtagtggggacggagcatgtgatgctggctgttcaggcccaggaggaaactgggatggaggagactgctccctgggcgtgccagacccctggaagggatgtcccagccattcccgatgttggctcctgttccgcgacgggcagtgtcacccacagtgcgattcagaagaatgcctgttcgatggctacgactgcgagacgcctcccgcatgtacgccggcttacgaccagtattgtcacgatcacttccataacggccactgtgaaaaagggtgcaataccgcggagtgtgggtgggatgggggagattgcaggcccgaggacggagacccagaatggggacccagcctcgctctgctggtggtgctgagcccaccggctctagaccagcaattatttgccctggcacgggtcttatcattaactctgagagttggcctctgggttcggaaagatagggacggaagggatatggtgtatccttaccccggagcccgagccgaggagaaactgggagggactcgggaccctacctaccaagaacgcgcagctccacagacccagccactaggtaaggagacagattccctgagcgcaggctttgtcgtcgttatgggtgtcgatctgtccagatgtgggcctgatcaccccgctagtcgttgcccctgggatcccggactgttactgcgattccttgccgctatggccgctgtaggcgcacttgaaccgctgcttccagggccactcctggcagtccaccctcacgccggaacagcgccacctgcaaaccagctgccctggcctgttctctgttcccccgtggctggggtcattttactggctctaggtgcacttctcgtgctgcagctgatcaggcgtcgccgtcgtgaacacggggcattatggcttccacctggcttcacaaggcggccacgtacacagtctgccccacaccggaggaggccaccgttaggcgaggatagcattgggttaaaggcactcaaaccaaaggccgaggttgatgaggacggtgtcgttatgtgtagcggtcctgaggagggagaggaggtgggccaggccgaagaaacaggaccaccaagtacatgccagctctggtctctgtcaggcggatgcggggcattgccgcaggcagccatgttaacccctccacaggaaagcgagatggaagcaccagacctggacaccaggggcccagacggagtgactcctttgatgtccgctgtttgctgcggagaagtgcagtcgggcactttccagggcgcttggctggggtgtcccgagccctgggagccgttactggatggcggagcctgtccccaggcacatacagtaggaactggagaaacccccctccatctcgctgcacgctttagtaggcctacagctgccagacggctgctcgaagcaggagccaaccctaaccaacccgacagagcagggcgtacccccctccacgctgcagtcgccgctgacgccagggaggtgtgccagttgctcctccggtcacgtcagaccgctgtagacgcccgaaccgaggacggcacaacgcccctgatgcttgctgcaagactcgccgtggaagatctggtggaggagctcattgccgctcaggccgacgtgggggcacgtgacaagtggggcaagactgctttgcattgggcagcagctgtgaataacgccagagccgcacgctctcttttgcaggccggtgccgataaggacgcccaggataatagagaacagaccccgctgtttctggctgcgcgagaaggcgcagtggaagtggctcagcttctgctggggctgggcgcagccagggagcttagggaccaggccggactggctccagccgacgtggcacatcaacgaaaccattgggacctcctgacactcctagagggcgcagggccacctgaagctcgccacaaggccacacccggacgtgaggctggtccattccctagggcacgaactgtttccgtctctgtgccccctcatggtggcggagcattaccacggtgtagaacgctgagcgccggagccggacccagggggggtggtgcttgcctccaagctagaacatggtccgtcgacctggcagcgaggggcggaggagcatactcccactgcagatcactcagcggagtgggcgcaggtggcggtccaacaccacggggaagacgattcagcgcgggaatgcgagggcctcgccctaacccagccatcatgcgcggacgatacggagtggcagccggtaggggcggtcgtgtcagtaccgatgactggccatgcgactgggttgcactgggtgcttgtgggtcagcctcgaatattcccatccctccaccatgcttgacgcctagccccgaacgcggatcccctcagctggactgtggcccacccgcactgcaggagatgcctatcaaccagggcggtgaaggaaagaagta

SEQ ID NO: 232930 - DNA, 6011 bp, synthetic construct
  misc_feature 1..6011: note = Description of Artificial Sequence: Synthetic coding sequence
  source 1..6011: mol_type = other DNA
atgcaacccccatcactactcttactccttttattactattgctgctgtgtgttagtgtggtccgtcctaggggcttactatgtggttctttccctgagccttgcgccaatggcggtacttgtctctcactatctctcggccagggaacatgccagtgcgcacctgggtttctaggagagacctgccagtttcccgatccatgccaaaacgcacaactgtgccaaaatggaggcagctgccaggcgcttcttccagcaccgctgggcttgcccagttcgccaagccccctcacacccagcttcctctgcacgtgtctgcctgggttcactggtgagcggtgccaagctaagctagaggacccgtgccctccatctttttgttccaaaagagggcgttgccatatacaggcatcgggacgtccccaatgtagctgcatgcctggatggacaggtgaacaatgccagctaagagacttttgttcagccaacccttgcgtgaacggaggcgtatgtttggcgacctacccccagatccagtgccattgtcccccaggttttgaaggtcacgcgtgtgagagggatgtgaatgagtgcttccaggacccagggccatgtcccaagggaacctcatgccacaacacattaggctctttccagtgtctgtgtcctgtcggacaggaggggccacgatgcgagctcagggccggaccttgtcctccgcgaggttgctccaacggaggaacatgccagcttatgcctgaaaaggatagtacgttccacttatgcctgtgtccgcctggctttatcggacccgactgtgaggtcaaccccgacaattgcgtctctcaccagtgtcagaacggcggaacctgccaggatggtcttgacacatacacatgtttgtgtcctgagacctggaccggatgggactgttccgaggacgtggacgagtgtgaaactcagggacccccacattgccgaaacggcggaacatgtcagaactccgcgggtagcttccattgtgtatgcgtgtctggatggggcggtacttcctgcgaggagaacttggacgactgcatcgcggctacatgcgcacccggatctacgtgtattgatagagtcggatcattttcctgtctgtgccccccagggaggactggactactttgtcatctggaagatatgtgtctttcccaaccatgccatggggacgcccaatgctctaccaacccattaacgggatccacgttgtgcctgtgtcagcctggttacagtggacccacctgccatcaagatctggatgaatgtctgatggcgcagcagggcccttctccatgtgagcatgggggttcatgtctcaatacacctggcagctttaattgtctctgtcctcctgggtacacaggttcccgatgtgaggcagatcacaatgagtgcctcagtcagccatgtcacccaggcagcacctgcctagatcttttggcgacctttcactgcttgtgcccgcctgggctagagggccagctgtgtgaggtggagacaaatgagtgcgccagtgctccatgcctgaaccatgccgactgtcatgatctcttgaacggctttcagtgtatctgtctgcctggcttcagcggcaccagatgcgaggaagacatcgatgaatgcagatcctccccgtgcgccaatggaggtcagtgtcaagatcagccaggcgctttccattgcaagtgcctcccaggcttcgaaggccctaggtgccaaaccgaggtggacgagtgcctgagcgacccttgtcccgttggagccagctgcttggacctgcctggcgcttttttttgcctgtgcccctcaggtttcactggccagttgtgcgaagtgcccctctgtgcgcctaatttatgtcagcctaagcaaatatgtaaggatcagaaggacaaggccaattgcctgtgtcctgacggtagcccagggtgcgcccctccagaggacaactgtacatgccaccatggtcactgtcaacggagctcttgcgtctgcgatgtcgggtggacaggacccgagtgcgaagccgagctgggtggttgcataagcgctccttgcgcacacggcggtacttgctacccacagccctcaggttataactgcacatgcccaaccggttatacaggccctacatgcagcgaagagatgacggcctgccatagtggcccatgcctgaacgggggatcatgtaaccccagccccggaggctactattgcacctgccccccttcacacactggccctcagtgccagacctccacagattactgcgtctctgcgccttgctttaacggcggaacgtgcgtcaacaggcctggaacattcagctgtctttgcgcgatggggttccagggcccacggtgtgaaggaaaactgcggccatcttgtgcggattccccctgtcgcaacagggccacatgtcaggactcccctcagggaccacggtgcctgtgtccgactggatataccggcggatcttgccagacactaatggacctgtgtgcccaaaagccctgtcctagaaatagccattgccttcagacgggcccttcctttcattgtttgtgtctgcagggctggactggacccctgtgtaatttgcctctcagttcctgtcagaaagctgctctttctcagggaatagacgtctcatcactgtgccacaacggaggcctgtgtgtggattcaggaccttcctatttttgccactgcccaccgggattccaaggcagtctgtgtcaggatcacgtcaacccgtgtgagtcccggccatgtcaaaacggagcgacatgcatggcacaacccagcggctacctctgccaatgcgcgccagggtacgatggccaaaattgttcgaaagagctagatgcttgccaatctcaaccatgtcataatcacggtacttgtacgcccaaaccgggagggtttcactgtgcctgtccaccagggttcgtgggactcaggtgtgagggcgatgtcgacgaatgcctggatcaaccctgccatcctacaggcactgcggcatgtcacagcctggccaacgcattctattgccagtgcctcccaggccacaccgggcagtggtgtgaggtggagattgatccttgccattcccagccttgcttccatggtggaacttgcgaggccactgccggttcacctttgggatttatctgccactgccctaaaggctttgagggtcccacttgctcacacagagctccaagctgtgggttccatcattgtcaccacggcggactatgcctccctagccctaagcccggattccctccacgatgtgcctgtctgtcaggttatggtggtcctgactgtctcacaccccctgcaccgaaaggatgcggtcccccaagcccctgcctctacaatgggtcctgttccgagacgactggtctgggcggacctgggttccgctgttcatgccctcattcatcccccggaccccgatgtcaaaagccgggagcgaagggatgcgagggcagatccggggatggagcctgcgatgccggatgttccggccctggcggaaattgggatggcggagactgcagcctgggagtgccagacccgtggaaaggctgccccagtcactcacggtgctggctcctctttcgagacggccagtgtcatccacaatgtgatagtgaggaatgtctcttcgatgggtacgattgtgaaaccccacctgcttgcactccagcctacgaccagtattgccacgaccactttcacaatggccattgcgagaagggatgtaataccgctgagtgtggctgggacggcggagattgccgccctgaggacggcgatcctgagtgggggccttccctggcgctgctcgtggtgctgagcccccctgcgcttgatcagcaactgttcgcccttgccagggtactctcgctcactctccgtgtgggcctttgggtcagaaaggaccgcgatggtagagacatggtgtatccttaccctggcgcacgggctgaggagaaattagggggtacacgggaccctacctaccaagaaagagcggcaccacagacgcaaccactgggcaaggaaacagattctcttagtgcagggttcgtggtggtcatgggcgtggacctgtcacgctgcggcccagaccacccagcctcaaggtgcccctgggaccccggactgctccttcgattcttggctgcgatggcggcagtaggggctctggagccgctgctgcctgggccattactggcggtccatccccacgccggaaccgccccacccgctaaccaactgccgtggccggttttatgcagccctgtggccggtgtcattttgttggcactgggggcattgctagtgttgcagctgatcagacgtaggaggcgcgaacatggagcactgtggctgccaccgggattcacacggaggcccagaacgcagagcgccccacaccggaggcgccctcctttgggcgaggattccatcggcctcaaagctttgaagccaaaggctgaggtggatgaagatggggtagttatgtgtagtggtcccgaggagggcgaagaagtcggtcaggcagaagaaactggcccaccttcaacatgtcagttgtggtcgctctctggcggatgtggtgcactgccacaggccgctatgctaactccaccccaggaatctgaaatggaggcgcctgatcttgacactagaggtcctgacggcgtgaccccgcttatgagcgctgtgtgttgcggggaggtacagtcgggaacgttccagggcgcatggttgggatgtcccgagccctgggagcccttgttggacggcggagcttgtccacaggcgcataccgtgggaacaggtgaaactccacttcacttagcggcacggttttctaggcctacagcggcaaggaggttactcgaagccggagccaaccccaaccagcccgacagggccggtaggacccccctacatgccgctgtcgccgctgatgcgagggaagtgtgccagctactgcttcggtcaagacagaccgcagtcgatgcccgtaccgaagacggaacaacacctctgatgttagctgccagactggccgtagaggatctcgtcgaggagctcattgctgcccaggccgacgtaggggcaagagacaaatgggggaagaccgccctgcactgggcagccgctgtgaataatgccagagctgccaggtctctcttgcaggcgggtgctgataaggatgcacaggataaccgagagcaaaccccactctttctggcggcaagggagggcgctgtggaggttgcacagttactgctgggcctcggagctgcccgagagctgagagaccaggcaggacttgctcccgcagacgtagctcaccagagaaatcattgggatctgctgactttactcgagggcgcaggacctccagaagcccgacataaagcaactccgggtcgggaggccggaccttttccacgagccaggaccgtgtctgttagcgtgccacctcatggaggaggcgcattgccacgctgccggacgctgtcagccggagctggacctcggggaggaggagcctgcttacaggcgaggacttggtccgtcgaccttgctgcacgcggaggaggcgcatattctcactgcagaagcctcagtggtgtgggcgctggaggcggtcctacccccagaggcagacgattcagcgctggtatgagaggccctcggcctaatccagcgattatgcgcggacggtacggtgtggccgctggcaggggcggtagggtgtccaccgacgactggccctgtgattgggtggcactcggcgcatgtggctccgcatcaaacataccaatccctccaccttgccttacgccttcaccagaacgaggtagtccccaacttgactgtggaccccctgcactacaagagatgcctattaatcagggcggagagggaaagaaata

SEQ ID NO: 232931 - DNA, 561 bp, synthetic construct
  misc_feature 1..561: note = Description of Artificial Sequence: Synthetic coding sequence
  source 1..561: mol_type = other DNA
atgtccgcggtgtgctgcggggaggtccaaagtgggacattccagggagcctggcttggttgccctgaaccctgggaacctctcctggatgggggtgcctgtccacaggcccataccgtagggacaggtgaaacccctctgcatttggctgccagattctcacgcccaactgccgcacgcagactactcgaagctggcgcaaatcccaatcaacccgatcgggctgggagaacgcctctgcacgctgcggtggccgctgacgctagggaggtgtgtcaacttttgctgagaagtaggcagactgcagtcgatgccagaaccgaggatggtactacacctctgatgctggctgcacgcctggctgtggaggatctcgtagaggaattgatcgccgctcaggctgatgtgggggctcgcgataaatggggcgctgacgcagctatccccggaggtgccggtcgctcaggtggcagctccccagcaaccgcaggcgctggagggtcccctagggcagctggacctgggtgggctagcgccggtggacgcagaagccccacttag

SEQ ID NO: 232932 - DNA, 561 bp, synthetic construct
  misc_feature 1..561: note = Description of Artificial Sequence: Synthetic coding sequence
  source 1..561: mol_type = other DNA
atgtcagctgtttgctgtggtgaggtacagagtgggacatttcagggcgcttggttgggttgtcccgaaccatgggagcctctgctggatgggggagcttgtcctcaagctcataccgtgggaaccggcgagactccactccatctcgcagctagattctctaggcccacagcagctaggaggctgctcgaagcaggcgctaacccaaaccagccagaccgggcagggcgtactccgctccacgctgccgttgcggcagatgccagagaggtatgtcagctgttgctaagatctagacagacagcggtggatgccagaacagaggacgggaccaccccactgatgttggccgcacgactcgctgttgaggacctcgtggaggagctcatcgctgcgcaggcggacgtgggggcacgagacaagtggggagccgacgccgctataccgggaggagctgggagatctggcggatcttccccagcaaccgctggcgctggcggatctccaagagctgcaggtccgggatgggcctctgcaggcggaagacggtctccgacctag

SEQ ID NO: 232933 - DNA, 561 bp, synthetic construct
  misc_feature 1..561: note = Description of Artificial Sequence: Synthetic coding sequence
  source 1..561: mol_type = other DNA
atgagcgcagtttgctgcggtgaggtccagtccgggactttccaaggagcgtggcttggatgtccggagccctgggagcccttactggatggtggagcctgcccacaggctcacactgttgggaccggagagactcctctgcatctggctgcacgattctcaagacccacagcagcaaggcggctgctggaggccggagcaaatccgaatcaacctgaccgagctggtcggaccccgctgcatgccgcagtggctgcagacgcccgagaggtgtgccagttgcttctaagaagcagacagacggctgtagacgccaggactgaagatggtactacaccattgatgctggcggctcggctggccgtggaagatcttgtagaggaactgatcgccgctcaggcagacgtgggggcacgcgataagtggggggcagatgcggctattcctggaggcgcaggtcgcagtgggggtagttcccccgcaacggctggtgccggaggatcgccgagggccgcaggcccaggatgggcttcggccggaggaaggcgaagtccaacctag

SEQ ID NO: 232934 - DNA, 561 bp, synthetic construct
  misc_feature 1..561: note = Description of Artificial Sequence: Synthetic coding sequence
  source 1..561: mol_type = other DNA
atgtccgcagtgtgttgtggtgaagtacagtccggaacctttcaaggcgcttggctgggatgccccgaaccgtgggaaccgctgctggacgggggtgcgtgccctcaggctcataccgtgggaactggggagactccactccatctggctgcacggttctcacgcccaactgcggctcgcaggctgctcgaggccggagccaatccgaaccagcctgatagggctggaagaactcccctacacgcagcagtagccgctgacgctagggaggtgtgtcaattgttgctacggtccaggcagactgctgtggacgcacgaacagaagatgggacaacaccgcttatgttggcagctaggctggctgtagaagatctggtggaggagctaatagcagctcaagccgacgtcggagcaagggacaagtggggagcagacgcagcgataccaggaggagccggacggtccggcggatcttcacccgctacggctggggctggcggaagccccagagctgccggtccaggatgggcatccgctggcggacgtagatcccccacatag

SEQ ID NO: 232935 - DNA, 561 bp, synthetic construct
  misc_feature 1..561: note = Description of Artificial Sequence: Synthetic coding sequence
  source 1..561: mol_type = other DNA
atgagtgccgtgtgctgcggtgaagtgcaaagtggaacattccaaggggcttggctaggctgcccggaaccatgggagcccctgctagacggcggtgcttgtccacaggcccatacagtggggacaggcgagaccccactccacctcgcagccagattttcacgtcccactgcagcacggaggcttctcgaggccggagctaatcccaaccaaccagatcgggcagggaggactccattgcacgctgccgtcgcggctgatgctagggaagtctgccagttgctgctcagatcaagacagaccgccgtggatgcgcgtactgaagatggaacaactccccttatgttggctgccaggctggccgtggaggacctggtggaagagctcatcgctgcacaggccgacgttggagctagggacaagtggggcgcagacgcggcaattccaggcggagcagggcgtagtggcggatcttctcctgccaccgcaggggctgggggatctcctcgcgctgccggacctggatgggcatccgcagggggaaggaggtctcccacctag

SEQ ID NO: 232936 - DNA, 1491 bp, synthetic construct
  misc_feature 1..1491: note = Description of Artificial Sequence: Synthetic coding sequence
  source 1..1491: mol_type = other DNA
atgggaaggggtgttagggtcttgcttttgttgtcccttctgcattgcgctggcggatcagaaggcagaaagacatggcggcgacgcggacagcagcctccgccacccccacgcactgaagcagctcctgctgctggtcagcctgtggagtccttccccttggatttcaccgccgttgaggggaatatggactcttttatggctcaggtgaaaagtttagctcagagcctgtacccatgtagcgcccagcagctgaacgaggacttgcgtctgcacttgctccttaatactagcgtcacctgtaacgacggttcgcctgccggatactacctgaaagagagcaggggttcacggcgttggctcctttttctggagggaggttggtactgtttcaacagagaaaactgcgatagcaggtacgataccatgaggagattgatgtctagtcgtgattggcctaggactcggacgggcactggaatcctttcctctcagcctgaagaaaacccatactggtggaacgcaaatatggttttcatcccatactgctcctcagatgtgtggtccggtgccagttctaaaagcgagaagaatgagtacgcctttatgggggctctgattatccaagaggtcgtccgcgagctgctaggtagaggacttagtggagctaaagtgttgctgttggctggttccagcgccggtggaacaggcgtattgttgaatgtcgaccgcgtggccgagcaattagaaaagctgggatacccagccatccaggtgcggggactggctgattctggctggttcctggataataaacaatatagacacaccgattgcgtcgatacaattacgtgcgcaccaaccgaagctatccgacgcggaatcagatattggaacggcgttgtccccgaaaggtgtaggagacagttccaagagggtgaggaatggaattgtttttttggctacaaagtttacccgacgctccgttgtcctgtatttgtggtgcaatggctgttcgatgaagcacaacttacggtcgataatgttcatctgacagggcaacctgttcaggaaggcctacgcctgtacatccaaaatctagggagggagctgcgccacaccttaaaggacgtgcccgcatcctttgctccagcatgtctgagtcatgagatcattatacggtcccactggacagacgttcaagtcaaagggacctccttgccaagggctttacactgctgggacagatccctgcatgacagtcataaggcatccaagacccccctgaaaggatgcccggtgcacctagttgactcctgcccctggccacattgtaacccttcttgtcccactgttcgcgaccagtttacaggccaagaaatgaacgttgcacaattccttatgcatatgggatttgacatgcaaaccgttgctcagcctcaggggctggagccttctgagctgctcggcatgctcagtaatgggtcctag

SEQ ID NO: 232937 - DNA, 888 bp, synthetic construct
  misc_feature 1..888: note = Description of Artificial Sequence: Synthetic coding sequence
  source 1..888: mol_type = other DNA
atgggaagaggggtccgggtccttctgttgctgagcctgctgcactgtgccggaggatcagaggggcgtaagacctggagacgccgaggccaacaaccaccaccgcctccgaggaccgaggccgcaccggcagcaggacagccagtggaaagttttccactggacttcaccgccgtggagggtaacatggactcattcatggcccaggtgaagtctcttgcccagagtctctatccttgcagcgcccagcaacttaacgaggacctgagactacatcttctgctgaatacgagcgtgacttgcaacgatggatctcccgcagggtactatctgaaggagtcaaggggctcccgccgttggctgctattcctcgagggcggttggtattgttttaatcgggaaaattgcgacagccggtacgacactatgcggagacttatgagcagccgagattggccaaggaccaggaccggtacggggatcttaagcagccagcctgaggaaaatccttactggtggaacgccaacatggtgttcattccttattgcagcagtgacgtatggtcgggtgcaagcagcaaatctgaaaagaatgagtacgccttcatgggcgctctgataatccaggaggttgttcgtgagcttctgggacgaggtctcagtggcgctaaggttctccttctcgccggaagttcagcagggggaacaggggtactgctgaacgtggatcgggtagcagagcagttggaaaaattgggttaccccgctatacaggttcggggactcgctgactctgggtggtttctcgacaataaacagtatcggcacaccgactgtgtggacactatcacttgtgctccaactgaagctattcgacgtggaatctag

SEQ ID NO: 232938 - DNA, 4080 bp, synthetic construct
  misc_feature 1..4080: note = Description of Artificial Sequence: Synthetic coding sequence
  source 1..4080: mol_type = other DNA
atggcagaggcaggcttacgagggtggctgctctgggccctgctgttgcgtttagcacagagcgagccatacacgactatccatcagccagggtattgcgccttttatgatgagtgcggtaagaatccagagctatccggctctttgatgacactctccaacgtaagctgtctgtccaatacaccagccagaaaaataacaggcgaccacctgatcttgttgcagaagatctgcccgcgtctttacaccggacccaatacacaggcttgctgtagtgccaagcagctggtctccctggaggctagcctatccattacgaaggctctcttgacccgttgccccgcttgttcagacaatttcgttaatttgcattgtcataatacctgttctcctaatcaatctcttttcatcaatgttactcgcgtggcacagcttggagcaggccagcttcctgcggtcgtggcgtatgaagccttttaccagcacagctttgctgagcagagttacgactcttgttccagggtgcgtgttccagccgcagctaccctagcagtcgggaccatgtgtggcgtgtatggatcagccctatgtaatgcccaacgctggcttaatttccagggtgatacgggaaacggactggctcccctggacatcacttttcatcttttagagccagggcaggctgtgggctcggggatccaacccctgaacgaaggagttgcgcgatgcaacgagtcccaaggggatgatgttgctacttgctcatgccaggattgcgctgcatcgtgccccgcaattgcaaggcctcaagctctggactcaactttttatctcggccagatgcccggaagtctggtgctgatcattatactctgctctgtcttcgccgttgtgacaattctgctggtgggctttcgagttgcacccgcacgggataagagtaaaatggttgatcccaagaaaggtacttccctctccgacaaacttagcttctctacacatacactcctggggcagtttttccaagggtggggtacttgggttgcaagctggccactcactatcttagtcctgtctgtaattccggtagtggcactggccgcaggactggtgttcaccgaactgacaaccgaccctgtggagctgtggtcagctccaaacagtcaggcacggagcgagaaagccttccacgaccagcattttggcccattctttcgcacaaatcaggtgatcctgacggcgcctaaccgcagctcataccgttatgatagtctcctgctgggtccaaagaatttctccggcattctcgacctggatctactgctggagctgctggagcttcaggaacgcctacgacacctccaggtttggagtccagaggcacagcgtaatatatcactccaggacatctgttacgctcccttgaaccccgataatacaagcctttacgattgttgtattaacagcttactacagtactttcagaataatcggacgctcctgctgctgactgctaaccagacgctcatgggacagaccagccaggtcgactggaaggatcactttctttattgcgcaaatgcacctctcactttcaaagatgggaccgccctggctctgtcttgcatggccgattacggcgcacctgtgtttccttttctagccatcggcggttataagggcaaggattattctgaggcggaggccctgataatgactttcagcttgaacaactaccctgccggagatcccagactcgctcaggctaagctgtgggaggaggcgtttcttgaggaaatgcgcgcttttcagagacgcatggcaggtatgtttcaggttacatttatggcggagagatctctggaggacgaaattaatcgcacaacagctgaagatctccccatcttcgccacatcctatatagtgatcttcctctatatatctctcgccctgggatcatacagcagttggtcgcgcgtaatggtggactctaaggccaccctaggattgggaggcgtggcggtcgtcctgggagccgttatggctgctatggggttttttagctacctggggatccgttcaagcctggttatcctgcaggtcgtaccgtttcttgtcctgtcagttggagctgataacatttttatcttcgtgttagagtatcagaggctgcctcggcgacccggtgagccccgagaggtccatataggcagagccctcgggagagtggcgccttccatgctgctgtgctcactctcagaggctatatgctttttcctgggtgcccttaccccgatgcctgctgtccgtacattcgcgcttacatctgggcttgcagtgatacttgattttttgttgcagatgtcagctttcgtggccctgctatcactcgacagtaagcggcaggaggctagtaggctggacgtgtgctgctgcgtgaagcctcaagagttgccgcctccgggacaaggcgaggggctgctcttaggattcttccaaaaggcatatgccccattcctgctgcattggatcacgaggggcgttgtactgctgctgtttcttgctctttttggggtctccctatactctatgtgccacatttcagtgggcctggatcaggaactcgcactgccgaaggactcttatctcctcgactatttcttatttctgaaccgctatttcgaggtgggagctcccgtgtactttgttacgacgttaggatataatttcagctccgaggctggtatgaacgcaatctgtagcagcgctgggtgtaataatttttcattcacacagaaaattcagtacgcaacagaattcccagagcagtcataccttgctatacccgcatccagttgggtagatgacttcattgattggttgacaccttcctcctgttgtagactttatatatccggccctaataaagataaattctgtccatctaccgtgaactccctgaactgcctgaaaaattgcatgtcaatcactatggggagtgtccgtccttctgtggaacagttccataagtatctaccctggttcctgaatgatcgacccaatattaaatgccctaaggggggactcgccgcatattctacatctgtgaatttgacctccgatgggcaggtactggataccgttgccattctaagtcctcgattggaatacagtggcacaataagtgctcattgcaatctgtacctactcgacagtacatctagattcatggcgtaccacaaaccattgaagaactctcaagactatactgaggctctcagagcagccagagagctggctgccaacattacagcagatttgcgtaaagtgcccggaaccgaccccgctttcgaggtgttcccatataccataaccaatgtgttctatgaacaataccttacaattctcccggaaggactgtttatgctttccttatgtctggttcctacttttgcggtcagctgcctccttcttggcttggatttgaggagtggcctgctgaatcttttgtctattgtgatgattctggtggatactgtggggttcatggcactgtggggtatttcctacaatgccgtatctctgataaacctcgttagtgccgtgggtatgtcagtagaattcgtttcccatatcacaaggagttttgccatatccacgaagcctacttggcttgagagagcgaaggaggcaacaatcagcatgggcagcgcggtattcgctggcgtcgcaatgaccaatttgccaggaattctggtactgggattagcgaaggcgcagctgatccagattttcttttttagactgaacctgctgattaccctgctgggcttgctccatggcctggtcttcctgcccgtcatcttgagctacgttggcccagacgttaatccagccctggcattggaacagaaaagagcagaagaggcagtagccgcagtgatggtggctagctgccctaaccaccctagtagggtgtctactgctgataatatctacgtcaatcactccttcgagggcagcatcaaaggtgctggtgctattagcaattttctgcccaacaatggaagacaattttag

SEQ ID NO: 232939 - DNA, 3999 bp, synthetic construct
  misc_feature 1..3999: note = Description of Artificial Sequence: Synthetic coding sequence
  source 1..3999: mol_type = other DNA
atggcagaagcgggtctgaggggatggctcctgtgggccttgctgctgcgccttgcccagtctgagccatataccactatccatcagcccggatattgcgccttctatgacgagtgtggtaaaaatccagaactcagcggcagccttatgaccctttccaacgttagctgcttgagtaacaccccagctcgcaaaatcaccggcgaccacctgatactgctgcaaaagatttgccctcgcctgtacacagggccaaatacccaggcttgctgtagcgccaagcaattagttagtctagaagcctctctgtccatcactaaggctctgttaacacgctgcccagcctgttcggacaattttgttaacctgcactgccataatacctgttcaccaaaccaaagtttgtttattaatgtgactcgagtcgcccagctgggtgccggacagctacctgctgttgttgcctatgaggctttttatcagcactcatttgcagaacagtcatatgattcttgttccagagtacgggtgccagccgcagccaccctcgcagtgggcacaatgtgcggcgtatatgggtcagccctttgcaatgcccaacgctggctgaatttccagggtgataccggcaacggattggcaccactggatataacttttcacctcctggagccaggtcaggctgtcggaagcggcatccagcccctgaatgagggcgtggcccgatgcaatgaatcccagggagacgatgtggcgacctgtagttgtcaagattgcgccgcttcatgccctgctattgccagaccccaggccttggacagcaccttttatctaggacagatgcccggaagcctggtcctgatcattattctgtgcagcgtgtttgcagtggtgactatcctcctggttgggttccgcgtggcgcctgccagggacaaatccaaaatggtggatcctaagaagggcacatcactgagtgataaactgtccttcagtacacatacacttctggggcagttcttccaggggtggggcacttgggtcgcctcatggccattaaccatcctagttctttccgttatccccgtggtggctctcgcagctggtctggtgtttactgaattgactaccgatcctgtggagctctggtctgctcctaactcacaggcccgaagtgaaaaggctttccatgaccagcatttcggacccttttttcgcacaaaccaggtcatacttaccgcccctaaccgaagctcgtaccgttacgacagtctgctgttgggtccgaagaacttcagtgggattctagacctggatctcctgctggagctgctggagttacaggagcgcttgcgacatttacaggtctggagcccagaggcccagcgaaatatctctcttcaggatatttgttacgccccactgaacccggacaacacctcactgtacgactgttgcatcaacagtttgctccaatatttccagaacaacagaaccctgctcctgctgaccgctaatcagactttgatgggccagacgtctcaagtcgattggaaggatcatttcctgtactgcgctaacgcccctcttactttcaaggacggcaccgcgctcgcgctaagctgtatggctgactatggcgctccagtgttcccctttctggccatcggcggttataaaggcaaggattacagcgaggccgaggcactgatcatgacgttcagcttaaacaattatccagccggtgatccgagactggcccaggcaaaactgtgggaagaggcttttttagaggagatgagagccttccagcgtcggatggccggaatgttccaggtcacattcatggctgagagaagcctggaggacgagatcaaccgaactaccgctgaagaccttccaatttttgcgactagttacattgtgatattcttgtatatcagcctcgctctagggagctactcttcctggtcccgagttatggtcgatagtaaggccaccctcggtctcggcggtgtggccgtggtcttgggcgcagtcatggctgccatgggattctttagttacctgggcatccgaagttctctggtgattctgcaagtggtcccattcctggtgctatctgtgggagctgacaacatctttatatttgtcttggaatatcagcgcctgccaagaagacctggggagcccagagaggtccacattgggcgagctctgggtcgcgtcgccccatccatgctgctctgcagcctcagcgaagcaatctgttttttccttggagcactcactcctatgccggctgtgcggacatttgctctgacttcaggcctggccgtcattcttgattttctcctccaaatgagcgcgtttgtggcccttctctctctggacagtaagaggcaggaggcatctcgattagatgtgtgttgttgcgttaaaccacaggagttgcctcccccaggacaaggagaaggcttgctgcttggtttcttccaaaaggcttacgcgccattcctgttgcactggataacccgcggagtggtgcttttgttgtttttggctctctttggagtttccctttactctatgtgccacattagtgtcggactggaccaggagctcgcactgcccaaagattcgtatctgctcgattatttcctctttcttaaccgttactttgaggttggcgctcctgtttacttcgtcactaccctcggctataattttagctcagaggcagggatgaacgcaatctgcagcagcgctgggtgtaacaacttctccttcacgcagaagatccaatatgccacggagtttccagagcagtcttaccttgctatcccagcgagctcgtgggtcgatgatttcattgactggctgaccccgtccagttgctgtaggttgtacatttctgggcctaataaagacaaattctgtccctccacggttaatagtcttaactgcctaaagaattgtatgagtatcaccatgggttcagtgcgaccctctgtcgagcagtttcataaatacttgccttggtttttgaacgatcgaccaaatatcaaatgcccgaagggcggtttggccgcatattctacaagtgtgaacctaacctcagatggtcaggtgctcgcttcccggtttatggcttatcataagccattaaaaaatagccaggactataccgaggcccttcgagccgctagagaactggcagcaaacattacagccgatctgagaaaggtgccaggcaccgaccctgcattcgaagtctttccttatacaatcactaacgtgttctacgagcaatatctgactatattgccggagggactgtttatgctgagtctttgtctcgtccctacctttgcagtgtcttgtctgcttcttggactcgatctgcggtcaggcctgctaaatctcctgtcaatcgtgatgatcctggttgacacagtcggattcatggccctgtggggaattagttacaacgccgtcagcctgatcaatctggtgtccgctgttggtatgtctgtggaattcgtctcccacatcactcgaagtttcgccatttcgactaagccaacgtggttggaacgtgctaaagaggcaacgatcagcatgggctctgctgtgtttgctggggttgccatgaccaacctgcccggaattttggtattgggtctagccaaggctcaattgatacaaattttcttctttagacttaatctcttaattaccctgctcgggctgctgcacggtctcgtttttctcccggtgattttgtcctacgttgggcctgacgtgaacccagctctcgctctcgaacagaagcgggctgaggaggctgtggcagcggtgatggtggccagttgtcctaaccacccaagccgagttagcacggcagacaatatctacgtgaatcactccttcgaggggtctattaagggggctggcgctatctcaaactttttgccaaacaacggtcgccagttttag

SEQ ID NO: 232940 - DNA, 3861 bp, synthetic construct
  misc_feature 1..3861: note = Description of Artificial Sequence: Synthetic coding sequence
  source 1..3861: mol_type = other DNA
atggcggaggctggtctcagaggttggctgctgtgggcactcctgctccggctcgcccagagcgagccctacaccacaattcaccagccagggtattgcgctttttacgatgaatgtggcaaaaacccagaactgagtggcagcctgatgaccctgtcaaacgtgagctgcctatccaacactccagctcgcaaaatcactggcgaccatctgattctgctgcagaaaatctgtcccagactgtataccggccctaacacgcaggcttgctgctcggctaaacagctggtgagtttggaagctagtcttagcatcacaaaggccctccttacccgatgcccggcttgtagtgacaacttcgtaaacctccactgccacaacacgtgtagcccaaaccaatcccttttcatcaacgtgaccagggtcgcccagctgggcgcaggccagctgcctgcagtggtggcgtatgaagccttttatcagcatagctttgcagaacaatcatatgactcttgttccagagtcagggtgcctgcagctgccacactggctgtgggcactatgtgcggcgtgtatggttctgccctttgcaacgcacaacgttggctcaactttcagggcgatactggcaacggcttggccccactggatataacattccacctactggaacccggtcaggctgtcggaagcggcatccagccgctaaatgaaggcgtggcccgttgcaatgagagtcagggtgatgacgtggcaacatgctcatgtcaggactgtgccgcatcctgtccagctatcgctcgaccccaggcactcgactctactttctatttgggacagatgccgggatctctggttctaatcatcattctatgtagcgtgttcgccgtcgtcacaattctgttggtcggattccgtgtggcccctgccagagacaaaagcaagatggtggaccctaaaaaaggcaccagcttaagcgacaagctgtcattcagcacccatacacttctgggtcagttcttccagggctgggggacctgggtggcctcgtggcctttaaccatcttggttctctcagtcattcctgtggtggctctggctgcgggattagtgtttaccgaacttacgacagaccctgtagagctgtggtcagccccaaacagccaggccaggtctgagaaagcattccacgatcagcattttgggccttttttcaggaccaaccaggtaatattgaccgcccctaaccgctcctcctataggtatgactctctgttattagggccaaagaactttagcggtattctggacctggatctcctgctggagctcttggagctccaggaacggctccgacatctgcaggtctggtctcctgaggcccaaaggaacatctccctccaggatatttgctacgcgccactcaacccagataacacatcactttacgattgttgtatcaacagtttgctgcagtactttcagaataaccggactctactcctactgacggcaaatcagaccttgatggggcagacgagccaggtggactggaaagaccactttctatattgtgccaacgcaccactcacttttaaagacggtactgccctagctctgagctgtatggcagactacggcgcaccagtgtttccctttctcgcaatcggaggttacaagggaaaagattactctgaggcagaggccctgatcatgacgttttccctcaataattatcccgctggggaccctcgattagctcaggccaaactttgggaagaggcctttcttgaggaaatgcgggcttttcagagaaggatggcagggatgtttcaagtaacattcatggccgagagaagcctagaggacgaaataaatcgaacaaccgctgaagatctgcctatctttgctacctcatacatagtgatcttcctttacattagtctggctctgggcagctattcttcttggtcccgcgtgatggtggatagcaaggcaacactggggttgggcggtgtcgctgtcgtgctgggagccgtcatggccgcaatggggttcttcagttatcttggcatcagaagctcactggtcatcctgcaagtcgtcccctttctggtgctcagtgtgggggcagataacattttcatcttcgtactggaataccagcggctgcccagaagacctggcgagccccgagaggttcacatagggagggccctcggtcgagtcgcaccgagtatgctgctctgttctctgagcgaggcaatatgcttctttttgggcgcactgacgccgatgcccgctgtcaggacgttcgccttgacctcaggcctggccgtgatcctcgattttctgctgcagatgtcggcatttgtggcgctgctcagccttgactctaagagacaggaggcatctcggctcgacgtatgctgttgcgtcaaaccgcaggagctgccacctcctggacaaggcgaggggttgcttcttggctttttccagaaggcgtatgcaccgtttctgcttcactggattacccggggtgtggtggtgggagccccagtgtatttcgtcacaacattggggtacaacttcagtagtgaagcagggatgaatgcaatctgcagttcagccggatgtaacaacttctcatttactcagaagatacagtatgcaactgagtttcctgaacagtcttatctcgccataccagcttcctcgtgggtggatgactttattgactggttgacaccttcaagttgctgcagattgtacattagcggccctaataaggacaaattttgcccgagcacagtgaatagcctgaattgcctaaagaactgtatgagtatcaccatgggatcagttagacccagtgtggagcagtttcataagtatctgccctggtttctgaacgaccgaccaaatatcaagtgcccgaaaggcggtctggccgcttatagtacttcagtcaatcttacatccgacggtcaggtgttggcgtccagatttatggcgtatcataagccgctgaagaactctcaggactacaccgaggcgttacgcgcagctcgcgaactggcagctaacatcactgctgatctgcgcaaagttcccggtaccgatcccgcattcgaggtttttccctacaccattaccaatgtcttctacgaacagtacctcaccattctcccggaaggtctattcatgctgagtctatgtctcgtaccaacattcgcggtgtcttgtttgctcctagggctggatcttcggagtggactgctgaatcttttatccatcgtcatgattttggtcgacactgtcggattcatggcactctgggggatctcatacaatgccgtgagcttgatcaaccttgtcagtgctgtcgggatgagcgtagagttcgtgtctcacattaccagatcattcgccatctctaccaaaccgacatggctagaaagggcaaaagaagcaaccatctccatggggtctgcagtgtttgcaggagtcgctatgacaaatctgcccggtattctggttttgggtctggcaaaggcccagctgatccagatcttcttctttaggctcaaccttcttatcaccctgctcggcctgctccatggtctggtttttctccctgtgattctgagctatgtgggaccagatgttaaccccgctctcgctctggagcagaagagggctgaagaggccgttgccgctgtgatggttgctagttgccctaatcaccccagccgtgtgagcacagctgacaacatctatgtgaaccactcttttgagggatctattaaaggggctggggctatatccaatttcctgccgaacaatgggaggcagttttag

SEQ ID NO: 232941 - DNA, 783 bp, synthetic construct
  misc_feature 1..783: note = Description of Artificial Sequence: Synthetic coding sequence
  source 1..783: mol_type = other DNA
atgccacagaacgagtacatcgagcttcacaggaagcgctacggataccgtctggactatcatgaaaagaaaaggaagaaggagtcccgtgaagcgcacgagaggagcaagaaagccaagaagatgattggactgaaggctaaactttaccataagcagaggcacgctgagaaaatacagatgaagaaaacgatcaagatgcatgaaaagcgcaacaccaaacagaagaatgacgagaaaacgccccaaggtgccgtgcccgcatatctccttgatcgggaggggcagtcccgcgcaaaggtcttgtctaacatgattaaacagaaacgcaaagagaaagcaggcaaatgggaggtgccactcccgaaagtgagggcccagggagagaccgaggttctgaaagttattcggacagggaagcgaaaaaagaaggcctggaaacgtatggtaacgaaggtttgtttcgtgggagacgggtttacacgaaagccacccaagtatgagagatttatccgcccaatgggcctcaggttcaagaaagctcatgtgacacacccggaactgaaggcaacattctgcttgccaatcctgggtgtgaaaaagaacccttcatctcccttatacactacacttggggtgattactaaaggcacggtcatagaagtgaatgtcagtgagctcgggctggtaacgcagggaggtaaagtaatttggggaaagtacgcacaagttactaacaatcctgagaatgatggctgcataaacgcggtactcttagtttag

SEQ ID NO: 232942 - DNA, 1509 bp, synthetic construct
  misc_feature 1..1509: note = Description of Artificial Sequence: Synthetic coding sequence
  source 1..1509: mol_type = other DNA
atgagttgccctgtacctgcatgctgtgctttattattagtactgggactttgtagagcacgcccacgcaacgctctactcttgctggcagacgacggcggattcgaatcaggagcgtataataactccgccattgccaccccccacttggacgctctggctcgcaggagcttactttttcgcaacgcattcacgtcagtcagttcctgctcgccctctcgagcatccctactcacaggtctacctcagcaccagaacggcatgtatggcctccatcaggatgtgcaccattttaactcttttgacaaggtcagaagcttgcccctgttactgagccaggccggtgtccgaactggcattattggaaagaaacacgtcggccctgagaccgtataccccttcgatttcgcttatactgaggaaaatgggagtgtcctccaggtcggcaggaacattacaaggattaagctgctagtgcgcaaatttctgcaaactcaggatgaccgcccttttttcctgtacgtcgcattccatgaccctcatcgttgcggccacagtcagccccagtacggcacattttgcgaaaagtttggtaatggcgaatctggcatgggacggatcccagactggactcctcaggcatacgatccactcgatgttcttgtgccttactttgtacccaacacccccgcagccagagcggatctggcagctcagtatacaactgtcggaagaatggaccagggggttggccttgtgctccaggaactgcgagatgcgggagtgttgaatgatacactggtaatttttacctctgacaacggaatccccttcccttctggaagaacaaacctgtactggcctggtacagccgagccccttctggtcagtagccccgaacaccccaagagatggggacaggtctctgaggcctacgtgagcctgctggatttgacacctacaattctggactggttcagcataccatatccgtcctatgctatattcggctctaagacaatccatctgacaggccgatctttgcttccagccctggaggctgaacctttgtgggcaacggtgttcggcagccaatctcaccatgaggtaaccatgtcctatcctatgagaagcgtacagcatcgacattttcgactggtacacaatcttaactttaagatgcccttcccaattgaccaagatttctacgtgtcccccacgttccaggatctgctgaaccgaacgaccgcaggccagcccactggttggtataaagacctcagacattactactatagagctcgctgggagctctacgaccgatcccgggacccacacgaaactcagaatctggccaccgaccccaggttcgcccaacttctggagatgttacgggaccagcttgcaaagtggcagtgggagacccatgacccctgggtgtgcgcgcctgacggtgtgcttgaggagaagctcagcccccagtgccagcctctgcacaacgagctgtag

SEQ ID NO: 232943 - DNA, 900 bp, synthetic construct
  misc_feature 1..900: note = Description of Artificial Sequence: Synthetic coding sequence
  source 1..900: mol_type = other DNA
atgggccgaataccagactggactcctcaggcttacgatcctctggacgtcttagttccgtattttgtgcccaacaccccagccgcaagagcggatctggctgctcagtacacaacggttggcagaatggaccagggtgttgggcttgtgctccaggagctgcgagatgccggagttctgaacgatactcttgtcatctttactagtgacaatgggattccattcccctccggccgaaccaatctctattggccagggactgcggagcctcttctggtgtcaagccccgagcacccaaaaagatggggccaggtctccgaggcatacgtgagcctcttagatctgacgccaacaatcctggactggttctcgattccatacccgagctacgccatttttggcagcaagacaattcatctaacagggcgatcgctacttcccgctctggaggcggagcctctctgggcaacggtctttggatcgcagtcccaccatgaggttaccatgtcctatccaatgcgaagtgtgcaacaccgccactttaggttagtccacaacctgaacttcaaaatgcccttccccatagatcaggatttctatgtgtcccctacctttcaagatcttttgaaccggacaacagccggtcagccaaccgggtggtacaaggatctccgccactactactacagggccagatgggagctgtacgaccgcagtcgcgatccacacgagacccagaatctcgccaccgatcctaggttcgcccagcttctggagatgctacgcgatcagctcgccaagtggcaatgggagacacacgacccttgggtgtgtgccccagatggcgtcctcgaggagaagctaagccctcagtgtcagccactgcacaacgagctgtag

SEQ ID NO: 232944 - DNA, 618 bp, synthetic construct
  misc_feature 1..618: note = Description of Artificial Sequence: Synthetic coding sequence
  source 1..618: mol_type = other DNA
atgtcatgcccagttcccgcatgttgtgccctgctgctggtactagggctttgccgggcaagaccaagaaacgccctgctcttgctagcagatagggctctgtcagtgagtcatctgactcaacgaatgacagaggctctgagagttgccagaacaaccacagctcctagcccccctcgaacctggacaccttggccagcggcagcatcgagttttgctatgccaagcccgaggtccgccgctgctctgcccgctgccccagcttccagccttgcctgcccatccattcgaatgggctgcaccggttgcaccagaacatgcaccacttccacgccatccactcgttgcggcgcttgtaggtgctgctctgcaaagcttgtgtgtgcccaagcctcaagtggccgttctacttggggcaggcgcccatgcactaggctgaccctccggacaagacgcagaatggcaccgtccagcaggtgggggggaaccagccttgaattatcctgttcaagcggcaattcttgtcggctgcgaatgacagggctctcctccagcacctcaccctccactaccccaacactgtgggcactgccagccccagtcagaaatctgctctag

SEQ ID NO: 232945 - DNA, 1191 bp, synthetic construct
  misc_feature 1..1191: note = Description of Artificial Sequence: Synthetic coding sequence
  source 1..1191: mol_type = other DNA
atggcctgcgctggcttgcttaccgtttgcctgctcaggcctcccgctccccagccccagcctcagacccctaggcaccctcagttggcccctgatcccggacctgcaggacataccctctttcaggacgtttttcgtagagccgacaaaaacgacgacggtaaactctctttcgaggagtttcagaattacttcgccgacggcgtcttaagtctgggagaattgcaagaactgttctctggtatcgatgggcaccttacggataacctcgagacagagaaactatgcgactattttagcgaacacctcggggtgtatcgtccagtgctggccgcacttgaaagcctgaatcgcgctgtgctggccgctatggatgcaaccaagttagaatacgagagggcatctaaggtggatcagtttgttacgcgctttctgttgagggagaccgtgagccagctgcaagccctgcagagctccttggaaggcgcttctgatactctcgaggcccaggcacatggctggaggtccgatgctgagtccgtagaggcccagtcccgtctgtgcggcagcaggcgcgcaggcaggagagctctgcggtccgtctcgcgctcctctacatggtctcccggatcatccgataccggtagaagtagcgaagccgagatgcagtggcgccttcaggtgaacaggctgcaggaactcatcgatcagctagagtgcaaggtgcgagctgtgggtccgggtcctcacaaaggcggtcctagttggtatcccccagagcccggaccatgttggcgcccaggcccacacagtgtacctagtcaggccccacggctcgaacccctccgagaggaggatctggcgaaagggcctgacctgcatatccttatggcccagcgccaggttcaggttgccgaggaggggcttcaggacttccatcgcgcacttaggtgttacgtggattttaccggcgcacagtctcactgtcttcacgttagtgctcagaaaatgcttgacggggcttccttcactctctatgaattttggcaagacgaggcatcatggcgcagacaccagcagtctcccggttccaaggcatttcagagaatcttgattgaccatttgagggccccagataccctgaccactgttttcttccctgcatcttggtggattatgaataataactag

SEQ ID NO: 232946 - DNA, 1089 bp, synthetic construct
  misc_feature 1..1089: note = Description of Artificial Sequence: Synthetic coding sequence
  source 1..1089: mol_type = other DNA
atggcctgcgccggattgctcactgtttgccttctgagacctcctgctccccaacctcagccgcagactccgcgtcatcctcagcttgcaccggatccgggtcctgcagggcacaccctgtttcaggatgtcttccgaagagcggataaaaacgatgacggaaaactcagctttgaggaatttcagaactacttcgccgacggcgtgctgagcctgggggagttacaggaactgttcagcgggattgacggccacctgacagacaatttggaaacggagaagctctgtgactatttctctgaacatctgggagtgtacagaccggtgctggcagcccttgagtctctaaaccgagccgttcttgccgctatggatgcaaccaagctggaatatgagcgggcaagcaaggtggaccaattcgtgacgagatttctgctgcgcgagaccgtaagccaattacaagccctacaatctagtcttgagggagccagtgacaccctcgaggcacaggcacacgggtggcgaagcgatgcagaaagcgtggaggctcagtctcgcttgtgtgggtctagacgggctggcagaagggcacttaggtccgtttcaagaagtagcacttggtctcccggtagttctgacacaggcagatcttcagaggctgagatgcagtggcggctgcaggtcaacaggttacaagagctgattgaccaactcgaatgtaaagctccccgtctggagcccttacgcgaggaggatctggctaagggacccgatctgcacattctgatggctcagaggcaggttcaggtggcagaggaaggactgcaggactttcatcgtgcgttgcgctgctacgtcgactttacaggtgcacagagccattgcctgcacgtctctgcacagaagatgctggacggcgcttctttcacactgtatgagttctggcaagacgaagcatcttggagaagacaccagcagagccccggtagcaaggcattccagaggatcctgatcgaccatcttagggcccctgataccctcaccacagttttttttcccgcttcttggtggattatgaacaacaactag

SEQ ID NO: 232947 - DNA, 870 bp, synthetic construct
  misc_feature 1..870: note = Description of Artificial Sequence: Synthetic coding sequence
  source 1..870: mol_type = other DNA
atggcctgtgccggactgcttactgtatgcttgttacgcccacccgctccacagccacaaccacagacccctcggcaccctcagctggcccctgaccccggtccagctggacatacactcttccaagacgtgttccgcagggccgataagaatgacgacggaaagctatcatttgaagaatttcagaactacttcgctgatggcgttttgagcctgggcgaactccaagaattgttttcagggatcgacggccatttgaccgacaacctggaaactgagaagctctgtgactatttctcagaacacctcggagtttataggcccgtacttgccgcactggagtctctcaatagagcagtgctggcggctatggatgctacgaagctcgaatatgaaagggccagcaaagtggaccagtttgtaactagatttctgttgcgcgaaactgtcagtcaactgcaggctctacagtccagccttgaaggcgcaagtgataccctcgaagctcaggcccatggttggcggagcgacgcagaaagtgtggaggctcagtcgaggctctgcggctcccgacgggcaggcagaagagctctgcgaagcgtgtcaagaagctcaacgtggtcccccggatctagcgatacaggacggtcctctgaagccgaaatgcagtggcggctgcaggtgaacagattgcaggagttgatcgaccagctggagtgtaagcatatcctcatggctcagagacaggtgcaggttgctgaagagggtttgcaagacttccatagggcactgaggtgttatgttgacttcactggtgcccagtctcattgtctgcatgttagcgcccagaaaatgctcgacggtgcctag

SEQ ID NO: 232948 - DNA, 423 bp, synthetic construct
  misc_feature 1..423: note = Description of Artificial Sequence: Synthetic coding sequence
  source 1..423: mol_type = other DNA
atggcttccgttgactttaagacgtacgtggaccaggcatgccgggctgccgaggagtttgtgaacgtgtactataccacgatggacaagcgcagaagactgctaagtcgcctgtatatgggtacggccacactagtgtggaatgggaatgctgtgtcaggccaggaaagcctgtctgagttctttgagatgctgccctcgtctgagttccagattagcgttgtcgactgtcaaccagtgcacgacgaggcaaccccaagccaaaccacggttctcgtggtcatctgtgggagcgtcaagttcgagggtaacaagcaaagagactttaatcagaacttcattctcaccgcccaggcaagcccttcaaataccgtttggaagatagcaagtgactgtttccgcttccaagactgggccagctag

SEQ ID NO: 232949 - DNA, 984 bp, synthetic construct
  misc_feature 1..984: note = Description of Artificial Sequence: Synthetic coding sequence
  source 1..984: mol_type = other DNA
atggctgtgcctgcgaagaagagaaaaatgaatttttccgaaagagaggtggagattatcgtggaagagctggaactgaaaaagcacctgctagtaaaccactttaacgccggtgtgccactcgctgccaagtcagccgcatggcatggcatcctgagacgggttaatgccgtcgcaacatgccgtcgggagctgccagaagttaaaaagaaatggagcgatctgaagacagaggtacgcagaaaggtggcccaggttcgggcagccgttgaaggaggggaggcccctggtcccaccgaggaggatggcgctggcggacccggaactggtgggggatccggcggtggaggcccagccgtagcgcctgtacttcttacccccatgcagcaaagaatttgtaacctgctcggtgaagcaactatcatctcattaccaagcaccacagagatacaccctgtggcccttgggccatctgcaactgccgcagccgctacggttactttgacgcaaatcccgactgaaaccacctatcatacgctggaggaaggcgttgttgaatattgtacagccgaagcgccacccccactccctccagagacaccggtagacatgatggcccagcacgcggacaccagcgttaaaccccaggcactgaagtcaagaattgctctaaatagtgcaaagctgattcaggaacagagagtcacaaatcttcatgtgaaagaaatcgctcaacatcttgagcagcagaacgatcttctacagatgatccgcagatctcaggaggtgcaggcctgcgcccaggagcgacaagcacaggctatggagggcacgcaagccgcactgagtgttctgatacaggttcttcggccaatgatcaaagatttccgccgttacctgcaatctaataccgccaatcctgctccagcttcagaccctggtcaggtggcgcagaacgggcaacccgactctatcatccagtag

SEQ ID NO: 232950 - DNA, 1485 bp, synthetic construct
  misc_feature 1..1485: note = Description of Artificial Sequence: Synthetic coding sequence
  source 1..1485: mol_type = other DNA
atggaagtcgtcgaggctgctgcagcccaactggagacgcttaaattcaacggcactgattttggcgtcggcgaggggccagcggctccttctccagggtcagcccctgtcccaggaacacagcctcccctgcagagtttcgaggggtccccggacgcgggacagacagtagaagttaaaccagctggcgagcagcctctgcagcctgtgctcaacgcggtggctgctggcactcctgcccctcagccccaaccaccggctgagtctcctgcatgtggagattgcgttacaagtccgggtgcagcagaacctgcacgggcacctgacagtctggagacgagcgactccgactcagatagcgatagcgagaccgattctgatagctcttcttcttcatcctcctccagtagctcaagcagctcaagcagcagttcctgcatctctcttcccccagttttgtctgatggggacgatgacctgcagatcgagaaggaaaataagaatttcccacttaaaaccaaggatgaactccttttaaatgagctgccatccgttgaggagttgacaatcatcttaccagaggacattgagctgaaaccgctgggaatggtgagctctattattgagcagctcgtaattatcgaaagcatgacaaacctgccccctgttaacgaggagacggtaatattcaagtctgacagacaggctgcaggcaagattttcgagatctttggaccagtggcccaccccttctatgtgctgaggttcaactcctcagaccacatagaaagtaaaggaatcaagatcaaggagacgatgtatttcgctccctcgatgaaggatttcactcagtatatcttcaccgagaagctgaagcaggacaagggaagcgatgcttcttggaagaatgaccaggagccccctccagaagctcttgacttctctgacgatgagaaagagaaagaagctaagcaacggaaaaagtcacagatacagggaaggaagaaacttaaatcagagttcaacgagcccggagaagattttaccgaggtgcatcagaactggaacgcccacagctccgcctccgagcacgcaaagggctaccgaaaccgcgagtttacccggggattctctcgcgcacgatatccaaggtcttgtcacggcagaccaccaccacagcatttctacaactctgagcacatggtatctcaggagacgagcgggtttcccagtcagagacagaacaatcccatcatgcctcaatatccattcccactgcccgtgttcgacatgcataatttcccactacgaccccctcctccacctccccctcctcccgtgaacatgggatgggccacaccaaacatggcagctcatcctctgctgaacctgccttatagtcttcctcctccaccccctcctccgccacttccacctccaccctcaagcggcgactctaatagccactttggaccatattattag

SEQ ID NO: 232951 - DNA, 1170 bp, synthetic construct
  misc_feature 1..1170: note = Description of Artificial Sequence: Synthetic coding sequence
  source 1..1170: mol_type = other DNA
atggaggtagtggaagctgcagccgctcagttggaaacacttaagttcaatggtaccgattttggggtaggtgaaggaccagcagccccttcccccggtagtgctccagtgcctggtactcagccccctttacagtctttcgagggatcgcctgacgcgggtcagacagtggaggttaaacctgctggagagcagcccctgcagcctgttctaaatgccgtggcggcaggtactcctgctccccagcctcagccccctgcagaatcacctgcctgcggcgattgtgtgacctcccctggcgcagcagagccagccagggcgccagactctctagaaacgagtgattcagattccgactccgacagtgaaacagattcagatagtagctcttcttcgagtagttcctcttccagctcatcttccagctcttcatcttgtatttctttgccccctgttctatcggatggtgacgacgaccttcagatcgaaaaagagaacaagaatttcccactgaaaacgaaagacgaacttcttctgaatgagctcccaagtgttgaggaactgaccataattctgcccgaagacatcgagctgaagcctttgggcatggtgtcctctatcatcgaacagctagtaattatagagtccatgaccaacctgccgccagtgaacgaggagacggtgatattcaaatccgatcggcaagcggcagggaaaattttcgaaatttttggcccagtggcccacccattctacgtgttaagattcaacagctcagatcacatagagagcaagggcatcaaaatcaaagagactatgtacttcgcacctagtatgaaggatttcactcaatacatcttcaccgagaagctgaagcaggataaaggctcggacgcatcgtggaaaaacgatcaggaacctccacctgaggcgctagatttctctgacgatgaaaaggaaaaagaagcgaaacagcgaaagaagagtcaaatacaggggaggaaaaagctgaagagcgagtttaacgagcctgggacggggatttcacacaggtactgcggactgggctctcgacccctgcagtctagcgagtctcacaagttgttcgggttccagatgcacattaaggtgaccttcacatgctacttttccctcttaagcatgcaatag

SEQ ID NO: 232952 - DNA, 345 bp, synthetic construct
  misc_feature 1..345: note = Description of Artificial Sequence: Synthetic coding sequence
  source 1..345: mol_type = other DNA
ctcgcatccagattgggaccggttagtactgcaaacatgtcaagacccgtgaggaaccggaaggtggtcgattattctcaatttcaggaatctgatgatgcagacttcgagtctgaagactctgaggacaaagatgtaaaaacaaaaaaggatgacagccactccgccgaggactctgaagacgaaaaagaagaccataaaaacgtgaggcaacagaggcaggccgcttctaaggctgcatcaaagcagcgggaaatgctgatggaggatgtcggaagtgaagaggagcaagaagaggaagacgaggccccattccaggagaggaaggacagcttctctcagtag

SEQ ID NO: 232953 - DNA, 732 bp, synthetic construct
  misc_feature 1..732: note = Description of Artificial Sequence: Synthetic coding sequence
  source 1..732: mol_type = other DNA
atgtcacggcctgtaagaaacaggaaagtggtagactatagccagtttcaagagtcagatgacgccgacgaggactatgggagggacagcgggcctcctactaagaagattcggtcctcgccgagggaagccaagaacaaacgacggtccggtaagaacagccaggaggattccgaggactccgaagataaagacgtgaaaacaaagaaggatgattcccattcggcggaagattccgaggacgagaaagaggatcacaagaatgtcagacaacaaagacaggccgctagtaaagctgccagcaaacagagggagatgctgatggaggatgtcggctccgaagaagaacaagaggaggaggacgaggccccattccaggagaaggactctgggtcagacgaggatttcttaatggaggatgatgatgacagtgactatgggtctagcaagaagaaaaacaagaaaatggtcaaaaaatccaagcccgagagaaaggaaaagaagatgccgaaacccagacttaaagcaactgtgactccctcccccgtcaaagggaagggtaaagtaggtcgacccacggcttctaaggcatctaaggagaagacccctagcccaaaagaggaagatgaggagcctgagtctccccctgagaaaaaaactagcacatccccaccacctgagaagtcgggggatgaaggaagcgaagatgaggccccttccggcgaggattag

SEQ ID NO: 232954 - DNA, 1122 bp, synthetic construct
  misc_feature 1..1122: note = Description of Artificial Sequence: Synthetic coding sequence
  source 1..1122: mol_type = other DNA
atgtccccatgcccgcctcagcagagtagaaaccgcgtgattcagctgtccactagcgagctgggggaaatggaattgacctggcaggagattatgtccataactgagctccagggactgaatgcccctagcgaaccgtcttttgaaccgcaggcgccagccccttacttaggtccaccgcctccgacaacttactgtccatgttctatacacccagattctgggttccccctgcccccacccccatacgaactccccgcatcaacttcccatgtgcctgacccgccttacagctatggtaacatggctatccccgtctctaaacccctcagcctgtccggcttgctgagcgagcctcttcaggatcctctggccctgttggacattggtctccctgccggtccgccaaagccgcaagaggatcctgagtcagactctggactgtcgctcaattactccgatgccgagtcactggagcttgagggtaccgaagccggaagaagacgaagcgagtatgtggagatgtaccctgtggagtatccctattccttgatgcccaactctctagcccactctaattataccctgcccgctgctgagacgccactggcccttgagccaagttcaggcccagtgagggccaagccaaccgccaggggcgaagcgggatcaagagatgagcgcagggcactggccatgaagattccattcccaaccgataagatcgtgaatctcccggtcgacgactttaatgaactgctggcccgatacccactgactgagagccaactggccctagtccgggatatcagacggagaggaaaaaacaaagtcgctgcccaaaattgtcggaaacgcaaactggagaccatcgtgcaactcgagcgcgagctcgaacggttgacgaacgagcgcgagagattgttgcgggctcgcggagaggctgatcgaactttggaagtgatgcggcagcagctaaccgaattgtatagggacatctttcagcacctgcgagatgagtctggcaattcttattcaccggaggagtacgccctgcaacaggctgccgacggtacgattttcctcgtgccgagagggactaaaatggaggccaccgactag

SEQ ID NO: 232955 - DNA, 1122 bp, synthetic construct
  misc_feature 1..1122: note = Description of Artificial Sequence: Synthetic coding sequence
  source 1..1122: mol_type = other DNA
atgagcccatgccctccccagcagtccagaaaccgcgtcatacagcttagcacttccgagctgggggagatggaacttacttggcaggagatcatgagcattaccgagctgcaaggcctaaacgcaccttcagaaccaagctttgagccccaggctccggctccatacctggggcctcctccaccaacaacatactgtccatgcagcatccaccccgattccgggtttcctctgccgcctcccccttacgagcttcccgcaagtacatcccacgtgcctgaccccccttactcctatgggaatatggccattcccgtgagcaaacccctgtcactgtctggcctcctgagcgagcctctgcaggatcctctagccttactggatatagggcttcccgcaggaccacccaaaccacaggaagaccctgagagcgatagcggcctgagcttaaactattccgatgccgaaagccttgaactggaagggactgaagcaggcagacgacgctctgagtatgttgagatgtaccctgtcgaatatccgtacagtttaatgcctaacagccttgcccacagcaattacactctccctgctgccgaaactcctctcgcccttgagccaagttccggccctgtgcgggctaagccaaccgcgaggggtgaggccggatccagagatgagagaagagccttagctatgaaaattcccttcccaacagacaagatcgtcaacttgcccgtcgatgactttaacgaactccttgctcgctacccactgactgaatcccagttagctctcgtgagagacattagacgaagaggcaagaataaagtcgctgcccagaattgtaggaagcgtaagctggagacaattgtgcagcttgagagggaactggagcgcctgacgaatgagcgggaacggctcctcagggccaggggggaggccgacaggacgctggaggtcatgaggcagcaattgacagagctgtaccgtgatatctttcaacacctccgcgacgaatcagggaacagctattcgccggaggagtacgctctccagcaggctgccgatggaaccatctttctggttccacggggaaccaaaatggaagccactgactag

SEQ ID NO: 232956 - DNA, 1122 bp, synthetic construct
  misc_feature 1..1122: note = Description of Artificial Sequence: Synthetic coding sequence
  source 1..1122: mol_type = other DNA
atgtcaccttgtcctccccaacagagccgaaatagggtgattcagctgagcacctcagaattaggcgagatggaactcacctggcaggagatcatgtctattaccgagctgcaaggcctaaatgcgcctagcgagccgtctttcgaaccacaggcccctgctccgtacctgggccctcctcctccaactacttattgcccatgttccattcaccccgactctggcttcccactgcctcctccgccttacgagctgcccgctagtacctcacacgttccagacccaccgtattcctacggtaacatggcaataccggtcagtaagccactgagtctctccgggctgctttcagagccgctgcaggatcccctggcactgctggacatcggtttacctgcagggccacccaaaccacaggaggaccccgagagcgacagtggcctgtctttgaattactcggacgccgagtccctcgagttagaaggaaccgaggcaggcagaagaaggtcagaatacgtggagatgtaccctgtagagtatccttactctctgatgcctaattctctcgcacatagcaactatactctgccagccgcagaaacccctctagctcttgaaccatcttccggaccagtacgtgccaagccgacagcacgaggtgaagcaggtagcagggacgagcgtcgcgcactcgctatgaaaatcccctttccgaccgacaaaattgtgaacctgccagtcgacgattttaacgagcttctggctcggtaccctctgactgagtctcaacttgctctggttagggacatcagacgcagaggtaagaataaagtggccgctcagaactgccggaaacgaaagctggaaacaattgtacagctagagcgcgagctggagcggcttaccaatgagcgcgaacgcctgcttcgagctagaggcgaggccgatcggacgctcgaggtgatgcgacagcagttgacggaactttatcgggacatctttcaacatttgagggatgagagcgggaacagttactcccctgaggagtacgccctgcagcaagccgcagacggaactatttttctcgtgcccaggggaaccaaaatggaggcaaccgattag

SEQ ID NO: 232957 - DNA, 1122 bp, synthetic construct
  misc_feature 1..1122: note = Description of Artificial Sequence: Synthetic coding sequence
  source 1..1122: mol_type = other DNA
atgagcccatgtcctccacagcaatcacggaacagggtgatccaactgagcactagcgagctgggagagatggagctcacatggcaagagatcatgtcgatcactgagttacaggggctgaatgccccatcagagccaagcttcgaaccccaggctcctgccccatatctcggaccccctcctccaacaacctattgtccatgtagtattcatcctgattccgggttccccctgcccccaccaccctacgagcttccagccagcacatcccacgtccctgaccctccttattcctacgggaacatggcaattcctgtgagtaagcccctgtccttaagcggcttgctgtctgaaccactgcaagaccccctcgccttgctggatatcgggctacctgccggaccacctaaaccccaagaggacccagagtccgactcgggcctgtccctcaactacagcgacgctgagtcactggaattggagggaacggaggccggtcgtcgtaggtccgagtatgtcgaaatgtaccccgtagagtatccctactccttgatgccaaactccctcgcccactcaaactatactcttcccgctgcagagacccccctggccttggagccatcttccgggccagtgagggcgaagcctaccgcgaggggcgaagccggatcacgcgacgagagaagagcactggctatgaagattccttttcccaccgataaaattgtaaatctgccggttgacgactttaacgaactgctggcaagataccctctcaccgagtcccagcttgccctcgtgcgggacatccgccgacgcggaaagaataaggtggctgctcagaactgccggaaaagaaagctcgagacaatcgtacagctggaacgagagcttgaaagactgacaaacgagcgcgagaggctgttgagagccagaggagaggccgataggacgctcgaggtgatgcgtcagcagctgacagagctctaccgtgatatctttcagcatctgagagacgagagtggtaatagctactcccccgaggagtacgccttgcagcaggccgcagacgggaccatttttttggtgcccaggggaactaagatggaggcaaccgattag

SEQ ID NO: 232958 - DNA, 1032 bp, synthetic construct
  misc_feature 1..1032: note = Description of Artificial Sequence: Synthetic coding sequence
  source 1..1032: mol_type = other DNA
atgtcaccgtgtccgcctcagcagagcagaaaccgcgtgattcaactctcaaccagtgaacttggagagatggagcttacatggcaagagattatgtcaatcaccgagttgcagggcttgaatgctccctcagaaccttccttcgaaccgcaggctcctgccccatacctaggaccccctcctccaactacatattgtccctgctccattcacccagattctgggtttcctctccccccacccccatatgaactgcctgcctctactagccatgtgcctgaccctccatattcatacggcaacatggccatccccgtctccaagccattgtcactatctggcctcctgagcgaacccctacaggaccccctcgccttgctggatatcggtctgcctgcagggccaccaaagccccaagaggaccccgaatccgacagtggactgagcctgaactactctgacgcggagagccttgagcttgaaggcacggaggcaggaagaagacgcagtgagtatgtcgagatgtacccagtggaatatccgtacagtctgatgcccaactccctggcacattcgaactatacgttgcccgctgccgagacaccactggctctcgaaccttcttcgggccctgtccgagcaaagcccacagcccgaggggaggctggatctagagacgagcggagagcacttgccatgaaaattcccttccccacagacaagatcgttaatctgcccgtcgatgatttcaacgagttactggccaggtaccctttgacagaaagccaattggctctggtgcgagacattagacgcaggggaaagaacaaggtggctgcccaaaactgcagaaagaggaaactcgagactattgtgcagttggagagggagctcgaacggctgacaaatgaaagagaacgcctcctacgggctcgcggtgaggccgaccggactctggaggtcatgcgccagcagctgacggagctctaccgggacatcttccagcaccttagggatgaaagtgggaactag

SEQ ID NO: 232959 - DNA, 2229 bp, synthetic construct
  misc_feature 1..2229: note = Description of Artificial Sequence: Synthetic coding sequence
  source 1..2229: mol_type = other DNA
atgctgagtcttaaaaaatacctcactgaaggtcttctgcagttcacaattttgctaagcctgatcggcgtacgtgttgatgttgacacctaccttacctcacaacttcccccattgcgtgaaattatactgggtcccagctcagcctatactcagacacagttccataacttgagaaacaccctcgatggttacggtatccaccccaagagtatcgatctggacaattatttcactgctcggagactccttagccaggttagggctttggataggttccaggtccccaccactgaggttaacgcctggttggtgcacagggaccctgaagggagtgtgtctggctcccagccaaatagcgggctggcactggagagtagctccggtcttcaggatgtcactggaccggataatggcgttagagaatccgaaactgaacaggggtttggcgaagatctcgaggacctgggagccgtggcacccccagtgtcaggggacctgacaaaggaggacatcgacttgatcgacattttgtggcggcaggacatagatcttggtgctggcagagaagtttttgactactcacaccgccagaaggagcaggacgtcgagaaagagttgcgtgacggaggcgagcaggatacttgggctggcgagggagccgaagccttggctcgtaatctgctggtggacggagaaacaggagaatccttccccgcacaattccccgcagacatcagcagtattactgaagccgtgccaagtgagagtgagccccctgcattacagaacaacttgctgtctcctctcttaacaggcacggagagcccttttgatctggagcagcagtggcaggacctgatgtctatcatggaaatgcaggccatggaggttaacacatcagcgagcgaaatcttgtacagtgcacctccaggtgaccctctgagcaccaattattcattggccccaaacacgccaataaaccagaatgtgagcttacaccaggctagtctgggaggctgcagccaggatttcttactcttctcgccggaggtagaatctctgccagtggcgtcttcctcaactctactgcctctggctccctccaactctacctccctgaattcaaccttcggttctacgaatcttaccggcttatttttcccacctcagctcaacgggaccgccaatgatacagctggaccggaacttccagaccctctgggaggcttgctcgacgaggcgatgctggatgagatttccctgatggacctcgccatcgaggaaggcttcaaccctgtacaggcctcacagttagaagaagaatttgatagtgattctggactgtcgctggactcgagtcacagcccatcgagcctttcctctagcgaggggagtagtagcagcagttcaagctcgtcaagctcttcatcctccgcatccagcagcgcgtcctcctcattttcggaggagggtgccgtcggttactcgagcgatagtgaaacattggacctggaggaagcagagggagccgttggttatcagcccgagtatagcaagttttgcagaatgtcatatcaggaccccgctcagctgtcctgcttgccataccttgaacatgttggtcacaatcacacgtacaatatggccccttcggctctggactccgccgatctgccgccaccgagcgctttaaagaagggcagcaaggagaagcaggccgacttcctggataaacagatgagtagggacgaacatcgtgcacgggcaatgaagattcccttcaccaatgataagattatcaatctgcctgtggaggagtttaatgaactgctgtctaaataccagctctcagaggcccaactcagtctgatccgcgatatccgccgtcgtggcaaaaataagatggccgctcagaactgtcggaagcggaaactggacaccatcttgaacctcgaaagagatgtcgaagacctccagagggacaaggctcggctgttacgcgaaaaggtagaattcttaaggtcccttcgccagatgaagcagaaggttcaaagcctttatcaggaggtgtttggtaggctgcgtgacgagaatggtcgtccttatagcccttctcagtacgccctgcaatacgctggggacggatccgtattgctgatccctcgaacgatggcagaccagcaggctaggagacaggagaggaaaccaaaagatagacggaaatag

SEQ ID NO: 232960 - DNA, 2319 bp, synthetic construct
  misc_feature 1..2319: note = Description of Artificial Sequence: Synthetic coding sequence
  source 1..2319: mol_type = other DNA
atgctcagccttaagaaatatttgaccgaaggactactgcaattcacaatactgctgagtttaatcggggtgcgggtagacgtggatacgtatctcacatcacagcttccgcctttgcgcgagattatccttgggccaagtagcgcatacactcagacccagttccataatttgcggaacacactggatgggtacggtattcaccccaagtcaatagatctagataattattttacggccagacgactgctctcccaggtgcgggcactggatcgattccaagtgcctacaacagaggtcaacgcctggctggtgcaccgagatcccgaggggtccgtaagcggcagccagcctaactctggactggccttggagtcgtctagcgggctgcaggacgtgacagggcctgacaacggggtgagggagtcagagaccgagcaaggctttggtgaagatctggaggaccttggcgcagtagccccaccagtgagtggtgatctgactaaggaagatatcgacctgatagatattctgtggcgacaggatattgatttgggagccggaagggaagtgttcgattactcgcaccgccaaaaggagcaggatgtcgagaaagaactaagggacggaggggagcaggatacctgggcaggggagggggctgaagcactggctcggaacctcttggtcgatggcgaaacaggagaaagtttccccgctcaagtgccgtctggtgaagaccagaccgccctgagcctggaagagtgcctgaggttactggaagcaacttgcccttttggagaaaacgccgagttccctgcggatatcagttccattacggaggcggtgccgtccgaaagcgagccgccagcactacagaacaatctgctgtcgccactcctgaccggtacagaaagccccttcgacttggagcagcagtggcaggacttgatgtccatcatggagatgcaagccatggaagtgaatacttccgcaagcgaaatcctctattcagccccaccgggtgacccgctgtctacgaactatagcctagcacccaacactccaattaaccaaaacgtcagcctgcaccaggcctccctcggagggtgtagccaggatttcctactttttagtcctgaggtggaatcactgccagtcgctagctcctctactctactgccgctggccccatcgaacagcaccagcttgaattccacctttgggtctaccaatctaacgggtttattcttcccgccacagctgaacggcaccgctaatgatactgctgggccagagctccctgatcccctagggggattactcgatgaggcaatgctggacgagattagcctgatggacttggccattgaggaaggcttcaaccctgtgcaggcctcacagcttgaagaagagtttgattcggattccgggcttagtctcgattccagccattctccaagtagcctttcttcttccgaaggcagcagttccagtagctcatcatcttcctccagctcaagctctgcctcatcatcagcttccagtagcttctcagaagagggagctgtggggtatagttccgactccgagacacttgacttagaggaagcagagggggcagtcgggtaccagcctgaatacagcaagttctgtagaatgagctatcaggacccagcccaactctcgtgcctgccttaccttgaacatgtgggccataaccatacttataacatggcaccgagcgctttagattctgcagacctgccgcctccttctgcccttaaaaagggaagcaaagaaaaacaggctgattttctggacaagcaaatgagccgcgatgagcatagggccagagctatgaagattccgtttaccaacgataagatcattaatcttccggtggaggagttcaatgaactgctctctaagtaccagcttagtgaggcacagttgtccctaatccgggacattcggaggcgcggtaaaaacaagatggccgcacaaaattgccggaaaagaaagctggataccattctgaacctggaacgcgatgtggaggatctccaacgggataaggcaagattactccgggagaaagtcgaatttttaaggtccctccggcaaatgaaacagaaagtccagagcctctaccaagaagtcttcgggagactgagagacgagaacggcagaccttacagccctagccagtacgcactacagtacgctggagacggctctgtcctcctgatccccagaacgatggctgatcagcaggcaagacgacaagagcgaaagccaaaagatagaagaaaatag

SEQ ID NO: 232961 - DNA, 2376 bp, synthetic construct
  misc_feature 1..2376: note = Description of Artificial Sequence: Synthetic coding sequence
  source 1..2376: mol_type = other DNA
tttgtcttctggaagattctgaaaaccaaaaagcacaaacactctgggccatccgcgatgctttcattgaaaaagtacctgacagaaggcctcctgcagttcaccatcctgctttctctgattggggtccgcgtggacgtggatacttatctcacttcccagctgccacctttgcgggaaattatccttggaccctcgtccgcctatacccagacacagtttcacaacctgcgcaacacacttgacggttatggcatccaccccaaatcaatcgacctcgataactacttcaccgcgaggcgtctgctgagtcaggtgcgggctcttgatagattccaggttcctaccaccgaggtgaatgcctggctggtgcatcgggaccccgaggggtcagtgtcaggctctcaacccaattcaggtctcgccctcgaaagttcgagcggtctgcaggatgtcaccggcccagacaacggtgtgagggaaagtgagaccgaacagggcttcggcgaggacctcgaggacctgggcgcagtagccccaccggtttccggagacctgacgaaagaggatatcgatctcattgatattctgtggagacaggatatcgatcttggcgctgggcgagaggtgtttgactactcccatagacagaaggaacaagacgtggaaaaggaactcagagatgggggagagcaagatacttgggccggtgagggagcggaggccctggctaggaacctgttagtcgatggggagactggcgaaagttttccggctcaagtgccttcaggcgaggatcagaccgcgctgagccttgaagagtgtttacgcctcttagaggccacctgtcccttcggcgagaacgctgaattccctgccgatatctcctccattaccgaagctgtgccgtctgagtccgagcccccagccctgcagaataaccttctcagccctctcttaacgggcaccgaatcaccctttgacctggaacaacagtggcaggacctgatgtcaatcatggaaatgcaggctatggaagtgaacacgagtgcgtccgagattctgtatagcgcgcctccgggagatccacttagtacaaattattcactggcccctaatacaccgattaatcagaacgtatccctacaccaggcctctctcgggggatgctcacaggattttcttctgttttctccagaagtggaaagtttgccagtagccagttcttccacactactacctctcgcccctagcaactcaacctccctgaatagcactttcgggtccaccaatctgaccggtctgtttttccccccacagctcaatggcacggcaaatgacacagccggaccggaacttcctgaccctctagggggattacttgacgaagcgatgctggacgagatttcactgatggacctcgctattgaggaaggattcaatcctgtccaggcgagccaacttgaagaagagttcgattctgattccggtttgagtctggacagttcgcactcccctagtagtctgtcaagctccgagggctcaagctcctcttcttctagttctagctccagttcatccagcgccagctcttccgcctccagctcattctctgaggagggagctgtggggtactctagcgacagcgaaactctggacttggaggaggccgagggggctgtgggttaccagcctgaatattcaaagttttgtcggatgtcatatcaagatccagcccagttatcttgtctgccgtatctggagcacgtgggtcataatcatacgtacaacatggcaccatccgcactggatagtgcagatctgcctcccccttctgcattgaaaaagggcagcaaagagaaacaggcagatttcttagacaaacaaatgtcacgcgatgaacacagggccagggccatgaagattccattcacgaacgacaaaatcatcaatctgcctgtggaagaatttaatgagcttttaagcaagtaccagctgtcggaggcccagttatcgctgatcagagacatcagacgacgcggaaaaaataaaatggcagcacagaattgtcggaaaaggaaacttgacacaattctgaacctggagcgggatgtggaggatttgcagcgcgataaggccagactgctccgagagaaggttgaattcctgagatccctgaggcagatgaagcagaaggtccaaagtttgtaccaggaggtttttgggagattgcgcgatgagaacggacgcccatactcaccctcccagtacgccctgcagtacgccggagacggaagcgtcctgcttatccctcgaaccatggcagaccagcaggctagacgacaagagaggaaaccaaaggaccggagaaagtag

SEQ ID NO: 232962 - DNA, 1851 bp, synthetic construct
  misc_feature 1..1851: note = Description of Artificial Sequence: Synthetic coding sequence
  source 1..1851: mol_type = other DNA
atgactaggttagacaggtcaagccactcaggtggtggccacgccaaaggatcccggcctctcaactcactgctcgccggacatagagtggcacagcctgcaagcgccccagggagtcgcgcttctgtgcaggatattgacctgattgatattttgtggagacaggatatcgatctcggtgctggcagagaggtcttcgactattctcaccgtcagaaggagcaagatgtcgaaaaggaacttcgagatggtggcgagcaggacacgtgggcaggagaaggcgcagaagcgctggccagaaatctgcttgtggatggagagaccggtgaatccttccccgctcagtttccggctgatatcagcagcattacagaggcggtgcctagcgaatcagagcctccagccctccagaataatttgctgagccctctgcttacaggcacggagagccctttcgacctcgagcagcagtggcaggatttgatgtccatcatggagatgcaggcaatggaagtgaatacaagcgcgtcggagattctatacagtgcaccacctggagacccactctcaaccaattattctttggctccgaatactccaattaaccagaatgtctccctgcaccaagcaagcctgggtggctgtagccaagactttctgctgttctcccccgaagtggaatctctgccagtggctagttcttcgacgttgctgcctctggctccatccaattctacttccctaaattcaactttcgggtctacaaatctaaccggacttttttttcctccacagctgaacggcacagctaacgacacagctggtcccgaactccccgacccactggggggactattagacgaggctatgctggatgaaatcagtttgatggacctcgccatcgaggaggggtttaacccagtacaagcctcccagctggaggaagagttcgacagtgatagtgggctgagcctggacagcagtcatagtcccagctcgttatcctcatccgaaggttcaagcagcagctcttctagcagcagctcatccagtagctctgccagcagtagtgccagctcatctttctctgaagagggagctgtgggctattcaagcgattcagagacactcgacctggaggaggccgagggggcagtgggttatcagccagaatattctaagttctgcaggatgtcttaccaggacccggcacaactgtcctgcctaccttatctggagcacgtcgggcacaaccatacctataacatggctccatcggctctcgatagcgcagatctccctcccccttctgccctcaaaaaagggtcaaaggagaaacaggcagacttccttgacaagcagatgtctcgggacgagcaccgagcacgggctatgaaaatccccttcactaacgacaagatcatcaacctgcccgtcgaggagtttaatgagcttctgagtaagtaccagttgagcgaagcacagctttcattaatacgagacattcgcaggaggggaaaaaataagatggcagcacagaattgccggaaaagaaagctggatacaattctcaatctggagcgtgacgtggaggatctgcagcgtgataaagcccgactcctccgcgagaaggtggagttccttcgaagtctgagacagatgaaacagaaggttcagtctctgtatcaggaggtgttcgggcgactgcgcgacgagaacggccgaccttattcaccttcccagtacgcactgcagtatgctggtgacgggtctgtgctcctcatacctcgcacgatggccgatcaacaggcacgccgacaggagcgcaagcccaaggatcgcaggaaatag

SEQ ID NO: 232963 - DNA, 1818 bp, synthetic construct
  misc_feature 1..1818: note = Description of Artificial Sequence: Synthetic coding sequence
  source 1..1818: mol_type = other DNA
atgatggacctggaacttccacctccagggctgccttcccagcaggacatggacctaattgatatcctgtggcggcaggatattgatctcggtgtctcccgagaagtgttcgatttttcccagagacggaaagagtacgagttagagaaacagaaaaaacttgaaaaggagcgacaggagcagcttcagaaggagcaggaaaaggccttcttcgcccagctgcaattagacgaagagaccggagaattcctacccattcagcctgcgcagcatattcagtctgagacatccgggtcggcaaattactcacaggtagctcatatacccaaatcagacgccctctacttcgatgactgcatgcagctcctggcacagacatttccttttgtagatgacaatgaggtgtcctcggctacattccagtcactggttccagacatccccggacacattgagtctcctgtcttcatcgcaacaaaccaagctcagtctccagagacatctgtcgcacaagtagccccagtggacctggacggaatgcagcaggacattgagcaggtatgggaggaactgctctccattcccgagcttcagtgtctcaacattgagaatgacaagctcgtcgagaccacaatggtaccatcacctgaagccaaactgaccgaggtcgacaattaccatttttactccagcatcccttctatggaaaaggaagtgggcaattgttccccacacttcctgaacgctttcgaagactccttcagtagcatccttagcacagaggatcctaatcagctcacagtaaacagtctcaactccgatgcaaccgtaaacactgactttggggacgagttctactctgcatttattgccgaacccagtattagcaattccatgccctccccggctacattgtcccattctctctctgagctgctgaacggccctatagatgtctctgatctaagcttatgcaaagctttcaaccaaaaccatccagaatctacggccgaattcaatgactccgacagcggcatttccctgaatacaagcccgagtgtcgcatctccagagcactccgtggagtctagcagttacggcgataccctgctcggcctcagtgactctgaggtagaagaactcgactcggccccaggatccgtaaagcaaaacggcccaaagactcccgtccatagctctggggatatggtacagccgctgagccctagccaggggcaaagcacccacgtccatgatgctcagtgcgagaacacccctgaaaaagaactccccgtatcacccggtcacaggaaaacccccttcactaaggacaagcattcttcaaggctggaggcacatttaacacgggatgagcttcgggctaaagctctgcatatccccttccccgttgagaagattattaacttaccggtggttgactttaacgagatgatgagtaaagagcagttcaacgaggcgcagctcgcactaatccgggatatcaggcgcagagggaagaacaaagtggcggctcagaactgtcgaaagcgcaaactggaaaacatcgtagaattagagcaagacctggatcatcttaaggacgagaaagagaaactattaaaagagaaaggagaaaacgataagtccctccacctgcttaagaagcagttgagcaccttatacttggaagtcttcagcatgctgagggatgaggacggaaagccctacagcccctccgagtacagtcttcagcagaccagagacggaaacgttttcctcgttccgaagagcaaaaagccggacgtgaagaagaactag

SEQ ID NO: 232964 - DNA, 1770 bp, synthetic construct
  misc_feature 1..1770: note = Description of Artificial Sequence: Synthetic coding sequence
  source 1..1770: mol_type = other DNA
atggatctgattgacatcctgtggagacaggatatcgacttaggcgtcagccgcgaggtgttcgacttcagccagagacgaaaggagtatgaacttgaaaagcagaagaagctggagaaagaaagacaagaacaactgcagaaggaacaggagaaggctttctttgctcagctccagttagacgaagagacaggggaatttctcccaattcagcctgcccaacatatacagtccgaaaccagtgggtctgcgaattactctcaggtcgcccacatcccaaaatccgacgctttatacttcgatgactgtatgcagctcctggcccagacttttccctttgtggacgataatgaggtttccagcgcaaccttccagtccctagttccggatatccccggacacatagaaagccccgtcttcatagcaacaaatcaggcacagtcgccagagacctcagtggctcaggtggcccctgtagatcttgacgggatgcaacaggacatcgaacaggtctgggaggaattgctgagtatccccgagcttcagtgcctgaatattgagaatgacaagctggtggagactacaatggtgccctcaccggaggctaagctcactgaagttgacaactatcacttttactcatctattccctctatggagaaggaggtcgggaattgctccccacatttcctcaatgcctttgaggactcgttctcctcgattctgtccaccgaagaccccaatcaactcaccgtgaacagcctgaactcggacgcaaccgtcaataccgacttcggcgacgagttctactccgctttcattgccgaaccgtcgatcagtaatagcatgccttcgcctgctactttgtcccactctctgtctgagctgctgaacggaccaatagacgtgagcgatctgagcctctgtaaggcttttaaccagaatcaccctgagtctactgccgaattcaacgatagcgactccggtattagcctgaatacaagcccatcagtggcctcgcctgaacatagtgttgagtcctcttcctacggcgatacattgctcgggttatccgactctgaggtagaggaactggattctgcgccaggctcagtgaaacagaacgggccaaagacacctgtgcacagttcgggggacatggtgcagcctctcagtcctagccagggtcagtcaacccacgttcacgatgcacagtgcgaaaatacccctgagaaggagctgccagtttcccctggccacagaaaaacacccttcaccaaggataagcatagctccaggctggaggctcacctgactagggacgagctgagagctaaggccctgcacataccattcccagtcgagaaaattataaacctcccagtggtagactttaacgaaatgatgtccaaggaacagttcaatgaagctcagttggctttgataagggatattcggcgaagaggtaaaaacaaggtggccgcacagaactgcaggaaacggaagttagagaacatcgtggagctggagcaagatctggatcatctgaaggacgaaaaggagaagctgttaaaggagaagggagagaacgacaagtctctccatttattaaagaaacaacttagcacattatatctggaagtgttctccatgttgagagacgaagacggcaaaccatatagcccttccgagtactccctgcagcagaccagagatggaaatgtgtttctagtgcccaagtccaagaagccagacgtgaagaaaaactag

SEQ ID NO: 232965 - DNA, 705 bp, synthetic construct
  misc_feature 1..705: note = Description of Artificial Sequence: Synthetic coding sequence
  source 1..705: mol_type = other DNA
atggacctcatcgacatcttgtggagacaggacatcgatctgggcgtatcgcgcgaggtttttgatttttctcagagaagaaaagaatatgagttggagaaacagaagaagttggaaaaggaaagacaggaacagctccagaaggaacaggaaaaagccttcttcgcacaactccagctcgatgaggagacaggcgaattcctgccaatacagcccgctcaacatatccagagcgagacgtccggttcagccaattactcccaagtcgcacacattcctaaaagtgacgccctgtacttcgacgactgtatgcaattattggcgcagacttttcctttcgtggacgacaacgaagtaagcagtgccacctttcagtctctcgttccagatataccaggacacatcgaaagccctgtttttatcgccactaatcaggcacagagccctgagacttctgtggcacaggttgctccagtagatctggacggcatgcagcaagacatcgagcaggtgtgggaggagctgctctctatacccgagctgcaatgtttgaacatcgaaaacgacaagcttgtggagactactatggtgcccagtcctgaggctaagcttactgaggtagacaattaccacttctattcaagcataccctccatggaaaaggaagtcggaaattgctccccccattttctgaatgctttctag

SEQ ID NO: 232966 - DNA, 843 bp, synthetic construct
  misc_feature 1..843: note = Description of Artificial Sequence: Synthetic coding sequence
  source 1..843: mol_type = other DNA
atggaccttatcgatatactttggagacaggatatcgatctcggggtttcgcgcgaggtttttgacttctcccagcgtcggaaagagtatgagctggaaaagcagaagaaactggagaaagaacggcaggaacagctgcaaaaggaacaagagaaagcgttcttcgcacaattgcagctggatgaagagactggggagtttctgcctatccaacccgcacagcatattcagtctgagacaagtggcagcgcaaattacagccaagtcgcgcatataccgaaatccgatgccttgtattttgatgactgcatgcagttgcttgcacagacctttcctttcgtcgacgacaacgaagtgagttcagcaacatttcaatctctcgtgcctgatatacccggacacattgagtctccggtttttatagctacaaatcaggcccagagcccggagacaagcgtagctcaggttgcgccagttgatctggacggcatgcagcaagatatcgagcaggtttgggaagagctgctgtctatccccgaattgcagtgcctgaatatcgagaatgacaagctcgtagagaccacgatggtacccagtccagaggccaagttaactgaagtagacaactaccatttttacagctccattcccagcatggaaaaggaggtgggcaattgcagtcctcattttttgaatgcattcgaagattcgttctccagtatcttatctactgaagatccaaatcagctaaccgtgaattccctgaatagtgacgctactgtgaacaccgactttggagacgaattctatagtgctttcatcgccgagcctagtatcagttag

SEQ ID NO: 232967 - DNA, 1749 bp, synthetic construct
  misc_feature 1..1749: note = Description of Artificial Sequence: Synthetic coding sequence
  source 1..1749: mol_type = other DNA
atggacctgatcgacatcctgtggcgacaagacatcgatcttggagtatctcgggaggtcttcgacttttctcagagacgcaaggagtacgagctcgagaaacaaaagaaactcgaaaaggaacgacaggaacagcttcagaaggagcaagagaaagcattcttcgcccagctccagttggacgaggagaccggtgaattcctgcccatacagcctgctcaacatatccaatcagaaacaagtggtagcgctaattatagccaggtggctcatatacccaaaagcgacgctttatattttgatgactgtatgcagctcctggcccagacattcccgtttgtggacgataacgagtcccttgtccccgatattccaggacacatagaatcgccggtattcattgccacaaatcaggcccagtcaccagagacgtcagttgctcaagtggcaccagtagatctcgatggcatgcagcaggatatagaacaggtgtgggaggaactcctaagtattccggagttgcagtgtcttaacatagaaaacgataaactcgtggaaacaacgatggtccctagtcctgaggcaaaactgaccgaagtggacaactaccatttttactcatccatccccagcatggagaaggaagtgggcaattgctccccccatttccttaatgcttttgaggactcctttagctctattctgagtactgaagacccaaatcagctcacagtcaactctttgaactcagatgctactgttaacaccgactttggggatgaattttatagtgccttcattgcagagccttcaatttcaaattccatgccaagccctgccaccctatcacacagtctaagcgagcttctgaatgggccaattgacgtttcagatctgtctctgtgcaaggcttttaaccagaatcaccctgaatctaccgcagagttcaatgactccgacagcggaatctctctgaatacgtcacccagtgtggcaagtcctgagcattctgtggaatcctctagttacggcgacactttgttgggccttagcgattctgaagtggaggagctggatagtgcgccaggctctgtgaaacagaacggccctaagactccagttcattcgagtggcgacatggtccagcccctctccccttctcagggtcagagtactcacgtccatgatgcccaatgtgaaaatacccctgagaaagagctgccagtttcccccggacacaggaaaacgccctttacaaaggacaaacactcttcacgtctggaggctcatctgacaagggatgagttgcgcgcaaaagccttgcacattcccttccctgtcgagaaaatcataaacctccctgtagtggacttcaatgaaatgatgtccaaagagcaattcaatgaggcccagctagccttgattcgtgacattcgtcgacgcggaaaaaataaggtggcagcccagaactgtagaaagcgcaagctggaaaatatcgtggaactagaacaggatctggatcaccttaaagacgagaaagagaaactactgaaggaaaagggagaaaacgacaaatcactgcacctgctgaaaaagcagctcagcactctctatctggaagtcttctccatgctcagggacgaagatgggaagccatactccccctcagagtatagcctgcagcagacaagggacggaaacgtgtttttggttccaaaaagtaaaaagccagacgttaagaagaactag

SEQ ID NO: 232968 - DNA, 2085 bp, synthetic construct
  misc_feature 1..2085: note = Description of Artificial Sequence: Synthetic coding sequence
  source 1..2085: mol_type = other DNA
atgaagcatctaaagagatggtggtccgctgggggtggtctactacacctcactctgttactgagtctggccggactgcgagtcgacctggatctgtacctgctcctcccacctcctacattgctccaggatgagctgctgtttctcggaggaccagccagcagcgcctatgctctctctccattctctgcctcgggaggatggggtagagctggacatctccaccctaaggggagggagcttgatcctgcagcacctcctgagggccagttgctgcgtgaggtacgtgcgctcggagtgcctttcgttccaagaacatccgtggacgcttggttagtccattcggttgccgctggctcagccgatgaggctcatggccttctcggcgcagctgctgctagttctaccgggggagctggggcatcagttgatggcggatcacaggctgtgcaggggggaggtggcgaccctagggccgctaggtccggtcccctggacgctggggaagaagagaaggcccctgccgaacctacagcacaggtaccagacgcagggggatgcgctagcgaagaaaatggagtgttgcgagaaaaacatgaggccgtcgatcacagcagccagcacgaagaaaatgaggagcgggtgtctgcacagaaagagaactcactgcagcagaacgatgacgacgagaacaaaatcgctgagaagcccgattgggaagcggagaagacaacggaaagtcggaacgagcgtcatctgaacgggactgacaccagcttttcacttgaggatctgttccagctactctcttcccagcctgagaactctctcgagggaatatcactcggagacattccccttcccggttctatctcagatggaatgaattcttctgcacactaccacgttaacttctcacaggctatcagtcaggacgttaacctgcatgaggctatcctgctgtgtcccaacaacacattccgcagggacccaacggctaggaccagccaatcacaggagcctttcctgcaactgaattcgcacactactaaccctgaacagaccctccctggaactaacttgacaggttttctgtcaccggtcgacaaccatatgcgtaacctgacaagccaggacctgctgtacgaccttgacattaacatcttcgacgagattaacctgatgagcctggcaaccgaagacaattttgatcctattgatgtgagccagctctttgatgaacccgatagcgattctggactgtcactagacagcagccacaataacacctcagttatcaagtctaattcctcacactccgtatgcgatgagggtgcaattggttactgtactgatcacgagagcagcagccaccatgatctggaaggcgcagtgggtgggtactaccccgaaccctcgaaactgtgtcacctggaccagtctgactcagactttcacggtgacctaacattccaacatgtgtttcacaatcatacgtatcatttacagcccaccgccccagaatccacctccgaacccttcccatggcccggtaaatctcaaaagattcgtagcagatatttggaggacaccgaccggaatctctcccgggatgagcagagagcgaaagcgctacacattccgttcagcgtagacgagattgtggggatgccagtagattccttcaactccatgctgtctcgctactacttaactgatctccaggtgtcactgattagggatatcaggcgaaggggcaagaataaagtggccgcacagaactgtcgaaaacgtaaactggatatcattctgaaccttgaagacgatgtatgcaacctgcaagccaaaaaggaaacactcaaaagggagcaggcacagtgcaacaaggcaatcaatattatgaagcagaagttacacgacctgtaccacgacattttctcccgactcagagacgaccagggtcgcccagtgaatccaaaccactatgctttacagtgtacccacgatggcagtatcttgatagtacccaaggaactcgtcgcgtccgggcataagaaggagactcagaagggaaaaagaaaatag

SEQ ID NO: 232969 - DNA, 1200 bp, synthetic construct
  misc_feature 1..1200: note = Description of Artificial Sequence: Synthetic coding sequence
  source 1..1200: mol_type = other DNA
atgaattcctcagcacactatcacgtgaattttagccaggccataagccaagatgtaaaccttcatgaggctattctactgtgtccaaataacacgtttaggagagaccccactgctcggacgtcacagagccaggagccttttcttcagttgaactctcataccaccaaccctgaacaaaccctcccagggaccaatctcaccggatttctatcacctgtcgataaccacatgcgcaaccttactagtcaggacttactgtatgatttagacatcaatatttttgacgagatcaatctcatgagtctggctactgaggataattttgatcctattgacgtgagtcagcttttcgatgagcccgatagcgattctgggctgtcactcgacagctctcacaacaacaccagcgttattaaatccaattcaagccactctgtttgtgacgagggagctatcgggtactgtactgatcacgaatcaagtagccaccacgacctcgagggcgctgtggggggttactatccagaaccgagcaaattgtgccatctggatcagagcgatagtgattttcacggggacctgaccttccagcacgtctttcacaatcacacctaccacttgcaacctacagcccctgagagcacctctaacctgttcagacccggaaagtcacagaaaatccgcagccggtatctcgaagatacagaccgcaacctttcgagagacgaacagagggccaaggccctgcacatccccttttctgtggatgaaatcgtgggcatgcccgttgacagcttcaacagcatgctgtctaggtattacctcactgatctccaagtgagtctcattagagatatccggcgtagaggcaagaacaaggtggccgctcagaactgccggaaacgcaagcttgacatcatccttaatttagaagacgacgtgtgtaacttacaggctaagaaagagactctcaaaagggaacaagcccagtgtaataaggctatcaatattatgaagcagaaactgcacgacctttatcacgacattttctccaggctgagggatgaccagggcagacccgtcaacccaaatcattatgcattacaatgtactcacgacggtagcatactgatcgtgcctaaagaattggtagcctcgggacacaaaaaagaaactcagaagggaaagcgaaaatag

SEQ ID NO: 232970 - DNA, 1143 bp, synthetic construct
  misc_feature 1..1143: note = Description of Artificial Sequence: Synthetic coding sequence
  source 1..1143: mol_type = other DNA
atgtactctccattgtgtctgacccaggatgagttccaccctttcatcgaggctctgctcccccatgtccgcgcttttgcttacacctggttcaatctgcaagcccgaaagcgcaaatactttaaaaagcatgaaaagagaatgagcaaggaggaggagagggccgtgaaggatgaactgctgtctgagaagcctgaggtcaagcaaaaatgggccagtaggcttctagccaagctgcgaaaggacatcagacctgaatatcgggaggacttcgtgctaaccgtgaccggcaagaagcctccgtgttgcgtgctttctaatcccgatcagaagggcaagatgcgccgtattgactgcctccggcaagcggacaaagtctggaggcttgacctcgttatggtgatcctgttcaagggaatcccactagaatcaaccgacggcgagcgcctggtgaagtccccccaatgctccaacccaggcctgtgcgtgcagccacaccatataggggtatccgtgaaggagctggacctgtacctggcctactttgtccatgccgcaggcatgccctctcctactaccctgaagaaatcagagaagtccgggttttctagcccttctccatcccagacctcaagcttgggaacagcttttacccagcatcaccgccctgtgattacgggacccagggcgagtcctcatgctacaccctcaaccctccattttcctacctcaccaataattcagcaacctggtccctacttcagccatcccgcaattaggtaccacccgcaggaaactttaaaagaattcgtccagttggtctgcccggatgctggccagcaggcaggacaagtcggtttcctcaatccaaatggctcatcccaggggaaggttcacaaccccttcctgcccacaccgatgctcccgcctcccccacctccaccgatggctagaccggtgcccctgccagtgcctgatactaagccacctactacttcaaccgagggaggcgcagcttcacctaccagccccacctacagcaccccatctacatctcctgctaaccggttcgtgtctgtaggaccaagggacccgagcttcgtgaacattcctcagcagacccagagttggtatttgggttag

SEQ ID NO: 232971 - DNA, 1464 bp, synthetic construct
  misc_feature 1..1464: note = Description of Artificial Sequence: Synthetic coding sequence
  source 1..1464: mol_type = other DNA
atgtactcgccactgtgtctcacacaggacgagttccacccttttatcgaggcccttctcccccacgtacgagcgtttgcctacacctggttcaatttgcaggcacggaaacggaagtactttaaaaagcacgaaaagcggatgagcaaggaggaggaaagagcagttaaggacgaactactttctgagaagcctgaagtgaaacagaagtgggcaagtagactgctggccaaacttcggaaggacataaggcccgagtatcgagaggactttgttctaacagttacaggaaagaagcctccctgttgcgttctatctaatcctgaccagaaaggcaaaatgcgccgtatcgattgcctgcgccaggctgataaggtgtggagactggatttagttatggtcatcctttttaaggggatcccgctggaaagtactgacggtgaacgacttgtcaaatccccccaatgctcaaacccgggtctgtgtgtgcagccacaccacattggcgtctccgtcaaggagttggacttgtatctggcctacttcgttcacgctgcaggacacctcggattccaggattccttcgtgacctccggtgtattctctgtaaccgagctcgtgagagtcagtcagacccctattgcagcaggcaccggacccaacttctctctctcagacttggagtcttccagttattattccatgtcaccaggagccatgcgtagatctctcccaagcacgtcctctacaagctctacaaagaggctgaagagtgtagaagatgaaatggatagtcctggtgaagagcctttctatactggacagggccgttcacctggatcagggagccagtcttctgggtggcacgaagttgaaccgggaatgccctccccgacaacattgaaaaagtcagaaaagtcaggtttttcctctcccagcccctcccaaacaagctcacttgggactgccttcactcagcaccatcggccagtgatcactggccctcgagcaagccctcatgctacgcctagcactctgcatttccccacatcacctattatccagcagccgggtccttacttctcgcatccggcaatcagataccacccccaggagaccctgaaggagtttgtacagttggtctgcccagacgccggacagcaggccggtcaggtcggcttcctcaaccccaatggcagttctcagggaaaggtgcacaacccatttttaccaacaccaatgctgcccccaccgccaccacccccaatggccaggccagtgcctctgcctgtgccagacactaagccaccgaccacctcaaccgaaggaggggctgcttcgccaacatccccaacttattctacaccatccacctcaccagccaacaggttcgtcagcgtcgggccaagagatccaagttttgttaacatcccgcagcagacacagtcctggtatttggggtag

SEQ ID NO: 232972 - DNA, 1401 bp, synthetic construct
  misc_feature 1..1401: note = Description of Artificial Sequence: Synthetic coding sequence
  source 1..1401: mol_type = other DNA
atgtattcaccactatgcctgacacaggatgaattccaccctttcatcgaggccctcctgccacatgtgcgggcatttgcttacacctggttcaaccttcaggcacggaagaggaaatactttaagaagcatgaaaaaagaatgagcaaggaggaagagagagccgtgaaagacgagctattgagtgaaaagcccgaagtcaagcagaagtgggcttccagactgcttgccaaactcagaaaagatattcgaccggagtaccgtgaagattttgttctgaccgtgacagggaaaaaaccaccttgctgtgtgctgtccaacccagatcagaagggcaaaatgaggcgcatcgattgtctgcggcaggccgacaaggtctggcgcttggacctggtgatggtcatcttgtttaagggcatcccccttgaatccaccgatggagaacgactggtgaaatcacctcagtgcagcaatcccggactctgcgtccagccacatcacattggcgtttccgtgaaagaactggatttgtacctcgcatattttgttcatgctgccgatagttcacagtccgaatctccgagtcagccatctgacgccgatattaaagaccaacctgagaacggtcatctgggcttccaggactcattcgttacttctggcgtcttctccgtcacagagctggtgcgcgtttcccagacacccatagccgctgggaccggccctaatttctctctgagcgatctggagtcctcttcctattactccatgagccctggagccatgaggagatcacttccctctacgtcctccaccagttctacaaagagactgaagagcgttgaggacgaaatggattcacccggagaggaaccattctacaccggacagggaaggagtccaggttccgggagccagtcctccggatggcacgaagtcgaacccgcttctcctcacgctaccccttctacccttcactttccgacgtcaccaattatccagcaaccagggccatacttcagccatcccgcaatacggtaccatccgcaggagactcttaaagagttcgtccagttggtttgccccgacgccggacaacaggcgggtcaggtaggattcctgaatccaaacgggtcctctcaagggaaagtccacaacccatttttgcctacaccaatgcttcctccaccccctcctcctcctatggcgaggcctgtgcctcttccagtccctgatacaaagcccccaactactagtaccgagggcggtgcagccagtcccacctcacccacttactcaacgcctagtacttccccagctaacaggtttgtttctgtggggccaagagatccatctttcgtaaacataccccagcagacccaatcctggtatttaggatag

SEQ ID NO: 232973 - DNA, 1665 bp, synthetic construct
  misc_feature 1..1665: note = Description of Artificial Sequence: Synthetic coding sequence
  source 1..1665: mol_type = other DNA
atgcagatgtgtagacccgcatcttccagcgtcttgtatgttccaacacggtggcctggcggttgtggagctacatggcagtcgtgccccagtccgccacccagacgcaccagaatccctcagcgccctgcagtcatgtacagcccgctgtgccttacccaagatgaattccacccatttatagaagcgctgctgccacacgttagagcattcgcatacacctggtttaatctccaagcaaggaagaggaagtactttaagaaacacgaaaagaggatgtctaaagaggaagagagagcagttaaggacgagctgctatccgagaagccagaggtgaagcagaagtgggcctcccggctgctagctaagctcagaaaagacattcggcctgagtatagagaggatttcgtccttaccgttaccgggaaaaagccaccatgttgcgtgctgtctaacccggatcaaaaaggtaaaatgaggaggatagattgcttgcggcaggccgacaaagtttggagattagacctggtgatggtcatcttgttcaaaggaatccctttggagtccacggatggggaacgacttgtgaagtccccacagtgcagtaatccgggactctgcgtgcagccgcaccatatcggggtctccgtaaaagagctggacctttatctcgcatatttcgtgcatgccgcagattcaagccagagcgaatcaccttctcagccttccgatgctgatattaaggatcagccagagaatggccacctaggctttcaggactcttttgtcaccagcggagtcttttccgttacagaactcgtacgcgttagtcagaccccgatcgccgctggcaccggccctaatttctctctcagtgacctggagagctcttcttactatagcatgtctcccggagccatgagaaggagtctgccctcaacctcctcaaccagctcaactaagcgattgaagtctgtggaagatgagatggattcacccggagaggagcctttttataccggtcagggcaggtcccccggatccggctcccagtcgtccggctggcatgaagtggagcctggtatgccatcccccaccacattgaagaaatccgagaagagtggcttttcctccccttcaccgtcccaaacctcttcactcggcacagcgtttacacaacatcaccgacctgtgataaccggacctcgggcatcgccccacgccacacccagcaccttgcactttcccacttcacccattatacagcagcctggcccatatttttcccatcctgccatccggtatcatccgcaggaaaccctgaaggagtttgtccagctggtctgtccagatgccggacaacaggccggacaggttggcttcctgaaccctaacggcagtagccagggaaaggtgcataatccattcctccctacacccatgctgcctccacccccacctcctccaatggccaggcccgtgccactgcccgttccggacaccaaacctccgactacatcaacggaagggggagcagcgtccccaactagtccaacctactctacgccttctacttcacctgcgaatcggtttgtctctgtgggtccacgggatcccagctttgtcaacataccacagcagacacagagctggtatctcggttag

SEQ ID NO: 232974 - DNA, 1599 bp, synthetic construct
  misc_feature 1..1599: note = Description of Artificial Sequence: Synthetic coding sequence
  source 1..1599: mol_type = other DNA
atgaagctcgccgactctgtcatggctggcaaggcttccgatggcagcatcaagtggcagctatgctatgatatctccgctaggacttggtggatggatgagttccacccattcattgaagcactccttcctcacgtgcgcgcattcgcctacacatggtttaacttgcaagccaggaaaagaaagtactttaagaagcacgagaagaggatgagtaaggaggaagaaagagcagtcaaagacgaattgctgtcagagaagcctgaggtgaagcaaaaatgggccagccggcttctggcgaaattgcggaaggacatccggccagaatacagagaggattttgtgctgaccgtaacaggaaaaaaacctccctgttgcgtgctctctaaccctgaccagaaaggcaagatgaggcggatcgactgtttgcggcaggctgacaaggtttggcggctcgacctagtgatggtgattctgtttaagggtattcctctggagagcacggatggagaacgcctggtgaagtcgccgcaatgctcgaatcccggactgtgtgtgcagccccatcatattggtgtgtccgtcaaggaattggacctctacctcgcttattttgtccatgccgcagactcaagccaatctgaaagtccctcccaacctagcgacgcggacataaaggaccagcccgagaatggccacttagggttccaggactcctttgttacgagtggagtcttttctgtgaccgagttggttcgggtgtcacagacccccattgcagctggcacgggcccaaacttctccttaagcgacttggagtcttcctcttactattccatgtcccctggcgctatgagaaggagccttccttctacctccagcacttcatccaccaaacgcctgaaatccgtggaagacgagatggattcacctggcgaggaaccgttttatacaggccaagggagaagccccggttcaggctctcagtcctctggttggcacgaagtggaacccggaatgccctctccaaccacattaaaaaagagcgagaagagcggattctcctcaccttctccatcccagaccagtagcctggggaccgcttttacccagcaccaccggcctgtcatcactggccctagggccagcccacacgccaccccatccaccctccattttcccacatccccaatcatacagcagccaggaccctatttttcacacccagccatccgctatcatccgcaggaaacgctgaaagagtttgtgcagctggtatgccccgacgccggtcagcaggccggtcaggtgggattcctgaaccccaatggctccagtcaggggaaggtacacaatccattcctccccacaccgatgttgccgccaccaccgccacctcctatggccagaccagttcctctgccagtgcccgataccaaacctcctacaacatcaaccgagggaggggctgcctctcctacttccccgacctattctacacctagtacatcacctgccaacaggttcgtatcagtgggcccaagggacccatcctttgtaaatatcccccagcagacccagagctggtatttaggctag

SEQ ID NO: 232975 - DNA, 1530 bp, synthetic construct
  misc_feature 1..1530: note = Description of Artificial Sequence: Synthetic coding sequence
  source 1..1530: mol_type = other DNA
atgtacagcccactatgcctgacacaggacgaattccaccccttcatcgaagccctactgccccatgtacgagcattcgcctacacatggttcaacctacaggcacgtaaacgcaagtattttaagaaacacgaaaaacgtatgtccaaggaagaagaacgggctgtgaaggatgagctgttgtccgaaaagcccgaggtgaaacaaaaatgggcttcgcggctcctggccaaattaagaaaggatattaggccagaatacagggaggactttgttcttactgtaactggaaagaagcccccttgctgcgtgttgagtaacccagatcagaagggcaagatgcggaggattgactgcctcagacaagcagacaaggtgtggcgcctggatctggtcatggttatattgttcaagggaattccactggaatcaaccgacggcgagagactggtaaagtcaccacagtgttcgaaccctggcctgtgcgtgcagcctcaccatataggtgtgtccgttaaagagcttgacctctatctggcatattttgtgcacgcagccgattccagtcagtccgagagtccctctcagcccagcgatgctgatatcaaagaccaacctgagaacggacacctggggtttcaggattccttcgtgaccagtggcgtgttttcagtcaccgagctggtacgcgtcagccagacaccaatcgcagctggtacggggcctaattttagtctgtcagatttagaaagttcgtcttactactctatgtcccctggagctatgcgccgttctctcccaagcacgtcatctacctcttccactaagagattaaagtccgtagaagatgaaatggacagccccggtgaagaacctttctatactgggcaagggagatcacccggttccggcagtcagtcttctgggtggcacgaggtcgaacccggtatgccttctcctactaccctcaagaagtctgagaagtccgggtttagttccccatcgcccagccagacaagtagcctggggaccgccttcacccagcatcatcgtccagtcatcactggcccacgggcttcacctcacgccactccctcaaccctgcacttcccaactagcccgattattcagcaacccggaccctacttttcacaccctgcaatccgctatcacccacaggagactctcaaggaattcgtgcagctggtctgtcctgacgctgggcagcaggcaggtcaggtcgggttcctcaatcctaacggctcaagccaaggtaaggtgcacaacccgttcctgcccacccccatgttgcccccaccaccacctccccctatggcccgtcccgtgcctctgcccgtgcctgacactaagcctccaacgacctctacagaaggcggagccgcaagtcctacaagccctacctactctaccccctctacttctcccgctaatcgattcgtgtcagtgggcccacgcgacccaagctttgtaaatatacctcagcagacgcagtcctggtacttgggatag

SEQ ID NO: 232976 - DNA, 1506 bp, synthetic construct
  misc_feature 1..1506: note = Description of Artificial Sequence: Synthetic coding sequence
  source 1..1506: mol_type = other DNA
atggatgaattccacccattcattgaagccctgcttccccatgttcgggcattcgcttatacatggtttaatctgcaggctcgcaaaagaaaatattttaaaaagcacgaaaaacggatgtcgaaggaagaggagagagccgtgaaggacgaacttcttagtgaaaagcctgaggtcaagcaaaagtgggctagcagattgctggctaagctgcggaaagatatcagacccgaataccgggaggatttcgttctgaccgtaacgggaaagaagccgccttgttgcgtgttatctaacccggaccaaaagggtaagatgcgtaggatagactgcctgcggcaggctgacaaggtctggcgtttagacttggtcatggttattctcttcaaaggcatccccctggaatcaactgatggagagcggctagtgaaaagcccccagtgttcaaatcctgggctctgtgtccagccgcaccatatcggggttagcgtaaaagagcttgacctttatctcgcctatttcgtgcatgccgctgacagttctcagtcagagagtcccagtcagccttcagatgctgatatcaaggaccagccggaaaatggtcatttaggcttccaggactctttcgtgactagcggcgtgttcagcgtgaccgagctggttagagtgtcccaaacgcctatagcagcgggaaccggtccaaacttctcgctgagtgatctggagtcttccagttactattccatgtctcccggagctatgcggcgatctctgccatccacgagcagcacctcgagtactaaacgacttaagagcgtcgaggacgaaatggacagcccaggtgaagaacctttttatacaggccagggacggagcccgggttctggatcgcaaagttctggctggcatgaggtggagcccggtatgcctagtccaactacgcttaagaaatcagaaaaatctggtttcagtagcccttccccttctcaaacctcttccctcggcaccgcgtttacgcaacatcaccggcctgtcataaccggcccacgcgctagtcctcatgcaacgccttctactttgcacttccctacctccccaattatccagcaaccaggcccttactttagccatccggcaataagataccatccacaggagactctgaaggaatttgtccagctcgtgtgtcccgacgcagggcaacaggctggccaggtcggctttctgaaccccaatggcagctcacaaggcaaagtgcataatccgtttcttcccacacctatgctaccacccccacctccaccacctatggccagacctgtgcccctgccagtgcctgatacgaaaccacccaccacaagcacagaagggggagccgctagcccaacgtcccctacctattccaccccgagcacgtccccagcgaataggttcgtatctgtgggacctagagatccatctttcgtaaacatcccacagcaaacacagagttggtacctggggtag

SEQ ID NO: 232977 - DNA, 1497 bp, synthetic construct
  misc_feature 1..1497: note = Description of Artificial Sequence: Synthetic coding sequence
  source 1..1497: mol_type = other DNA
atgtattcacccctttgcctgacacaagatgagtttcaccccttcatcgaggctctgctaccccacgtgagggcctttgcttatacttggttcaacctgcaggccaggaagaggaagtatttcaaaaaacacgagaaaaggatgtctaaagaggaagaaagggctgtcaaggatgaactgctgagcgagaaacctgaagtaaaacagaagtgggcctcgcgcctgctggctaagctcaggaaggacatccgccctgagtaccgcgaggactttgtcctaactgtgacgggcaagaagcccccttgctgtgtgttgtcaaacccagatcagaaggggaagatgaggaggatcgattgtctgcgacaggcggacaaagtgtggaggctagatctcgtcatggtaattctcttcaagggcatccccctcgaatccacggatggcgaacgcctcgtgaaatccccacagtgctctaatccaggtctttgcgtacagccccatcatatcggtgtttccgtcaaggaattagacctctacttagcatatttcgtgcatgctgccgactcatcccagagcgagagccctagccagccctctgatgccgatatcaaggaccagcctgagaacggccatctcgggtttcaggacagcttcgtgacttctggagttttttcagtcactgaattagtacgggtctcccagacaccaatagcagccggaaccggtcctaatttcagcctatctgatctggagagctcgagctactattcgatgagccccggagccatgaggcggtctctgccttcaactagctctaccagctccaccaagagactgaaatctgttgaggacgagatggactcccccggtgaggaacccttctacaccggacaaggaaggtctccaggctcagggtcccaatctagcggatggcatgaagtcgaacccggtatgccctccccaacaactctaaagaagtcagagaaaagcgggttttcatctcccagcccgtcgcagacgtcttcactggggacagcgtttacgcagcaccatagaccagtcatcactggacccagggcctctccccacgcaacacctagcaccttacactttccaaccagtcccatcattcagcagcctggaccctacttttcacaccccgcaattcggtaccacccacaggagactctgaaagagttcgttcagctcgtttgccctgatgccggtcagcaagcgggacaggtggggttcttaaaccccaatggaagctcacaggggaaggtgcataacccctttctaccaactcctatgctcccaccaccaccgcctccgccaatggcgagaccggtccctctgcctgtccctgatacaaagccgcctaccacttcgactgaaggaggcgcagctagccctacttctcccatcttagtgcctgggatcaaagtagccgcatcacatcacccacctgataggccgcctgatcccttttccacattgtag

SEQ ID NO: 232978 - DNA, 603 bp, synthetic construct
  misc_feature 1..603: note = Description of Artificial Sequence: Synthetic coding sequence
  source 1..603: mol_type = other DNA
atgatgtattcacccatttgtctgacccaggatgagtttcaccctttcattgaagccctcctacctcacgtgcgggcaattgcgtacacgtggtttaacctccaggcacggaagcgtaaatactttaagaaacatgagaaaagaatgtcaaaagatgaagaacgggcagtgaaggatgaactcctgtccgaaaagcccgagatcaagcagaaatgggcatctcgactgctagccaaattaaggaaagacatccggcaggaataccgggaagactttgttctgactgtgaccggaaaaaaacacccctgctgcgtcctgagcaatcctgatcaaaagggcaaaatccggagaatcgactgtctccggcaagcggataaggtgtggcggctagacttagtgatggttattctgttcaaggggattcctctggagagcaccgacggagagcgtcttatgaagagcccacactgcacaaatccggctttatgtgtccagccccatcatatcaccgtgtctgtaaaggagttagacctgtttttagcctactacgtgcaggagcagggaaaaaacttctttagtagcaacaagtgtatcaagatatag

SEQ ID NO: 232979 - DNA, 507 bp, synthetic construct
  misc_feature 1..507: note = Description of Artificial Sequence: Synthetic coding sequence
  source 1..507: mol_type = other DNA
atgaactcaggggtgaacctgcagcgatctttatcgagccctccgagctctaagagacccaaaactatttcgatcgacgaaaatatggagccatcccccaccggagacttctacccaagcccctcatcgcccgctgctgggtcccggacttggcatgaacgcgatcaggatatgtcatcccccacaaccatgaagaaaccagagaaacccctattctccagcgcttccccacaggactccagtcctcgactctctacctttccacaacaccatcaccccggtatcccgggagttgcacacagcgtgatctctacgagaacgccacccccaccttctcctctgccattccccacacaggctatcctgccaccagcccctagtagttatttctcccacccaactatccgctatccgcctcatctcaacccccaagacacactgaagaactacgtgccttcatacgaccccagctctccccaaacctcgcagtcttggtaccttggctag

SEQ ID NO: 232980 - DNA, 1341 bp, synthetic construct
  misc_feature 1..1341: note = Description of Artificial Sequence: Synthetic coding sequence
  source 1..1341: mol_type = other DNA
atggaaagaattcccgttagcgttgacttctgggtggtatgctgcgcagtgctcaagtgcaatcccggaatacctaagaggatgtccaccctttgttttggcttctcagatgagtttcaccctttcattgaggcgctgctgccccacgtgagagccatcgcttacacatggttcaatttgcaggcaagaaaacgcaagtactttaaaaagcatgagaagaggatgtccaaagacgaagagagagctgtcaaggacgagctactgagcgagaaaccagaaatcaagcagaaatgggcctctagacttctggctaaactgcggaaggacattagacaagagtaccgggaggactttgtcctcacagtgaccgggaagaagcacccatgttgtgttctgtcgaaccccgatcagaagggaaagatccggaggatagactgtcttagacaggccgataaggtgtggaggcttgacctagtgatggttatcctgtttaaagggatcccgctggaaagcactgatggggagcgcttaatgaagagtccccattgcacaaaccctgctctgtgcgtgcagccacaccacattaccgtgtcagtcaaggagttagatctgttcctcgcttactacgtccaagagcaggattccggccaaagcggttcgcctagccacaacgaccccgctaagaatccaccgggatacctggaagacagcttcgtcaagtccggagtatttaatgtgtccgaactcgttcgcgtgagtcgaactcctatcacccagggcacaggcgtcaacttccctatcggtgagatcccttctcagccctattaccacgacatgaatagcggcgttaatctgcagagaagtctcagttctcctcctagcagtaagaggcccaaaacaataagcatcgacgaaaacatggaacctagcccgacaggtgatttctacccgtcccctagctcgccggcagctggatcacgtacatggcacgaaagggatcaagatatgagcagccccactaccatgaaaaagccagagaagcccttattctcctcggccagtcctcaggactccagtcccagactgtcgacctttcctcaacaccaccaccctggaattcccggtgtcgcccattccgtcatctccactaggacaccaccccctccttcccccttgccatttccaactcaggccatcctgcccccagcacctagttcctatttttcgcaccctactatccgttacccgccacacctaaacccacaagacactttgaagaactatgttccaagttatgatcccagtagccctcagacatcacagagttggtaccttggctag

SEQ ID NO: 232981 - DNA, 1485 bp, synthetic construct
  misc_feature 1..1485: note = Description of Artificial Sequence: Synthetic coding sequence
  source 1..1485: mol_type = other DNA
atgatgtactccccaatttgtctgacgcaggacgaattccaccctttcattgaggcactcctgcctcatgtgcgggctattgcgtatacgtggtttaatctgcaggcgcgtaaacgtaaatatttcaagaagcatgaaaaacgtatgagcaaagatgaagagcgcgctgtgaaggatgagcttctgtccgagaaaccagaaattaaacagaagtgggccagtagactcctggcaaagctaaggaaggatatcaggcaggaatatagagaagacttcgttctgacagtcaccggaaaaaagcacccttgctgcgtgctgagtaatcccgaccagaagggaaagattcgcaggattgactgcttacgacaggccgacaaagtgtggcgattagacttggtcatggtgatcctttttaaagggattcctctagaatctaccgatggcgagcgactcatgaaaagcccacactgcaccaatccagccctctgcgtccagccccatcacattaccgtgtccgtgaaggaattggacttgttcctggcctattacgtccaggagcaggattcagggcagagtggatctccgtcccacaatgacccagcaaagaacccccctggctacctggaggatagcttcgtgaagtccggagtgtttaatgtttcggagctggttcgagtgtctcggacacccatcacccaggggacaggcgtaaatttccccatcggtgaaattccttcccagccctactaccatgacatgaattcaggcgtgaatctgcagagatctctttcgtctccccctagctctaaacgccctaaaactatctcgattgatgaaaatatggagcctagtcctaccggggatttctatccgtcacccagctctcctgctgcaggttctagaacctggcacgagagagaccaggacatgagcagccctactactatgaagaaacctgagaaaccccttttttcgagcgcctcaccacaggacagttccccacggctctccacttttccacagcaccaccaccccggtattccaggggtcgcccacagcgtaatctctacgcgaacaccaccaccgccatcacccttacccttcccgacgcaggccattcttcccccagctccctcaagctacttctcgcatcctacaattcgttaccctccccatctgaaccctcaagacaccttgaaaaattatgtccccagctatgatcccagctccccccagactagtcagcccaacggatcgggccaggtggtcgggaaggtccctggacatttcacccccgtattggcgccatcaccccaccccagcgctgtacgtccagtgactctgtcaatgacagacaccaagcctattacaacatcaactgaagcctataccgcctcaggtaccagccaagcaaaccggtacgtgggcctgtctcctagagatccgtccttcctgcaccagcagcagagttggtacctgggctag

SEQ ID NO: 232982 - DNA, 1263 bp, synthetic construct
  misc_feature 1..1263: note = Description of Artificial Sequence: Synthetic coding sequence
  source 1..1263: mol_type = other DNA
atgatgtattcgcccatatgcctgactcaggatgaattccacccatttatcgaggctttgctgccccatgtcagagcaatcgcatacacctggttcaatttgcaggcgcgtaagaggaagtactttaaaaaacacgagaaacgcatgagcaaggatgaagagagagccgttaaagacgagctcctttcggagaaaccggagattaaacagaaatgggcttctcggctgcttgccaaactgcgaaaggatatccgtcaggaatatagagaggattttgtcctcacagtgacaggcaagaaacatccatgctgcgtgctgagcaacccagatcagaaaggcaaaattcgcagaattgattgtctgcggcaggctgacaaggtctggcggctggatctggtaatggtgattcttttcaaagggatcccacttgagagtaccgacggtgagagattgatgaagtctccacactgcaccaaccccgctttgtgtgtccagccgcatcacattaccgttagcgtgaaggagctggatctgtttctggcctattacgtgcaagaacaggatagcggccaatctggatccccatctcataatgatcccgctaagaatcccccaggttaccttgaggacagtttcgttaagtccggcgtgttcaacgtgagcgagctagtgagagtgtccaggacacccatcacccagggcacaggcgtaaacttccctatcggggagattcctagccaaccatattaccatgatatgaattctggtgtgaacctccagagatccctgagttccccaccgagctccaaaaggcccaaaacaatcagtatcgacgagaatatggagccaagtcctaccggggacttttatccatctccatcatccccagccgcaggttctaggacctggcacgagcgcgaccaggatatgtcatcacctacaacaatgaaaaaaccagagaagcctctgttcagcagcgccagtccacaagactccagccccaggttaagtacttttccccagcatcaccaccctggaataccaggagtggcgcactcagtgatatccacacggacaccccctccaccatctccgctgccgttcccaacccaggccatactccctccagctcctagctcctatttctctcatcccacaattagatatcccccacacctgaacccccaggatacgctgaagaactacgtgccgtcctacgaccctagtagtccccagacttctcagtcttggtatttagggtag

SEQ ID NO: 232983 - DNA, 1686 bp, synthetic construct
  misc_feature 1..1686: note = Description of Artificial Sequence: Synthetic coding sequence
  source 1..1686: mol_type = other DNA
atgatgtattcccctatctgccttacgcaggacgagtttcacccttttatagaggccctgctgccccacgtacgcgctatcgcttatacctggtttaaccttcaggctaggaagagaaaatattttaagaaacacgaaaaaagaatgtcgaaggacgaggaaagagccgttaaagatgaattactctctgagaagccagaaattaaacagaagtgggcctccagacttttggctaagctgcgcaaggatattcgccaggaatacagagaggactttgtactgactgtgaccggaaaaaagcacccatgttgcgtgctctcaaacccagatcaaaagggtaaaattcggaggatcgactgcttgcggcaggcagacaaagtgtggagattggacctagttatggtcatcttgttcaaaggcatccccctggagtctacggacggcgagagacttatgaaaagtccccactgtacaaacccagctttatgtgtgcagcctcaccacattactgtgagtgtgaaagagctggacctgttcctggcatactacgtacaggagcaggactcggggcagtccggaagtccgtcgcataatgaccctgcaaagaatccccctggttacctagaggatagctttgtgaagtcaggagtcttcaatgtgagcgagcttgtgagagttagccggacgcctattacgcagggaaccggcgtgaattttccaataggcgagatccccagtcagccctattaccacgacatgaatagtggcgttaacctccaacgatcactatccagtcccccaagttccaaacggccaaagacaattagcattgatgaaaacatggagccgtcacctactggcgacttttatccctctccttcttctccagctgccggaagccggacctggcacgaaagggaccaagacatgtcatccccgaccacaatgaaaaaacccgaaaaacccttgtttagctctgcctccccccaagattcctcgccccgactgtccaccttccctcagcaccaccatccaggtattcccggagtggctcattctgttatttcaacacgcaccccccctcctcctagccccctccctttccctacacaggcaattcttccgcctgccccaagctcgtacttctcccaccccactattagataccctcctcatttgaatccccaggacaccctgaagaattatgtgccgagttatgatcccagtagtccccagacatctcaacctaacggctcgggccaggtcgtcggcaaggtgccaggccactttactcctgtccttgccccttctccacacccatccgctgtccgcccagttactctgagcatgactgatacaaaacctataactacctctactgaggcatatactgcttccggaacctctcaggccaaccggtatgtgggtctaagcccccgtgatcctagtttcctacatcaacagcaattgagaatctgtgattggaccatgaaccagaacggcaggcatctgtacccctctacctctgaggacacattaggaatcacctggcaatccccagggacttgggcttcactggtgcctttccaggtgtctaatcgcacccccatattgccagctaatgtccagaattacggccttaatatcatcggtgaaccctttcttcaggccgaaacttctaactag

SEQ ID NO: 232984 - DNA, 1464 bp, synthetic construct
  misc_feature 1..1464: note = Description of Artificial Sequence: Synthetic coding sequence
  source 1..1464: mol_type = other DNA
atgatgtactctcctatttgcctgacacaggacgagttccaccctttcatcgaggctctgttgccgcacgtgcgcgcaattgcttacacatggttcaacctgcaggccagaaaacggaagtactttaaaaaacatgaaaagcgcatgagtaaagacgaagagagggccgttaaagatgagctcctctcagagaaaccagagattaaacaaaaatgggcgagcaggctgctggccaagttaaggaaggacattagacaggagtatcgggaagattttgtactgactgtaacaggtaagaagcatccatgctgtgttctgagcaaccccgaccaaaaagggaagatccgcaggatcgactgtctgagacaggctgataaagtctggcgactggacttggtgatggtgatactctttaagggaatcccactagaaagcacggacggcgagcgcttaatgaagtctccgcactgcactaatccagcactgtgcgtgcagccccaccatatcacagtatcagttaaggagctggacctctttttggcttattacgtgcaagaacaggacagtgggcagtccggttcaccatctcataacgatcccgctaaaaacccaccaggttacttagaggactccttcgtgaagtctggcgtgttcaacgtatcagaactggttagagtgtctcgcacccctattacgcagggcactggtgtaaatttccctattggcgagattcctagccagccttactaccacgatatgaattctggtgtgaatcttcagcggagtctgtcatcacctccctcctctaaaaggcccaaaactattagcatagatgagaacatggagccttcacccaccggagatttttacccatccccatcctcacctgccgctggtagccgcacttggcacgaacgggaccaggatatgtccagtccgaccaccatgaagaagcctgagaaacccctgttctcctctgccagcccacaggattcttctcctagattatcaacttttccacaacatcaccacccaggtatcccgggagtcgcacactctgtgatcagcacccggactcctccccctcccagtccactaccatttccaacccaggccattttgccccctgcaccgtcgagctatttcagccacccaacaattagatatcccccacacttgaaccctcaggacaccctcaaaaactatgtgccgtcatacgatcccagcagcccccagacctcacagcttagaatctgcgattggaccatgaatcagaatggtcgccacctgtacccgagcacctctgaggatactttgggcatcacttggcagtctccaggaacttgggccagcctcgttccattccaggtgtccaaccggacacctatcctgcccgctaatgtccagaactacggcctgaatattattggggagcctttcctgcaggcagaaacatcaaactag

SEQ ID NO: 232985 - DNA, 1713 bp, synthetic construct
  misc_feature 1..1713: note = Description of Artificial Sequence: Synthetic coding sequence
  source 1..1713: mol_type = other DNA
atgatgtactcccccatatgcctgacccaggatgagtttcatcctttcatcgaggcgcttctcccccacgtgagagctattgcctatacttggttcaacctccaggctagaaaacgtaaatatttcaagaagcatgagaaacgcatgagtaaggacgaagagagagcagtgaaggatgaactcctgtccgagaagcccgaaatcaagcagaaatgggcctcaaggcttttagcaaagttgagaaaggatattcggcaggagtatagagaggacttcgtgcttacggttactggtaagaaacacccctgctgtgtgctgtccaatccagaccaaaagggaaagatccgacggattgactgcctacgccaggctgataaggtctggcgtctagacttagtaatggtaatcctattcaagggcatacccctggaatcaacagacggcgagaggctaatgaagagccctcactgtacaaaccccgctttgtgtgtgcagccccaccatattacagtatctgtcaaagagctagatctgttcctggcctattatgttcaggaacaggactctggacaatccggctccccttcccacaatgacccagcgaagaatcctcctggataccttgaggactcttttgtgaagtccggggtttttaatgttagtgaactcgtgcgcgtgagcagaacccctatcacccagggtaccggggtcaatttccctatcggcgagattccctcacaaccttattaccacgatatgaacagcggcgtcaatctccagcggtccttgagctctccaccgagctccaaacgcccaaaaaccattagtatcgacgagaacatggagccgtctcctaccggggatttttatccatccccatcaagtcccgctgccggttcaagaacttggcacgaaagagatcaggatatgagctcacctactaccatgaagaaaccagagaaaccgctctttagcagtgccagcccgcaggattcatctccaaggctcagcactttccctcagcatcaccatccaggcatcccaggagtggctcactctgttataagcaccaggacgcctcctcccccttcacctctgccttttccaacgcaggccatcctgccccctgctccgtccagctacttctcacaccctaccatcaggtacccccctcacctgaatcctcaggacaccttaaagaactacgtcccttcatacgacccttcgtcccctcagaccagccagccaaatggaagtggacaggttgtcggtaaggtaccagggcactttaccccagtactggcccctagtcctcatccgtctgctgtgcgccctgtcaccttgagtatgactgataccaaacccatcacaaccagcaccgagggcgaggccgcatcaccaaccgcaacgacatacactgcttcaggcacctctcaggctaaccgctacgtggggctttcccccagggatccatcatttcttcaccagcagcagctgaggatttgcgattggacgatgaaccaaaacggccgacacctgtacccttctacaagcgaggatacactcggtattacttggcagtcaccaggcacgtgggcttcgttagtcccctttcaggtgtcaaaccgcacccccattttacctgccaatgtccagaattacggcctgaatataatcggcgagccatttctccaggctgagacaagtaattag

SEQ ID NO: 232986 - DNA, 930 bp, synthetic construct
  misc_feature 1..930: note = Description of Artificial Sequence: Synthetic coding sequence
  source 1..930: mol_type = other DNA
atgaactctggagtgaacttacagaggagcttgtcatcccccccttcttccaagcgtcctaagactatcagcattgatgaaaacatggaacctagccccactggagacttctacccatccccgagtagtcccgctgccggaagtaggacttggcatgagcgggatcaagatatgagcagtcctaccacgatgaagaaacctgagaagcctctcttcagctcggctagcccacaggacagctctcccaggctgtcaacgttccctcagcaccaccacccaggcattcctggcgtggcacacagtgtgatctccacccggacgccgcctcccccttctccattaccatttccaacacaggctatactgcccccagcacccagctcgtacttcagccacccgaccattcgataccctccacatctcaatccacaggatacactgaaaaactacgttcccagttacgatcctagctcaccacagacaagccaacccaatggaagtgggcaagtcgtgggaaaggtgccaggacacttcactcctgttctcgcacccagcccgcacccgtcggccgtccgaccagtgaccctgtctatgactgataccaagccaatcactacatctactgaggcctacaccgcctctggaacctctcaggccaaccggtatgtggggttgagtcccagggacccctcattcctccatcagcaacagctaagaatatgcgattggacaatgaatcagaatggacgccatttgtacccaagtacatctgaggacactctcggcatcacatggcagagtcccggtacttgggcatcattggtgccattccaggtctcaaatcgaactccgatcctgcctgccaatgtccaaaactacggtttaaatattatcggggaaccctttcttcaggctgagacctcgaactag

SEQ ID NO: 232987 - DNA, 1272 bp, synthetic construct
  misc_feature 1..1272: note = Description of Artificial Sequence: Synthetic coding sequence
  source 1..1272: mol_type = other DNA
atgtatagttccccgttgtgcctgacccaagacgaattccaccccttcatcgaggcactgcttccccatgtgcgagcgtttgcatacacttggtttaacctgcaggcgcgtaaacgcaagtacttcaagaaacatgagaaacgtatgtcaaaagacgaggagcgggctgtgaaggatgaactgctgggggaaaagcctgaagtgaaacaaaagtgggctagccgcctgctcgccaagttgaggaaagacatccggccagaatgccgggaggatttcgttctgagtattactgggaagaaggccccaggttgtgtcttatctaatcccgatcagaagggaaaaatgcgccgtattgactgcctgcgtcaagcagacaaagtgtggaggctagatctcgtgatggtgattctctttaaaggcatcccactagagagcacagacggagagcgtttggtaaaggccgcacaatgcggtcaccctgttctgtgtgtacagcctcatcatatcggcgtcgcagtgaaggagctggacctgtacctggcctattttgtacgggagagggacgctgaacagagtgggagtccacgcactggaatgggcagcgatcaggaagatagcaaacctattacactagatacgactgacttccaggaaagcttcgtgacttccggtgtattctcagtcacagaactaatccaagtgagtcgaactcccgtggtgacagggaccgggcctaactttagtctgggggagctccaaggccatctcgcttacgatctcaaccctgcgtcaacaggactgagacgcactctacccagtacctcaagcagtggctcaaagagacacaaaagtgggtcgatggaagaggacgtggacacttccccgggaggcgattactacacatcgccctcctctccaacttcaagtagtcgcaactggacggaagacatggaaggagggatctcgtcgcctgtgaaaaagacagagatggataagagtcctttcaactccccatctcctcaagacagtccacgcctgagtagtttcacccagcaccatagacccgtcattgccgtccactcgggtattgccagaagcccccatccatcttccgctctgcattttcctaccacgagcatcctcccccaaaccgcatccacctattttcctcacacggctataagatatccgcctcatctcaatccccaggaccctctgaaggatctcgtttcgctggcctgcgacccagcaagtcagcagcccggaccatag

SEQ ID NO: 232988 - DNA, 1287 bp, synthetic construct
  misc_feature 1..1287: note = Description of Artificial Sequence: Synthetic coding sequence
  source 1..1287: mol_type = other DNA
atgtactccagtccgttgtgcctgacacaggatgagttccacccattcatcgaggcgctgttaccccacgtgcgagctttcgcttacacctggtttaatttgcaggcccgaaaacggaagtatttcaagaaacacgaaaaacgcatgtccaaggatgaggaacgtgccgtcaaggacgagctgctgggggaaaaacctgaggtaaagcagaagtgggcctcacggctcttagcgaaactcaggaaggacattcgcccagagtgccgcgaagactttgtgttgagcattaccggcaagaaagcaccaggctgcgtactctctaaccctgatcagaagggaaagatgaggcggattgactgcctgcggcaggcagacaaagtctggcggctggacctggtcatggttattttattcaaaggcattcctcttgagtcgacggacggagagagactcgtcaaagccgctcagtgcgggcacccggtgctgtgtgtgcagcctcaccatattggcgtggccgtgaaggaacttgacctttacctcgcttacttcgtgagagagagagatgccgagcagtccgggtcgccacgcaccggaatgggcagcgaccaggaagatagcaagccaatcacactggatacaactgacttccaggaatcgtttgtcacttctggagttttctccgttactgaactcatacaagtgtctaggactcccgtggttaccggcaccggccctaacttctctctgggggaattacaggggcacctggcctatgacctgaacccagcttcaactgggctgcgcaggactctgccaagtacaagctcctccggatccaaacgccacaaaagtggatcgatggaggaagacgttgataccagcccaggcggtgactattatacgtcgccctcgtccccaaccagtagctctaggaactggacggaagatatggaaggagggatcagttctcctgtaaagaaaacagagatggataagtcgccattcaactcgccgagtccgcaggacagcccccgactatcctcttttacgcagcaccaccgtccagtgatagcggtacattccgggatcgctagatcccctcatccctcatctgcattacatttcccaactacaagtattctcccgcaaacagcatccacatattttcctcatactgcaattcggtatcccccacacctgaatccccaggaccctctgaaggaccttgtatcactggcctgcgatcccgcttcccaacagccagggcctagttggtatttgggctag

SEQ ID NO: 232989 - DNA, 1527 bp, synthetic construct
  misc_feature 1..1527: note = Description of Artificial Sequence: Synthetic coding sequence
  source 1..1527: mol_type = other DNA
atgtactcgtcgcccctctgcctgacccaggatgagttccatccatttattgaagccctgttaccacacgtgcgagcattcgcttacacatggttcaacttacaggctaggaaacgcaaatattttaaaaagcacgagaagagaatgtccaaggacgaggaacgcgcagtaaaagacgagctgctcggggaaaagcctgaggtgaaacagaaatgggcctctcgtctccttgccaagctcaggaaagacattaggcccgaatgccgtgaagattttgtgctgtccattacaggaaaaaaagcccctggctgtgtcttgtcaaaccccgatcagaaggggaagatgaggcgaatcgattgcctgagacaggctgacaaagtctggcgtctggaccttgtgatggtgattctgttcaagggaattccactggagagtacagacggggaacgacttgtcaaggccgcacagtgtggccatcctgtgctgtgcgttcagcctcaccatattggcgttgcagtgaaagagctcgacctttatctggcatactttgttcgggagagagatgcagaacagtccggctcccccaggacaggaatggggtccgatcaggaggacagcaaacctataacattggacaccacagatttccaggagagcttcgtcacctccggcgttttctctgtgacagagttgatccaggtctcccggacgcctgtggttacagggacagggcctaacttttcactgggggagttgcagggacatcttgcatacgacctgaaccctgcatctactggtctgcgcagaacactcccaagtacttcaagcagcggatccaaacgtcacaagagtgggtcaatggaggaagatgtggatacctcccccggaggagattattatacatcgccctcgtctcccacaagttctagccgtaattggacagaggacatggaaggcggaatctcttctccagtgaaaaaaactgagatggataaaagcccctttaattcacctagcccgcaggatagtcctcggctctcttcctttacacagcatcaccggcctgtgatcgcagttcactcgggcatcgcgagaagccctcacccatcctctgctctccactttcctacaacaagcattctgccccagaccgcctctacctattttccacacacagctattcggtacccgcctcatctgaaccctcaggatccactgaaggacctggtcagcttggcttgcgaccctgcgagccagcagccagggcctctgaatggatcaggacagctgaagatgccttctcactgcctcagcgcacaaatgctggcacccccaccgccaggactgcctagactggccttgcctcccgcaacaaagcccgctacgacttctgaaggcggagccacttctccaacatctccatcgtattcccccccagatacctccccagcgaaccggtcctttgtgggtttgggcccacgggaccctgcaggtatctatcaggctcagagttggggggatggctag

SEQ ID NO: 232990 - DNA, 1221 bp, synthetic construct
  misc_feature 1..1221: note = Description of Artificial Sequence: Synthetic coding sequence
  source 1..1221: mol_type = other DNA
atggacgagtttcatcccttcattgaggctttgcttccgcacgtacgcgctttcgcttatacatggtttaatttgcaggcccgaaaaaggaaatattttaagaaacacgaaaagcggatgagtaaggacgaagagagggcagtgaaggatgagcttctgggggagaaacccgaggttaaacagaaatgggcctctagactgctggccaagctgagaaaagacattcgtcctgaatgccgggaggactttgtcctgagcatcacaggaaaaaaagcgcctgggtgcgtcttatctaacccggaccagaaggggaaaatgcgaagaattgattgtcttcggcaggccgataaggtctggagacttgacttggttatggtcatcctgttcaaaggaatacctctggaatccacagacggcgagagattggtaaaggcggctcagtgcggtcatcccgtattatgtgtgcagccacaccacatcggcgtcgccgttaaggagctggacctgtacctagcctatttcgtccgagagcgagataccactgatttccaggaatcctttgtgacctccggcgttttttcagtgaccgagctgatccaagtctcccggacacccgttgtgacaggcaccggacctaatttctcacttggcgagttgcagggacatttggcctatgatcttaaccccgcttccactggcctgagaaggactttaccatcaacatccagtagcgggtctaaaagacacaagagcgggtctatggaagaagatgtagatacctcgcccggaggtgattattatacatcgccaagctctccgacatctagctcgcgaaactggactgaggacatggaaggtgggatctcaagcccagtgaagaaaacagaaatggataagtcgccattcaatagcccttcacctcaggacagccctaggctttcttccttcactcagcatcatagacccgtgattgcagtacactccgggattgctcgaagcccgcacccctcctctgccctgcactttcccaccaccagcatattgccacagactgcctcaacctacttccctcatacagccatcagatacccgccacacctgaatcctcaggacccattgaaggatctggtgagtttggcatgtgaccctgcctctcaacaacccggtcccccaacactccggccaacccgccctctacagaccgttccattgtgggattag

SEQ ID NO: 232991 - DNA, 1293 bp, synthetic construct
  misc_feature 1..1293: note = Description of Artificial Sequence: Synthetic coding sequence
  source 1..1293: mol_type = other DNA
atggatgagtttcatcccttcattgaggccctccttccgcacgtgcgcgcatttgcctacacctggtttaatctgcaagcccgaaagaggaaatactttaagaaacacgagaaacggatgtctaaagatgaagagagggccgtgaaggacgagctgctaggagaaaaacccgaagtaaagcagaagtgggctagcaggctgctcgccaagctgcgaaaagatattagacccgaatgtagagaggacttcgtgctcagtatcaccggaaaaaaggctcccggatgtgtactatccaatccagatcaaaaaggcaaaatgagacgcatcgattgtctccgacaggccgacaaggtctggagactggacctggtcatggtgattctgttcaaaggtattcctttggagagcactgacggcgagcgtctggtaaaagccgcacaatgcggccacccagttctgtgtgttcagccacaccacataggcgtcgctgtgaaggaactcgacctctacctcgcttactttgtgcgcgagcgagacgctgaacaaagcggctctcctcgcacaggcatgggatctgaccaggaagatagtaaaccaattactctggatacaaccgatttccaggagtccttcgtgacatccggggtcttttcggtgacagagttgatccaggtttcaagaaccccagtggtaacaggtacaggcccaaacttctctttaggggagctccaggggcacctggcatacgatctaaatcccgcaagcacaggcttaagaaggacactgccatccacgtcctccagcggctctaaaagacacaaaagcggcagcatggaagaggacgtggatacgagtccaggtggcgactactatactagccccagtagccccacctccagcagccgaaactggactgaggacatggaaggaggaattagctctcccgtgaagaaaactgagatggacaagagcccattcaacagcccctcaccgcaagactccccaaggctgtcctctttcacacagcatcaccggccagttatagccgtccactctggcatagctaggtctccccacccgtctagcgctctgcacttcccaactaccagcattctgcctcaaactgcctctacatacttcccccatactgcaataaggtacccccctcatctcaatccccaggatcctttgaaggatctcgtatcgttggcttgtgatccagcgtcacaacagcctgggccaccaactttgaggcccaccaggccactgcagacagtaccactctgggactag

SEQ ID NO: 232992 - DNA, 1500 bp, synthetic construct
  misc_feature 1..1500: note = Description of Artificial Sequence: Synthetic coding sequence
  source 1..1500: mol_type = other DNA
atggatgaatttcatcccttcattgaggcactgttgccccatgtgcgcgcttttgcatatacctggtttaatctccaggctagaaaaaggaagtacttcaaaaagcatgagaaacgcatgtcgaaggacgaggagagggccgtaaaggacgagttattgggcgaaaaacccgaggtgaagcagaagtgggcctcgcggctcctggccaagctccgcaaggacatccgcccagaatgtcgagaggactttgtgctttctatcacagggaaaaaggccccagggtgcgtactgtctaaccctgaccagaagggcaaaatgaggagaatcgactgtttaagacaggctgataaagtctggcgcctagacctcgttatggttatcctgttcaagggcatacccctcgagagcacagacggcgaacgtctcgttaaggcagcgcaatgtgggcaccctgttttgtgcgtgcaaccccatcacattggcgtggctgtgaaggaattagacctctacctggcctatttcgtgcgggagcgggacgctgaacaaagcggttctcctaggacaggcatgggatccgaccaagaggactcaaagccgatcactctggacactaccgattttcaggagtcgtttgtcacctccggggtgttctccgtgacagagctcattcaggtgtctagaacacctgtagtgaccggtacgggacctaactttagcctcggcgagctgcaaggccacctggcctacgacctgaatcctgcttctactggcctgcgtcgtaccctgccttctacctctagcagtggctcgaagagacacaaatctggatctatggaagaggacgtagacacctccccaggcggagattattatacaagtccttccagtcccacctcttcctccagaaattggactgaggacatggaaggcggtatatcaagtccagtgaagaagactgagatggacaagagccctttcaactcgcccagtccacaggattccccgaggcttagctctttcacccaacatcaccgacccgtcattgctgttcacagcggaatcgctagaagcccacatccgtcgagcgcgctacacttccctactacatcgattctgccccaaaccgcaagtacttatttccctcacactgctatcaggtatcctccccatttaaatcctcaggaccccctgaaagatctggttagcttagcctgtgaccctgccagtcagcaacccggacctctgaatgggagcggacagctgaagatgccctcccattgcctctcagctcagatgctggccccacccccaccgggtctacctcggctcgctttaccacccgcaacaaaacctgcaacgacatcagaaggaggcgctacttctccgacctcgccgtcgtatagcccacctgacacctccccggctaacagaagctttgttgggctggggcctcgcgaccctgccggaatttatcaggcccagtcttggtatctaggctag

SEQ ID NO: 232993 - DNA, 1500 bp, synthetic construct
  misc_feature 1..1500: note = Description of Artificial Sequence: Synthetic coding sequence
  source 1..1500: mol_type = other DNA
atggacgagtttcacccctttattgaagcactgttaccccatgtgcgtgcatttgcctacacttggttcaacctccaggctcggaaaaggaaatattttaaaaagcatgagaaacgcatgagcaaagatgaggaacgggctgtcaaagacgagttactgggggaaaagcccgaggtcaagcagaaatgggctagtcgattactcgctaagttgaggaaagatatccggccagagtgcagagaagactttgtgctatcaattactggcaagaaagccccaggctgcgtcctgtccaaccccgaccagaaaggtaaaatgcggcgtattgactgcctccgtcaggcggacaaggtctggcggctggaccttgttatggtcattttatttaaaggcattcccttggagagcactgacggagaacgcctggtcaaggctgcccaatgcggccaccccgttctctgtgtgcaaccacaccatattggggtagcagtgaaggagttggacctttatctggcttacttcgtgagagaacgagacgccgagcagtcagggtcccctagaaccggcatgggatccgatcaggaggactccaaacctatcacccttgatacaactgattttcaggaaagcttcgtgaccagtggcgtgtttagtgttactgagcttatccaggtaagtcggacccccgtagtgaccgggacaggcccaaacttctccctgggtgagctgcagggtcatctcgcttacgatctgaacccggcttccactggattaagacgaacgttaccttcaacgtcctcatcggggagcaagcgccataaatctggcagcatggaggaggatgtggatacaagccccggaggagattactacacgtctccatcttctccaacctcaagtagccggaactggacagaagatatggaggggggaatctcttcccctgtgaaaaaaaccgagatggataagtcccccttcaattcaccatctccacaggatagcccacgccttagtagctttactcagcaccataggcccgttatcgccgtgcatagtggcatagcccgaagtccacacccttccagcgcgcttcacttccctacaacgagtattctgccgcaaactgcgtccacctattttccacataccgctatcaggtatcctccccatttgaaccctcaggatcctctgaaagacctcgttagcctagcgtgtgaccctgcatctcaacaacccggaccgctaaacgggtctggtcagctcaagatgccctcccattgcttgagtgcgcaaatgctggcaccaccgccaccaggactgcccagattggccctgcctcctgccaccaaacctgcgaccacttcagaaggtggcgcaacttctcccacaagtccaagctacagtccgcctgatacctctccggcaaaccgcagctttgttggtctgggacctcgggatccagctgggatttatcaagcacagtcttggtacctaggttag

SEQ ID NO: 232994 - DNA, 1212 bp, synthetic construct
  misc_feature 1..1212: note = Description of Artificial Sequence: Synthetic coding sequence
  source 1..1212: mol_type = other DNA
atgggagctactgagcctggaggggatactagtagcgatgagttccatcccttcatcgaggccctgcttccacatgtaagagcgttttcttatacatggttcaacctgcaggctagaaagcggaagtattttaaaaagcatgaaaaaaggatgagtaaagatgaggagcgggctgtgaaagacgagcttcttggcgagaagccagaaatcaaacaaaagtgggcttctcggctcctcgccaaattacgaaaggatattcgtccagaattccgagaagacttcgtcctaactattactggcaaaaaaccaccttgctgcgtgctctcgaacccagaccagaagggaaaaattagacggattgattgcctccgacaggcagataaggtctggcggttagatctcgtcatggtgattctgtttaaggggattcccctcgagagcactgatggtgaacgcctgtataagtcacctcaatgttctaaccccggtctatgcgtacagccccaccacattggcgttactatcaaagaattggatctttacctagcctatttcgtgcacactcctgaaagcggccagtccgactcctccaaccaacagggagatgccgacattaagcctctgcccaacggccatctatctttccaagactgttttgtgacttctggagtctggaatgtaacagaactggttagggtctcacaaacccctgttgcgactgcgtccggcccaaattttagcctagctgatcttgaatccccttcttactataacattaaccaggtaaccctcggaagacgtagtatcacaagccccccttccaccagtaccaccaaaaggcctaagtccatcgacgattctgaaatggaatcccctgtcgatgacgtcttctacccaggaaccggccgtagtccggcagctggtagtagccaatcttccgggtggcctaacgacgttgatgctgggtccccccgagccactgcatctgctttgcactttccttctacttctattattcagcaatcaagcccctacttcactcaccccacaataaggtatcatcaccaccatgggcaggactcgctcaaggagtttgtgcaatttgtgtgctctgatgggtccgggcaggctaccggccagcattcacaaaggcaggctccccctctacccaccggtctgagcgctagtgaccctggaaccgctaccttttag

SEQ ID NO: 232995 - DNA, 1383 bp, synthetic construct
  misc_feature 1..1383: note = Description of Artificial Sequence: Synthetic coding sequence
  source 1..1383: mol_type = other DNA
atgctgccggcttgccggctccaagatgaattccaccctttcatcgaagcacttcttccccatgtccgggcattctcttacacatggttcaacctacaagcccgtaaacggaagtacttcaaaaaacatgaaaaacgtatgtcgaaggacgaggaacgcgctgtaaaggacgaacttttaggcgaaaagccagaaatcaaacaaaaatgggcaagccgactgctggcgaagctgaggaaggatatcaggccggagttcagagaggatttcgtgctaaccattactggcaaaaagccaccatgctgtgtactgagcaatcctgatcaaaaaggcaagatcagaagaatcgactgcttgagacaggccgacaaagtctggaggctggatctggtcatggttattcttttcaagggcatacctcttgaatctacagatggagaacggttatataagtcccctcagtgctcaaacccgggactgtgcgtccaaccgcaccacattggggtgacgataaaagagctggatctctatctagcgtactttgtgcatacccccgagtcgggtcaatctgattcgagtaaccaacaaggagacgcagacattaagccattacctaacggccacctgagctttcaggactgcttcgtgactagcggtgtatggaacgtgacagaactggtgcgggtatctcagacccctgtagctaccgcgagcgggccaaatttctcgctggcagatctggagtccccttcatattataacattaaccaagtgactctgggtaggagaagcatcacctctccgccaagtaccagcaccaccaaaaggccaaagagtattgatgactccgagatggaatcccctgtggacgatgtgttctaccccggaacggggagaagccctgcagcgggttcgtcccagagctccggttggcctaacgacgttgacgccggaagcccccgagcgacagcatccgctctgcacttcccaagcacttctattattcagcaatcaagtccatactttacccaccctaccattcgctaccatcaccatcatggccaggattcactcaaagagtttgtccagttcgtttgctcagacgggtctgggcaggcaactggacagccaaacggaagtggacaggggaaggtgccaggcagtttcctactgccacctccccctcccgtggcaagacctgtgcccctgccaatgccggattccaagagtactagtactgccccagacggtgccgctcttacacctccctcgccgtccttcgctactactggggcttcttccgccaatcggttcgtgtcaatcggcccacgcgacggtaatttcctgaatattcctcagcagtcacagtcttggtttctgtag

SEQ ID NO: 232996 - DNA, 1326 bp, synthetic construct
  misc_feature 1..1326: note = Description of Artificial Sequence: Synthetic coding sequence
  source 1..1326: mol_type = other DNA
atgtactccccttattgccttactcaggatgagtttcacccttttattgaggcacttcttccgcacgtccgtgcattcagctatacctggttcaatctgcaggccaggaaacggaagtatttcaagaagcacgagaaacggatgtcaaaggacgaagaaagggccgttaaggacgaactgctgggggagaaacccgaaattaagcaaaaatgggcatcccgtctgttggccaaattacgaaaagacatcagacccgagttcagagaagactttgtacttactattacgggcaaaaagcccccatgttgcgtgctatctaatcccgatcagaaaggaaaaatccgtcgcatcgactgccttcggcaggcagataaagtatggagactcgacttagtgatggttatcctgttcaaaggaatcccactcgaaagcacagacggagagcgcctctacaaatcaccacagtgctccaatccaggtctctgcgtccagccccaccacatcggggtcacaatcaaagaactggacttatatttagcctacttcgtgcacacacctgagtctggccaaagcgactcctcaaaccaacaaggggacgccgatattaagcccttgcctaatggacatctgtcattccaagactgcttcgtcacgtcaggcgtttggaatgttacagagttggtccgggtcagccagacccccgtcgccactgcctcaggaccgaatttcagcctggcggatctggaatcgccaagttattataacatcaatcaagttactctagggaggcggtccattaccagtccacccagcacatccacgacgaagcggcctaagagtatcgatgactctgagatggagtctccggtggatgacgtattttaccctggaaccggacggtcccccgctgcaggctcttctcagtccagtggatggcccaatgacgtggatgccggtccagcttccctgaagaaatccggaaagcttgatttctgtagtgcgctgagttcccagggaagcagccctagaatggctttcacgcaccaccccctccctgtcctcgccggtgtaaggcccggtagtcctcgagccaccgcttcggccttgcatttcccgagtacttctatcatacagcaatcttccccttacttcacccatccaacaattcggtaccatcaccaccacgggcaagactcactcaaagaattcgtgcagttcgtctgcagtgacgggagcgggcaggcgacaggtcagcatagccagaggcaggcacctcccctgccaacaggcctgagcgcttcggatccaggcactgccacgttttag

SEQ ID NO: 232997 - DNA, 1509 bp, synthetic construct
  misc_feature 1..1509: note = Description of Artificial Sequence: Synthetic coding sequence
  source 1..1509: mol_type = other DNA
atgtacagcccgtactgcctcacccaagatgaattccatccgtttattgaggccttgcttccacatgtgcgggcattctcttacacgtggtttaatctgcaggcaaggaagcgcaagtactttaaaaaacatgagaaaaggatgtctaaggatgaggagagagcagtgaaggatgagcttctaggcgaaaaacctgaaatcaaacagaaatgggcaagcaggctgctcgcgaaactgagaaaggacatacggcctgagttccgggaagactttgtgctgacaatcaccggaaaaaaaccgccttgttgcgttctaagtaatcctgaccagaagggcaagatccgacgtatcgattgtttgagacaggccgataaggtgtggagactcgatctggtcatggtgatcctgtttaagggaataccactggagagtactgacggggagcgtctgtacaaaagtccgcaatgctcaaaccccggtctctgtgtgcagcctcaccacatcggcgtgaccattaaagaactcgacctgtatctggcatactttgtgcacacccccgagagcggtcagagtgactcctcgaaccagcagggggatgcagatatcaaaccgttacctaacgggcacctttcgtttcaagattgcttcgtcacgagtggcgtgtggaatgttacggaactggtccgtgtgagtcagacccctgtagcgacggcttcaggtcccaatttcagcctggccgacttagaatcacccagctactacaacatcaatcaggtgactctggggaggcgaagcattacaagccccccatctaccagtaccacaaagagacccaagtcgatagatgattccgagatggaatctcccgtggatgatgtgttctatcccggtacaggacgctcccccgctgctgggagcagtcagagctccggctggcccaacgatgtggacgccggacccgcatcgttaaaaaagagcgggaagttggatttttgcagtgccctgagcagccaaggctcttctccacggatggcctttactcaccaccctctaccagtgctggccggagtgagacccggttctcccagggctactgccagcgccctgcacttcccgtccacttccatcattcagcagagctctccctatttcacccatccaacaatcagatatcaccatcatcacggacaggattctctcaaagagtttgtgcagttcgtttgctccgatggcagtgggcaggcaacaggtcagcctaatggctccgggcagggaaaagtcccaggaagcttccttctgccaccaccgcctcctgtagcccgacctgtgcctttgcccatgcctgacagcaaatctacctcaactgcgcctgacggtgcagcactcacccccccatctccctcattcgcaacaaccggcgcaagctcagcaaatagatttgtgtcgataggacccagagatgggaacttcttaaatattccccagcaatcccaaagttggtttctttag

SEQ ID NO: 232998 - DNA, 633 bp, synthetic construct
  misc_feature 1..633: note = Description of Artificial Sequence: Synthetic coding sequence
  source 1..633: mol_type = other DNA
atgtcgaaggacgaggaacgggctgtgaaggatgagcttctcggcgagaaacccgagatcaagcaaaaatgggcaagcaggttgctggcaaagttgcggaaggacatacggccagaatttagggaggattttgtgttgactatcactggaaagaagccgccatgctgcgtcttatctaatccagatcagaagggcaagatccgacgcattgattgcctgcggcaggcagataaggtctggagactcgacctcgtaatggtcatcctgttcaaagggattcccctggagagcacggacggggaaaggctgtacaagtctccacagtgtagtaatccgggtctttgtgttcagccccaccacatcggagtgactatcaaagagctcgacctctacctggcttatttcgtgcacaccccagaatcgggccaatcagactcctctaaccaacagggcgacgcagacattaaacccctacctaatggtcatctatccttccaggactgtttcgtgacctctggagtgtggaatgtgacggagttagtctatcacaggcttttgcttcagcagcatcagggacccactagcccctggagaacctggagggtgcctgctactaccacgagcaccaggtag

SEQ ID NO: 232999 - DNA, 1071 bp, synthetic construct
  misc_feature 1..1071: note = Description of Artificial Sequence: Synthetic coding sequence
  source 1..1071: mol_type = other DNA
atggcaggagtggcttgtctagggaaggccgcagacgctgacgagtggtgcgattcaggcctcggcagcctcggtccagatgccgcagccccaggcggtcccggattgggggctgagctggggcctgggctgtcttgggctccattagtctttggttatgtcactgaggatggtgacactgcgttgcacctggcagttattcatcagcatgaacccttcctggatttccttttgggattctccgcgggaacggagtatatggacctgcaaaacgacctcggacagaccgctctgcacctggcagctatcctcggggagacatctacagtcgaaaaactgtacgccgctggcgcaggcctgtgcgttgcagaaaggcggggtcacaccgcacttcacctcgcatgtcgtgttggcgctcacgcatgcgcacgtgctctgcttcagcccaggccacgtaggccccgtgaggcaccggacacttacttggctcaggggccagacagaacccccgatacaaaccacacacccgtggctctgtacccggattcggaccttgagaaggaggaagaagaaagtgaggaagactggaaactccagctggaagcagaaaattatgagggacacactcctctccacgtggctgtcatccacaaagatgttgaaatggtgcgactcctgcgtgatgctggggctgacctggacaaaccagagcctacgtgtgggcgaagccctctgcacctggcagtggaggcccaggcagctgatgttctcgagttgctccttagggctggagcaaaccctgcagcgagaatgtacggtggaaggaccccgcttggcagtgcaatgctgagaccaaatccgattctggcaaggctcttgcgggctcatggggctcctgagccagagggggaggacgagaagtctggtccatgcagcagttcaagcgattctgatagcggcgacgaaggcgatgaatatgacgacatcgtggttcattctagtcgctctcaaactaggttgccacccactcctgcctcaaagccgttgccagacgaccctcggccagtgtag

SEQ ID NO: 233000 - DNA, 921 bp, synthetic construct
  misc_feature 1..921: note = Description of Artificial Sequence: Synthetic coding sequence
  source 1..921: mol_type = other DNA
atgaacggtgcgactgcagcttgggccccttgggtgaggactcaaaggcccccagaagatctgggttgggcccgatcgtgggcaaggggatgtcgcggactcccgagcagctccgcaacttcactccgaatgggcaccaggttttccgcgggaaccgagtacatggatctgcaaaacgaccttgggcagacagccttgcatctggcggctattctgggtgagacttcaacggtcgagaagttatacgccgctggtgctggtctgtgtgtggcagagagacgaggacacaccgctttgcatttggcctgcagggtcggcgctcacgcctgcgcgagggccctgctgcagccgcgtccacgccgacctcgtgaggcccctgatacatatcttgctcaaggacccgatcgaactccagacacgaaccacactcctgtggccttatatccagacagcgatctcgagaaagaggaggaggagtctgaagaagactggaaattacaactcgaggccgaaaattacgagggccatactccgctgcacgttgctgttattcacaaggatgtagagatggtgaggttgctcagagacgccggtgcggatcttgataagcccgaacccacatgcggtaggtcgccactccacctcgccgttgaggctcaagctgccgatgtgctggagttgcttttacgggcaggagctaatcctgcggcaagaatgtacggtgggaggaccccccttggcagtgccatgctcaggccaaacccgatccttgcacgcctgctcagggcccatggagctccagaacctgagggagaggatgaaaagtcaggaccttgtagcagctcatctgacagcgatagcggcgatgaaggagtatcgcaagaagagcgacagggaagcccggctgggggaagtggctag

SEQ ID NO: 233001 - DNA, 1086 bp, synthetic construct
  misc_feature 1..1086: note = Description of Artificial Sequence: Synthetic coding sequence
  source 1..1086: mol_type = other DNA
cttcagaattcgagacagagtcccgctaccggtgggagactccgcggagctccagaggctgccggagccatggcaggggtcgcctgcttggggaaggccgcagacgctgatgagtggtgtgactccggcctcggatctttgggacccgacgccgctgccccaggtggaccaggattgggggcagaactaggcccagggctgtcatgggcacctctggtcttcggctacgtgacagaagacggggacactgctttgcatttggctgtaattcaccagcacgagcccttcctagacttcttactcggattctccgcaggcacagaatacatggatctacaaaatgatcttggacaaacggctcttcatttggccgcaatacttggcgagactagcaccgtggaaaagttatatgcggctggcgcaggactttgtgtcgccgagcggagggggcacacggccttacacctggcctgtcgggttggagcgcatgcgtgcgccagggcccttctccagcctaggccgcgtcgtccccgtgaggctccggacacctacctggcccagggacctgatcgcacccccgatactaatcacactccagtggccttgtacccggacagcgatcttgagaaggaggaggaagagtcagaggaagattggaaactccagctggaagctgagaactatgagggtcacacgcccctgcatgttgccgtgattcacaaagatgttgagatggtgagattgttgcgtgacgcaggagccgatctcgataaacccgagccaacatgtggacggagcccactccatctggcagtggaagcgcaggctgctgatgtcctggagctcctgctgagggccggtgcaaaccccgctgcacgcatgtacgggggtcgcacacccctcggctctgctatgcttcgtcctaacccaatactggcccgtctgctacgcgctcacggcgctccagagcccgagggggaggatgagaagagcggaccttgttcttcaagtagcgacagcgattcgggggatgagggagtatctcaggaagaacggcagggctctcccgctggaggcagtggctag

SEQ ID NO: 233002 - DNA, 1791 bp, synthetic construct
  misc_feature 1..1791: note = Description of Artificial Sequence: Synthetic coding sequence
  source 1..1791: mol_type = other DNA
atgatcgttgataagctgctggatgattcccggggtggagaggggttgagggacgcggcagggggttgcgggctcatgactagtccacttaatcttagttacttttacggagccagcccaccggcagcagctcctggcgcttgtgatgcatcttgttctgtactgggtcccagtgcccctggatctcctggaagcgatagctctgacttctcttcagcctcttcagtatcttcttgcggcgctgtggagtcaagatcccgaggaggggcaagagcagaaaggcagccagttgagccccacatgggcgttggcaggcagcagagggggccttttcagggcgtcagagttaaaaattcagtcaaggaactgctgctgcatataaggtcccacaaacagaaagcttccggacaggccgtcgatgatttcaaaacgcaaggggttaacatcgagcagtttcgtgagcttaaaaatactgtgagttactctggtaaaaggaaaggacccgactcactcagcgatggtcccgcttgcaagaggccagccctgctccactcccagtttctcaccccaccccaaacacccacacccggagagtctatggaggatgtccatctcaacgaacccaaacaagagagttcagccgatctcctgcagaacattatcaacattaagaatgagtgtagtccagtgtctctgaataccgtgcagacctcatcatctgttcagcagcaaaatgacgcgcatctgcactcattttctatgatgcccagcagcgcctgcgaggccatggtgggtcatgagatggctagcgactccagtaacacttccttgcctttctctaacatggggaaccccatgaacaccacacaattaggcaaatcgcttttccagtggcaagtggaacaggaagagtcaaagctggcgaatattagtcaagatcagttcttgagcaaggacgctgatggagacacctttctgcacattgccgtggctcagggcaggcgcgctttaagttatgtgctagctcgcaaaatgaacgccctgcacatgttggacattaaagagcataacggtcaatcagcttttcaggtggccgtagcagccaatcagcatctgattgtccaagacttggtgaacatcggggcacaagtcaacactacagattgctggggaaggacgccgttacatgtctgcgcagaaaagggccacagccaggtgctccaggctatccagaagggggctgtgggcagtaaccaatttgttgacctagaagcaacaaactacgatggactcacccctcttcattgtgctgttattgcgcataacgctgtggttcatgagttgcagaggaaccaacagccgcattcccctgaagtgcaggaactgctgctgaaaaacaaaagcctggttgacacaataaaatgtttaattcagatgggcgctgctgtcgaggcaaaggaccgaaaatcaggtaggactgctttgcacctcgccgctgaggaggccaatttggagctgatacgactcttcctcgagctcccgtcttgcttgtctttcgtgaacgctaaagcatataatggaaacactgctctgcacgtcgcagccagcctgcaatacagactgacacagttggatgccgtaaggttgctcatgcggaaaggcgctgatcctagcacacgaaacctggaaaatgagcaacccgtgcatctggtgccagatggcccagtgggcgagcaaatccgtcgcatcctgaaaggaaaatcaatccaacagagggctccgccatactag

SEQ ID NO: 233003 - DNA, 2157 bp, synthetic construct
  misc_feature 1..2157: note = Description of Artificial Sequence: Synthetic coding sequence
  source 1..2157: mol_type = other DNA
atgattgtcgataagttgctggatgattcaagaggcggtgaaggcctccgggacgcagcaggtggctgtggcctaatgacatctccgctgaacctttcctacttctacggggctagcccccctgccgcagcccctggagcatgtgacgcatcttgcagcgtccttgggccaagcgcccctggctctccaggatctgactcttctgactttagctccgcgagctccgtgtcaagttgcggcgcagtcgagtcgcggagccgagggggagccagggccgaacgccagccagtggagccgcacatgggcgttggccgacagcaaagagggcctttccaaggcgtgcgtgtgaagaactccgtgaaagaactgctgcttcacatccgctcccacaagcagaaggcaagcggccaggctgtcgatgactttaagacgcagggagtgaacatcgagcagttcagagagctcaaaaacacagtgagttactccggaaagcgcaaggggccagattcactctcggacggcccagcctgtaaacggcctgcactccttcattctcagtttctgacccccccacagacccctacccccggtgaatcgatggaggatgttcatctgaatgaacctaagcaggagtctagcgcagacctcctacagaacatcatcaatataaaaaatgaatgctccccggtgtctctgaacactgtccaggtcagctggcttaatccggtggtagtcccccagtcttcgcctgctgagcagtgccaggattttcatgggggtcaggtttttagtccaccccaaaaatgccagcctttccaggttaggggctctcagcagatgatcgaccaggcttcactgtaccagtatagccctcagaatcagcacgttgagcagcagcctcattacacacacaaacccacactcgaatacagcccttttccgatccccccacagtcccccgcttacgagcccaacctgttcgatggccctgagtcccaattctgtcccaaccagtccctggttagtcttctgggcgatcagcgagagtctgagaatattgcaaatcctatgcagacatcatcatctgttcagcagcaaaacgacgcgcatctccatagctttagcatgatgccgtcatcagcctgcgaagctatggtgggtcatgagatggcttctgacagcagcaacacttcccttcccttctccaacatgggaaaccctatgaatacaactcaactgggcaagagcctgttccaatggcaagtggaacaggaggaaagcaaactggccaacataagtcaggatcagttcctgagcaaagatgctgatggcgatactttcttacatatagcagttgcccaaggcaggagagccctctcttacgtgctggcgaggaagatgaatgctctgcatatgctggacatcaaggagcataatggccaaagtgccttccaggtggccgtggccgctaaccaacatctgatcgttcaagaccttgttaacattggcgcacaggtcaacacaaccgactgctggggacgcacccctttgcatgtctgtgcagaaaagggccacagtcaagtgctgcaagccatccaaaaaggggcagttggtagtaatcaatttgtggacctggaagcaaccaactacgatggattaacgcctctccactgtgcagtaattgcccacaatgccgtagtgcacgaattgcagcgaaatcagcagccacattcgcctgaagtgcaggaacttttactgaaaaacaagtcactggtcgacactattaagtgcctcatacagatgggggctgctgtcgaagctaaggatcgcaagagcgggaggactgcactgcatttggccgctgaagaagctaacctggagttgattcggttgttcctggagctcccctcctgcctctcattcgtaaatgccaaagcctacaacggcaacaccgcacttcatgtcgcagcttccctgcagtacaggttgacgcagctcgacgcagtgcggttgctaatgcgcaagggagcggacccctctacgaggaacctggagaacgagcagcctgtacacttggtccctgacggacctgtgggggagcaaatccgccgaatcctgaaaggcaagtctattcagcagagagccccaccctattag

SEQ ID NO: 233004 - DNA, 1857 bp, synthetic construct
  misc_feature 1..1857: note = Description of Artificial Sequence: Synthetic coding sequence
  source 1..1857: mol_type = other DNA
atgggggttgggagacagcagcgaggaccttttcagggcgtacgcgtcaaaaactctgtaaaggaactgcttcttcacattcgtagtcataaacagaaagcgtccgggcaggcggtggatgatttcaaaacccaaggggttaatattgaacagtttcgcgaacttaagaataccgtatcctattcggggaagaggaaaggccctgacagcctcagcgacggaccagcatgcaagcggcctgccctcctccattcccagtttcttacacctccgcagactcctacacccggtgaatcaatggaagacgtacatctaaacgaaccgaaacaagagtcctctgctgatcttctgcagaacatcataaacatcaagaacgagtgctccccggtttctctcaacaccgtgcaggtgagttggcttaaccccgtcgtggtgccccagtcaagtcccgctgagcagtgccaggactttcatggtgggcaggtattctctcctccacagaagtgtcagccatttcaagtccgaggcagtcagcaaatgatcgaccaggccagcctctaccagtactcaccccaaaaccagcacgttgagcagcagccccattatacccacaaaccgacactcgagtattccccattccctatccctccacaaagtccagcttacgagcctaatctatttgacggcccagaatcccagttctgccccaatcagagccttgtttccctgctcggggatcagcgcgaatccgaaaacatcgcaaaccccatgcaaacgagctcttctgtccagcaacagaacgatgcccacttacattcctttagtatgatgccaagcagcgcctgcgaagcaatggtgggacacgagatggctagtgattcctctaacacaagtttgccattttcaaatatgggcaatcccatgaacaccacccaattagggaagagtctgttccagtggcaagtggagcaagaggagagcaagctcgcgaacatatcacaggaccagttcctcagcaaggacgcagacggagacaccttcttacatatagcggtggcacagggtagaagggcactcagctatgtgttagcgaggaagatgaacgcccttcacatgctggacattaaagagcacaacggacagagtgcttttcaggtcgctgtggccgctaaccaacatctgattgtacaagatctggtcaacattggagcacaggtaaatacgacggactgctggggcagaacgcctctgcacgtgtgcgctgagaaaggacatagtcaggtgttgcaagccattcaaaagggcgcagtggggagtaatcagtttgtggacttggaagccacgaactacgatggattgaccccactgcactgcgctgtgattgcccataacgccgtcgtccacgaactacagagaaaccaacagccgcatagccctgaagtacaggaacttttgctgaaaaataaatctctggttgacacgattaagtgcctgatccagatgggcgctgctgttgaggccaaggatcgcaagtcagggaggacagccctgcacttggccgcagaggaagccaaccttgaactgatacggttgtttctcgaactgccatcgtgtctcagtttcgtgaacgctaaagcctacaacgggaacaccgcactgcacgtcgcagcgagtttacagtaccgtctcactcaattggatgccgtgcggctcctcatgagaaagggggctgacccgtccaccagaaacctggagaatgaacagcctgttcacctggtgccagatggccctgttggggagcagatcaggcgcattttgaagggaaagtcaattcaacagagggccccaccgtactag

SEQ ID NO: 233005 - DNA, 333 bp, synthetic construct
  misc_feature 1..333: note = Description of Artificial Sequence: Synthetic coding sequence
  source 1..333: mol_type = other DNA
atgattgtggataaactgttagacgactctcggggaggggagggcctccgggacgcggcagggggatgcgggctcatgacctcgcccctcaatctgagttacttctacggagcgagtcccccagccgcagcaccaggggcttgcgacgcttcatgttccgtgctcggtccaagcgcaccgggatcacccggttccgatagttcggattttagttcagctagtagtgtgagcagttgcggagcagtggagtctcgatcccggggaggagctcgggcagagcgccagcccgtggaacctcacatgggagtcggacgacagcaaagggggccttag

SEQ ID NO: 233006 - DNA, 1806 bp, synthetic construct
  misc_feature 1..1806: note = Description of Artificial Sequence: Synthetic coding sequence
  source 1..1806: mol_type = other DNA
atgggcgtgggccgacaacagaggggcccatttcagggcgtcagagtgaaaaattccgtgaaagaacttctgcttcacatccgcagccacaaacagaaggcctcgggacaagctgtggacgacttcaaaacccaaggcgtgaatattgaacagttccgggagctgaaaaataccgtttcttacagcggtaagcgcaagggacccgatagcctgtccgatgggcctgcatgcaagcgccctgcgctcctccacagccagtttctgactcccccacagacgccaacaccaggagaaagcatggaggacgtgcatctgaatgagccaaaacaagagtcttccgcagacctcctacagaatatcataaatatcaaaaatgagtgttcccccgttagcctcaatacggtgcaggtgtcgtggttgaatccagttgtagtgccacaatcttcacccgcagagcagtgtcaggactttcatggcggtcaggtgttcagccctccccaaaaatgccagcctttccaggtcagaggaagtcagcagatgattgaccaggcatcactctaccagtactctccacaaaaccagcacgtggagcagcaaccacattacacacacaaaccgaccttggagtattccccttttcccataccacctcagtcacccgcttacgaaccaaacctattcgacgggcctgaatcccagttttgccccaatcagagccttgtgagcctcttgggggatcagagggagtcggagaacatcgctaatcccatgcagaccagttcttccgtgcaacagcagaatgacgctcaccttcacagcttttccatgatgccatctagtgcttgtgaggcgatggttggtcatgaaatggcttctgatagttccaatacaagcctccccttctccaacatgggtaatccaatgaatactacacagctggggaagtccctgtttcagtggcaggtggaacaggaagaatctaagctggctaatatctctcaggatcagtttctcagcaaagacgctgacggagacaccttcttgcatatcgccgtggcccaaggcagacgggctctttcctatgtcctggccagaaagatgaacgctttgcacatgctggacattaaagagcataatggacagtctgcattccaagtggcagttgctgccaatcagcatcttatcgtgcaggatctcgtgaatataggggcacaggtgaataccaccgactgctggggacgaactccactacacgtgtgtgctgaaaagggccattctcaggtgctgcaggccatacaaaaaggcgctgtcgggagcaatcagtttgtcgacctggaggcaaccaattacgatggactcacacctttgcattgtgccgtgatcgcccacaacgctgtagtgcacgagctgcagcggaatcaacaaccccattctccagaggtacaggagcttctgctcaagaacaagtctctggtcgacacgataaagtgtctgatacagatgggggcagcagtggaagccaaggatagaaagtccgggaggaccgccctacatctggccgcagaggaggccaacttagaactgataagactcttcctcgagctaccctcttgcttatcatttgtaaatgctaaggcatataacggcaatacggcactccatgtcgctgcatccctgcagtacagactgacacagctggacgcagtgcgcctgctcatgagaaagggagcagatccctccacccgcaatcttgaaaatgagcagcccgtgcacttggtgccagacggccctgtgggagaacagtag

SEQ ID NO: 233007 - DNA, 393 bp, synthetic construct
  misc_feature 1..393: note = Description of Artificial Sequence: Synthetic coding sequence
  source 1..393: mol_type = other DNA
atgggggtgggcaggcagcagcggggacctttccagggcgtcagagtaaagaacagcgttaaagaactcctgctgcatatcagatcacacaaacagaaggcatcagggcaagctgtggatgatttcaagacacagggcgtgaacattgagcagttcagggaactgaaaaacacagttagctatagcggaaagcgtaaaggaccagattccctcagcgacggacctgcctgcaagcgccctgccttactgcatagtcaattcttgacaccaccgcagactccgacccccggagagagtatggaagatgtccacctcaatgagccaaagcaggaatctagcgctgacctcttgcagaacattatcaacattaagaacgagtgctctccagtttag

SEQ ID NO: 233008 - DNA, 1101 bp, synthetic construct
  misc_feature 1..1101: note = Description of Artificial Sequence: Synthetic coding sequence
  source 1..1101: mol_type = other DNA
atgagcaacccctcccctcaggtgcctgaagaggaggctagtacgagcgtctgccgaccgaagagcagtatggcatcgacgtcaagacgccagcggagagagcggagatttagaaggtatctgtccgccggacggctggtgagggcccaggccctcctacagagacaccctggactggacgtggacgccggtcagccccctccgctgcatcgcgcatgcgctcgccatgatgcccctgccctgtgcctgttactgcgactcggcgcagacccagcccatcaggatcgccatggggacacggccctgcacgccgctgcccgacaaggtcctgatgcctataccgacttcttcctacctcttctctcccgatgccctagtgctatgggtatcaaaaataaagacggggagacccccggacagattctcggatggggtccaccatgggattcggccgaggaggaagaggaggacgatgcatctaaggagcgtgagtggcgccagaagctgcaaggcgacgcctcacacgaaacgcaggagcccgaatctttcagcgcttggagcgaccgactggctcgggaacatgcacagaaatgtcagcagcagcaaagagaagccgagggcagcaggcgcccacctcgggctgaaggctcgagccagtcgtggcgtcagcaggaagaggagcaaagactgtttcgcgagcgggcaagggcgaaagaagaggagctgcgagaatcccgagcccgtcgggcacaagaggcattgggggaccgcgagcctaaacccaccagagccggaccacgcgaggagcacccaagaggtgccggaagggggtcattgtggagatttggggacgttccctggccatgccccggaggcggagacccggaggctatggctgcagccttggtggcacgtgggcctccactggaagaacagggcgctctgcgcaggtatctgcgggtgcagcaggtcagatggcatcctgatcgttttctgcagaggttccggagccagattgaaacatgggaactgggacgcgttatgggagccgtgactgctctgtcacaggcattgaatcgacacgcagaggcgctgaaatag

SEQ ID NO: 233009 - DNA, 1077 bp, synthetic construct
  misc_feature 1..1077: note = Description of Artificial Sequence: Synthetic coding sequence
  source 1..1077: mol_type = other DNA
atggcctctacgtcaagacggcagcgtcgggagaggcgatttcggagatacctctctgcaggacgtctggtccgggctcaggctctactccagcgccatcccggtcttgacgttgacgctggccagcctcccccattgcacagagcctgtgcccgtcacgatgccccagccctctgtctcttacttcgactcggcgctgacccagctcatcaggataggcacggcgataccgccctgcacgcggctgccaggcaaggccctgacgcctacaccgatttcttcttgcccctcctgtctagatgcccatcggccatgggaattaagaacaaggacggagagacaccgggacagatcctgggctggggacctccgtgggattctgcagaggaggaggaagaagacgacgcaagcaaagagcgcgaatggcggcagaagcttcagggagagttagaggatgagtggcaggaggtgatgggacggttcgagggggatgcctcacacgaaacacaggagcctgaatcattctctgcttggtcagacaggctggccagggagcatgcccagaaatgccagcaacaacagcgcgaggccgaaggaagccgaaggcccccacgtgcagaaggttccagtcaatcctggcgccagcaagaagaggagcagagactcttccgcgagcgggctagggcaaaggaggaggaactacgcgaatctcgggcacgtcgagctcaggaggctcttggggatagggaacctaagcccacgcgggcagggcctagggaagaacacccacgaggcgcaggcagaggctctttatggcgtttcggggatgtgccttggccttgtcccggaggtggagacccagaagctatggcagcagcactcgtcgccagaggccctccactcgaagagcagggagcactcaggcggtaccttagagtccaacaggttcgctggcaccctgacagatttctacagcgctttaggagtcagatcgaaacttgggagctgggcagagtgatgggggcagtcacagctctatctcaagccctgaaccgccacgccgaagctctgaaatag

SEQ ID NO: 233010 - DNA, 1146 bp, synthetic construct
  misc_feature 1..1146: note = Description of Artificial Sequence: Synthetic coding sequence
  source 1..1146: mol_type = other DNA
atgagtaatccttccccacaggtacccgaagaagaggcttccacctctgtgtgtcggccaaaaagtagtatggcgtctactagtcgccgtcagcggcgtgaacgacggttccggaggtacctgagtgccggtagactggtgagggcccaggctttactgcagagacaccccggactagacgtggacgccggtcagcccccaccactgcaccgcgcatgcgctcggcatgacgctcctgctttgtgcctgctgctgcgcctaggcgctgacccagcccaccaggacagacacggagatactgctctgcacgccgctgctcggcaaggtccagatgcctacacggacttcttcctgcctcttctgagcaggtgcccgtcagctatgggcatcaaaaataaggacggcgaaactccgggacagattctgggatggggcccaccttgggatagcgcagaggaagaggaagaggacgatgcctctaaagagcgagagtggcgtcagaagttgcagggagagcttgaggacgaatggcaagaggtgatggggaggttcgagggggacgctagtcatgaaacccaagaacccgagtccttttccgcatggtccgatcgcctggcacgcgagcacgctcagaagtgtcagcagcagcagagagaagctgaaggcagcaggagaccgccaagggccgagggtagtagtcagtcatggaggcagcaggaagaagagcagcggctgtttagggagcgagcgcgtgcgaaagaagaagagctacgtgagagtcgggcaaggagggcgcaggaggcattgggggatcgagagccaaagcctacgcgggctggtccccgagaagagcatccgagaggtgcgggacgtggctccctgtggcggtttggcgatgttccctggccctgccctggaggcggtgatcccgaggccatggcggctgccctggtggcacgcggaccacccctggaggagcagggtgccctgagacgatacttgcgggttcagcaagtgagatggcatccagatagattcctgcagaggttccgttcccaaattgagacctgggagctgggaagagtcatgggggctgtcactgcactctctcaggcccttaaccgccatgccgaggcactgaaatag

SEQ ID NO: 233011 - DNA, 1101 bp, synthetic construct
  misc_feature 1..1101: note = Description of Artificial Sequence: Synthetic coding sequence
  source 1..1101: mol_type = other DNA
atgtcgaacccatccccccaagtgcccgaagaagaggcatcaacgagcgtgtgccgccctaagtcaagcatggctagtacatctcggaggcaacgacgtgagcgtcgctttaggcggtatctcagcgccggtagactggtccgggctcaggcactccttcagagacacccaggattggatgtggatgccggtcagcctcctcccctgcatagagcatgtgctcgccatgacgccccagctctgtgtctgctgcttcggttgggagcagatccagcgcaccaggacaggcacggggatacagctctccatgctgccgcaaggcagggtccagatgcctatacggatttttttctacctctcctgtctagatgcccatccgccatgggcatcaaaaataaagacggagagacccccggacagattttaggatgggggcctccgtgggacagcgcagaggaggaggaggaagatgacgctagtaaggagcgggaatggcgtcagaagctgcagggggatgccagtcacgaaactcaggagccggaaagttttagcgcttggtccgaccgtttggctcgggaacacgcccaaaagtgccagcagcaacaaagggaggcggagggctcctgtagaccgccacgggcagaaggtagttcacagtcgtggagacagcaggaggaggaacaaagactgttcagagagcgcgcaagagccaaggaagaagaactcagagaatcgcgcgctcgaagggcacaggaggccctaggcgatcgcgagccgaagccaacacgggcaggccctcgggaagaacaccccagaggggcagggaggggttcactgtggcggtttggcgatgtgccatggccctgcccaggaggcggagaccctgaggcaatggccgctgcactcgtagctagaggccctccccttgaagagcagggtgctcttcggagatatctgagagtgcagcaggttagatggcatcctgacagattcctgcagaggtttcgcagccaaatagagacttgggagctgggccgtgtaatgggggctgtgacagcgctgtcacaggctctcaacagacacgctgaagccctgaaatag

SEQ ID NO: 233012 - DNA, 1077 bp, synthetic construct
  misc_feature 1..1077: note = Description of Artificial Sequence: Synthetic coding sequence
  source 1..1077: mol_type = other DNA
atggctagtacttcgaggcgccagaggagggagcgcaggtttcggaggtaccttagcgctgggcgtcttgtgagagcgcaagcgctgctgcagcgacaccctggactggatgttgacgcagggcagccgcctcccttgcacagggcctgcgctcggcacgatgctccagcgctgtgcctactccttcgcctgggagctgatccagcgcatcaggataggcacggagacaccgcactccatgccgctgccagacagggacctgacgcatatactgacttctttctccccctccttagcagatgtccgagtgcaatgggaatcaagaataaggacggggaaacccctggacagattctaggatggggccctccctgggattctgcggaggaagaggaggaggacgacgccagcaaggagagggaatggcggcagaaactgcaaggcgagttggaggacgaatggcaggaggtcatgggcagattcgagggtgatgcctcccatgaaactcaagaacccgaatcattctctgcatggtcggacagattagcccgtgagcatgcacagaagtgtcagcagcagcagagagaagcagaggggagctgccgcccaccaagagccgaagggagctcccagagctggcgccaacaggaagaggaacagaggctgttccgcgagagggccagagccaaggaagaagaacttagggagagccgcgcaaggagggctcaggaggccctgggagatcgcgaacctaagccaacccgcgcagggcctagagaggaacaccctagaggcgctgggagaggtagcctttggcgctttggagatgtcccttggccatgtccaggaggcggagaccctgaagcaatggcagcggcactggtggctagagggccaccattagaagaacagggagctttgcgtagatacttaagagtccagcaggtcagatggcaccccgaccggttccttcagcgatttaggagccaaatcgaaacatgggaactcggaagagtaatgggagccgtaacagccctgagccaggcgttgaaccgacatgccgaggccctcaagtag

SEQ ID NO: 233013 - DNA, 1146 bp, synthetic construct
  misc_feature 1..1146: note = Description of Artificial Sequence: Synthetic coding sequence
  source 1..1146: mol_type = other DNA
atgagtaatccctcccctcaagttccagaggaggaagcatcaacttctgtttgccgtcccaaatcctcaatggcctctacctctagaaggcagcgcagagagaggaggtttcgccgttatcttagcgccggacgcctcgttcgggctcaggctctgctgcagcgccacccaggattagacgtggacgctggacagccgcctccactgcaccgcgcttgtgcccgacacgatgctccggctctctgcctgctgctgaggcttggggctgatccggctcatcaggatcgccacggggatacggcattgcacgccgctgccagacaaggtccagatgcatacacggactttttcctccctctgctatctcggtgcccctcagctatgggaatcaagaacaaggatggggagactccaggacagatcttgggctgggggcctccgtgggacagcgcggaggaggaggaagaggatgacgcgagtaaggaacgtgagtggcggcaaaaactccagggagagctggaagatgagtggcaggaagtcatgggccgatttgagggcgatgcatcccacgagacgcaagagcccgagtcattctcagcgtggtctgacaggctggcacgagagcatgcccagaagtgccagcagcagcagagagaggcagagggcagctgccgcccacctagggctgaagggagttctcagagctggcgccaacaagaagaggaacaacgcctgttcagggaacgagctagagctaaggaagaggagttgagagaatctagagccagacgggctcaggaggcacttggcgatcgggagccaaaacccacgagagcaggtcctcgtgaggaacatcctcggggagccggtagaggctcactttggcggtttggcgacgttccctggccctgccccggaggcggagacccagaggccatggcagccgctctagtagcccgtggcccaccactggaggagcagggagccctcaggcgctatttacgagtccagcaggtgaggtggcaccctgacaggtttttgcagcggttccggagccagatcgaaacttgggaattgggccgtgtgatgggtgctgttacagcgctgtcacaggccctcaataggcacgctgaggcccttaagtag

SEQ ID NO: 233014 - DNA, 1101 bp, synthetic construct
  misc_feature 1..1101: note = Description of Artificial Sequence: Synthetic coding sequence
  source 1..1101: mol_type = other DNA
atgtccaatccgtccccgcaggttcctgaagaggaggctagcaccagtgtatgtagacctaaaagctccatggcttccacatcccggagacaaagaagggaacgcagattcagacgatatctctcagccggaagactggtgcgggcacaggctctccttcagaggcatcctggactggacgtcgatgcgggtcaacctcccccactgcacagagcctgtgctagacacgacgcaccagccctgtgcctactgctccgtcttggcgctgaccccgctcaccaggataggcatggcgacacagccttacacgccgcagcccgacaaggacccgacgcgtatactgattttttccttcctctgctcagtagatgtccaagtgctatgggaatcaagaacaaggacggggagacccccggacagattctaggctggggccctccctgggattctgcagaggaggaggaggaggatgatgcttcaaaagagcgcgagtggcgccagaagttacagggggacgctagtcacgaaacccaggagcccgaatccttttctgcttggtcagacaggctcgctagggagcatgctcagaaatgccagcaacagcagcgcgaggctgaggggtcttgtagacccccaagagctgagggcagtagccagagctggcgtcagcaagaggaggagcagcgcctgttcagggagagagcaagggcaaaagaggaagaacttcgtgagtcaagagccaggagggcccaagaggccctcggcgatagagaacccaagcctacacgagccggtcccagggaagagcacccgaggggcgcaggtcggggttcgctctggcggtttggggatgtgccgtggccttgtccgggtggtggcgacccggaggctatggccgcagctctggtggcacgcggtccccctttagaagaacaaggcgcactcaggcgttatctgagggtacagcaggtccggtggcatccggaccgattcctccagcggtttcgatctcaaatcgaaacctgggaactgggcagagttatgggggctgtcacggcactgagccaagctctcaatcggcatgcagaagccctcaagtag

SEQ ID NO: 233015 - DNA, 1146 bp, synthetic construct
  misc_feature 1..1146: note = Description of Artificial Sequence: Synthetic coding sequence
  source 1..1146: mol_type = other DNA
atgagtaatccttccccccaagtacccgaggaggaagcaagcactagcgtctgtcgccctaaatcctctatggcctccacatcccggaggcaaaggagagagcgcagatttaggagatacctctccgctgggaggctagtacgggcacaggccctgctgcagagacatccgggactggacgtggacgcaggccagccacctcccctgcaccgcgcttgcgcaagacatgatgcaccggcactttgcttgctgcttcgcctgggcgctgacccagctcatcaggacagacatggcgatactgcactgcatgcagccgcacggcagggtcccgacgcatacacggacttcttccttccgctactgagccgatgccccagcgctatgggtattaagaataaggatggagaaacgccgggtcaaatccttgggtggggccctccctgggacagcgcagaagaagaagaggaggacgacgcctccaaggaacgcgagtggcggcagaagcttcagggagaacttgaagacgagtggcaggaggtcatgggcaggtttgagggagatgcgtctcacgagacccaagaacctgaatccttcagcgcatggagcgatagattagcacgtgaacacgcccagaaatgtcagcagcagcagcgggaggccgaagggagttgccgccctcctcgggcagaaggctccagtcagtcgtggagacaacaggaggaggaacagcgcctttttcgagagcgggcaagagctaaggaagaggagctgcgagagagcagggccaggcgagcgcaggaagccctcggggacagggagccaaagccaacccgagctggcccacgggaggaacaccctcggggagccggtagagggtcactgtggcgcttcggtgacgtcccatggccatgcccaggcggtggggatcctgaggcaatggccgctgcgcttgtagcccgagggcctccccttgaagagcagggagccctccgtcggtaccttagggtgcagcaggtgagatggcatccggaccgatttctccagaggtttaggtcccagattgagacttgggaactgggtcgggttatgggggcagttacggcgttaagtcaagctcttaaccgacacgccgaggcattgaaatag

SEQ ID NO: 233016 - DNA, 1101 bp, synthetic construct
  misc_feature 1..1101: note = Description of Artificial Sequence: Synthetic coding sequence
  source 1..1101: mol_type = other DNA
atgagcaacccttcaccacaggtcccggaggaagaagcttctacgagcgtgtgtcggcctaaaagtagtatggcatccacatccagacgacagcgacgagaacgccgattcaggcggtacttgagcgcaggcagactcgtgagagctcaagccctgctccagagacatcccggactggacgtcgacgcaggccagcctccacccttgcatcgcgcatgcgcgaggcatgacgctcctgccctctgtctgctgctgcgattaggcgcagatccggcacatcaggatcgacacggtgatacagccttgcatgccgcagctcgccaagggccagacgcctacaccgacttctttctgcctctcttgtcaaggtgtccatctgctatggggattaagaacaaagacggagagacaccaggtcaaattttgggctgggggcctccatgggattccgccgaagaagaagaggaggacgatgcttccaaggaacgagaatggcgacagaagctccagggagacgcatcccatgagacccaagaaccagagtccttctcagcatggtccgacagactcgccagagagcacgcccagaagtgccagcagcagcaaagagaggcagagggctcctgtcgtcccccacgggcagagggcagcagccagtcttggcggcagcaggaggaagagcagcgccttttccgggagagagcgagggctaaagaggaggagctgagggaatccagggcaagacgggctcaagaagctcttggggacagggaaccaaagcctacccgggctggtccccgagaggaacatcctagaggggctggaagggggagtctgtggcgcttcggtgatgtcccatggccttgtccaggcggtggcgaccccgaggcaatggcagccgcactggtggccagagggccacccctggaagagcagggcgctctccggcgttatctacgggtacagcaggtccgatggcaccccgacagatttctccagagatttcggagtcaaattgaaacctgggaattaggaagagtcatgggggctgtgactgccctctcacaggccctcaatagacatgctgaagcattgaaatag

SEQ ID NO: 233017 - DNA, 1101 bp, synthetic construct
  misc_feature 1..1101: note = Description of Artificial Sequence: Synthetic coding sequence
  source 1..1101: mol_type = other DNA
atgagcaatccaagtccgcaggtaccagaagaggaagctagtacatcggtttgccgtcctaagtccagcatggcctcaaccagccggcgtcagcgcagagagcgcagattccggcgttatctgagtgctggcaggctcgtgagggcccaggccctcctgcagaggcatccaggactggacgtggatgctggtcagcctccaccattacatagggcttgcgccaggcatgacgctcccgctctttgcttgcttctgaggctgggcgcagatcccgcacaccaggaccgccatggagacaccgccctgcacgccgcagcgcgacagggccctgatgcgtatacagattttttcttaccacttttgagccggtgcccgtcagcgatgggtattaagaacaaggatggagagacccctggccaaatcttagggtgggggccaccctgggattctgctgaagaagaggaggaggacgacgcctcaaaggagagggaatggcgacagaaactgcaaggcgatgcgagccacgaaacccaggagccagaatccttcagcgcctggagcgaccgactggccagagaacacgcgcagaaatgtcagcagcagcagcgagaggcagaagggtcttgccgtcctccaagagctgagggcagcagccagtcttggcgccagcaggaggaggagcagcgtcttttccgcgaaagagcgagggctaaggaggaggagttgcgggagtctagagctagacgagctcaagaggcacttggcgaccgcgagcctaaaccaactagagcaggccctcgggaggagcatccccgaggggcaggtcgtgggtctctctggcgctttggggatgtgccatggccctgtccaggcggtggtgatcctgaggcgatggccgcagccctagtggctcgcggtccacctttggaggaacagggcgctctgcggaggtatttgcgagtgcagcaggtgcgatggcacccggataggttccttcaacgcttcaggtcccaaattgaaacatgggagctgggtcgagtgatgggcgcagttaccgccctgtcacaggcgctgaatcggcacgcggaagccctcaaatag

SEQ ID NO: 233018 - DNA, 1146 bp, synthetic construct
  misc_feature 1..1146: note = Description of Artificial Sequence: Synthetic coding sequence
  source 1..1146: mol_type = other DNA
atgtctaacccttcgccccaggtaccggaagaagaggcaagcaccagcgtttgccggccaaagtccagtatggcctcaacgagccgtcgccagcgtcgtgagcgaagatttcggcgttacctctcagctggccgactggttcgggcacaggcgctgctgcagcggcatccaggactggatgttgacgcagggcagcctcctcctctccatcgggcatgtgcccgtcacgatgctccggctctgtgtctgttattgcgtcttggcgcagatccggcacaccaggaccgccacggcgacacggccctgcatgccgctgcgagacaaggtcctgacgcttataccgatttctttctgccattactgtctcgatgcccgagtgcgatgggaattaaaaacaaggacggcgagacacccggacagatcctgggttggggccctccctgggattctgcagaagaggaagaggaagatgatgcctctaaggaaagggagtggcggcagaaactgcaaggtgaactcgaagacgagtggcaggaagttatgggccgtttcgagggtgatgccagccatgagacacaggagcctgaaagcttttcggcctggagcgaccggttggctagggagcatgcccagaaatgccagcaacagcagcgagaagcagaaggctcctgtcgtccccctcgagccgagggctccagccagagctggcggcagcaagaagaggagcagcggctgttcagggagagggccagggcgaaagaggaggagctgcgcgaatcccgcgctcgcagggcgcaggaggccttgggggaccgggagcccaaacccacacgcgctgggccaagggaggagcacccgagaggcgcaggcaggggctcgttatggagattcggggatgtgccgtggccctgccccggaggaggggatcctgaggccatggctgcagcgctggtagccagaggaccacccttggaagagcagggggctctgaggaggtacctccgcgtgcagcaagtaaggtggcatccagataggttcctgcagcgttttagatcgcagattgagacatgggagctgggcagagttatgggtgcagtcaccgctttgtctcaggccctgaaccggcatgctgaagcattaaaatag

SEQ ID NO: 233019 - DNA, 1077 bp, synthetic construct
  misc_feature 1..1077: note = Description of Artificial Sequence: Synthetic coding sequence
  source 1..1077: mol_type = other DNA
atggcctctacctcacggaggcaacggagggaacgccgtttcaggagatatttatctgccggtcggctggtgagagcccaggcgctactgcagaggcacccgggtttagacgttgatgctggacaaccccctcccctgcaccgggcttgcgcccgtcacgatgcccctgccctatgcctcctgctacgattgggagctgatccagctcatcaggacaggcacggagatactgctctccacgccgcagcacggcagggtcccgacgcatacactgacttctttctgccactactgtccagatgtccatccgccatggggatcaaaaataaagatggggaaacccccggacagatcctcgggtgggggcctccttgggatagcgctgaggaagaagaggaggacgatgcatcaaaagaacgagagtggagacagaaactgcagggcgagcttgaagacgaatggcaggaagtaatgggtagattcgagggagacgcatcacacgagacccaggaacccgagagcttttctgcttggtcagatcggctggcaagagaacacgcacaaaagtgccagcagcagcagcgcgaggcagaaggctcgtgccgtccccctcgcgctgaaggttcctcccagtcctggaggcagcaagaagaggagcagcgcctctttcgggaacgagcacgcgctaaagaagaagagctacgtgaaagccgcgctagaagagcccaggaagcgctgggcgaccgcgagcccaagcctacaagagccggacccagagaggaacatcccagaggtgcaggcaggggcagtctctggaggttcggggatgtgccttggccgtgtccgggtggcggtgaccctgaagccatggctgcagcgctggtcgccaggggacctcctttggaagagcagggggcactgagacgatatttgagagtccagcaggttcgttggcaccccgaccgtttcctgcaacggttcaggagccaaattgagacctgggagctcgggcgagtcatgggcgcagtcaccgccttgtcgcaggcccttaatcggcacgccgaagccttgaaatag

SEQ ID NO: 233020 - DNA, 1101 bp, synthetic construct
  misc_feature 1..1101: note = Description of Artificial Sequence: Synthetic coding sequence
  source 1..1101: mol_type = other DNA
atgtctaatccctctccacaggtacctgaagaggaagcatcaacctctgtgtgtcggccaaagagttccatggcatctacctcccgcagacagagaagggagaggaggttccgaaggtacctgtccgcaggaagactggtcagggctcaggcattgctccagcgacatcccggtctggatgtggacgcaggtcaaccgcctccgctgcaccgagcttgtgctcgccatgatgctccggctctctgcttactcctgagactcggagccgaccccgctcatcaggaccgccatggagacaccgctctgcatgctgctgctcggcagggcccagatgcgtatacagatttttttcttcctcttctatcaagatgccctagcgcgatgggcattaagaataaggatggggagaccccaggacagatccttggctgggggccaccctgggactccgccgaagaagaggaagaggatgatgcaagcaaggagagggaatggcgccagaagctccagggggacgcttctcacgagactcaggagcccgaaagcttctctgcctggagtgacaggcttgcccgagaacatgcccagaagtgtcaacagcagcagagggaggccgagggctcctgtcggccacctcgtgctgaggggtcgagtcagtcctggcgacagcaagaagaagaacaaaggttgttcagagagcgtgctcgcgcaaaggaagaggaactccgcgaatccagagctaggagagcccaggaggctctaggagacagagaacccaagcctactcgcgctggccctcgcgaagaacacccgcgtggggctggcagaggtagtctttggcgtttcggtgatgtgccttggccatgccctggcggaggggatcctgaggctatggccgctgctctggtcgcaagggggcctcctttggaagagcagggagccctccgcaggtacctccgggtgcagcaggtgagatggcacccagatagattcctgcagagattcaggagtcagattgaaacatgggaactcggaagggtgatgggggctgtgactgcactgtcccaggcgctgaaccgccatgccgaggcactgaagtag

SEQ ID NO: 233021 - DNA, 1077 bp, synthetic construct
  misc_feature 1..1077: note = Description of Artificial Sequence: Synthetic coding sequence
  source 1..1077: mol_type = other DNA
atggcttccacatcacggcgtcagagacgcgagcgtcgcttcaggcgttatctctcagctgggcgtctggtgcgggctcaggcgttactgcagcgccaccccggtctggacgtggacgccggacagcctccacccctgcacagggcctgcgccagacacgacgcacccgcattatgtctgctgctgagactaggtgcagacccggctcatcaagatcgacacggtgatacagctctgcatgcagccgcaagacagggaccagatgcttataccgatttctttctgcctttgctcagccgctgtccaagtgccatgggtatcaagaataaggacggcgagactccaggccagatactggggtggggaccaccttgggactcagccgaggaggaagaagaagacgacgcttctaaagagagggaatggagacagaagttgcagggagagctggaagacgaatggcaggaagtgatgggtcggttcgagggtgacgcctcacacgagactcaagagcctgaatctttttcggcctggagcgacaggttggcccgagaacacgcccagaaatgccagcaacagcagcgagaggccgaaggctcatgtagacctcctagggcagagggcagttctcaatcctggcgccagcaggaggaagagcagcgtctgttcagagaacgggcacgcgctaaggaagaagagttaagggaatcacgggcacggagagctcaggaagcactgggtgaccgagagccaaagcccacaagggctggtcctcgtgaggagcacccacgcggtgccggaagaggctctctttggaggttcggggacgttccatggccctgcccaggcggaggagatcccgaggctatggcagccgcacttgttgcccgtggaccacctcttgaggaacaaggcgcactcaggcggtacctgcgggttcagcaggtgagatggcacccagaccggttcctgcagcgattccggtctcagattgagacatgggaactcggacgggtgatgggtgcggtgactgccctctctcaagcccttaacagacatgccgaggcccttaagtag

SEQ ID NO: 233022 - DNA, 1146 bp, synthetic construct
  misc_feature 1..1146: note = Description of Artificial Sequence: Synthetic coding sequence
  source 1..1146: mol_type = other DNA
atgtctaacccctcacctcaggtgcccgaagaggaggctagtacgtcagtctgccggcctaagtcctccatggccagcacaagcagaagacagcggagggaacgcagatttcgcaggtacctttccgctggtaggctagtgagagcacaggcattactccagaggcatcccggtctcgatgtggatgcaggacagcctcctcccctgcatcgagcttgtgcaagacatgacgcccctgccttatgcctcctgctgcgcctaggggcagacccggcacatcaggatcggcatggcgacactgctttgcatgccgcagcgcgacaaggacccgatgcctacactgacttttttcttcctctgctcagccgttgtccttcagcgatgggcatcaaaaataaggatggagaaacgccgggtcaaatcctgggatggggaccaccttgggattctgctgaagaggaagaggaggacgatgcatccaaagaaagagagtggaggcagaagctgcagggcgagctggaggacgagtggcaggaagtgatgggaagatttgagggtgacgcctcccacgaaacccaggagccggaatccttttccgcttggtccgataggcttgccagagagcacgcccagaagtgtcagcagcagcaaagagaagccgaaggctcatgtcggccaccgagagccgaagggtctagccaaagctggcggcagcaggaagaggagcagcgactttttagagagcgtgcaagagcaaaggaggaggagctgagggagtcccgcgctagacgggcacaggaggcgctgggcgatcgagagccaaagcccacaagagcaggcccacgcgaggagcatcccaggggggctgggcgtggaagtctctggaggtttggggacgtaccgtggccctgtcctggaggtggcgatcctgaagctatggccgctgccctggtcgctcggggacctcccttggaggaacagggtgcactgcgccgttaccttcgtgtgcagcaggtccggtggcatcccgatcgttttctccagaggttccgaagtcagatcgaaacctgggagttaggcagagttatgggcgcagtaaccgcactctcccaggcgttgaatcgccacgccgaggcattgaaatag

SEQ ID NO: 233023 - DNA, 1077 bp, synthetic construct
  misc_feature 1..1077: note = Description of Artificial Sequence: Synthetic coding sequence
  source 1..1077: mol_type = other DNA
atggcctccacatcacgcaggcaacgaagggagcgtcgctttcgtcgctatttgtcagccggacgacttgtgcgagctcaggccctcctgcagaggcacccgggtctggatgtggatgcaggtcagcccccacctctccatagagcgtgcgcacgccacgacgctcccgcattgtgtctactgcttagattgggagccgatcccgctcatcaagaccggcacggggacactgccctgcacgccgctgcacgccaggggccagacgcttacaccgatttcttcctccccctgctctcccgatgtccctccgctatgggtataaagaataaagacggggagactccaggacaaatcctgggctgggggcctccctgggacagtgccgaagaagaggaggaggatgacgcttcaaaggagcgagaatggaggcaaaaactgcagggcgagctggaggacgagtggcaggaagtgatgggtcgttttgagggggatgcaagccacgagacacaggaaccagagagtttctcagcatggtctgaccgcttagcaagagaacatgctcagaagtgccagcagcagcagcgagaggcggaaggctcctgtagaccaccacgagcagagggcagttctcaatcatggcggcagcaagaagaagagcaacgcctgtttcgcgagcgagcacgggctaaagaggaggaactgcgggagtcccgagcgaggcgcgcacaggaagccctgggcgatcgcgagcctaaaccaacacgggcaggtcccagagaggagcaccctcggggagccggtagaggctcactatggcggtttggcgacgtaccctggccctgtcccggagggggagatcccgaagcgatggctgccgctctggtcgctcgcggaccaccactagaagagcagggagcactgcggaggtacctgagagtgcagcaagtgagatggcacccagaccgtttcctgcagagattccgctctcaaattgagacttgggaattgggacgcgtgatgggcgctgtgaccgcactaagtcaggccctgaataggcatgctgaagcactaaagtag

SEQ ID NO: 233024 - DNA, 1146 bp, synthetic construct
  misc_feature 1..1146: note = Description of Artificial Sequence: Synthetic coding sequence
  source 1..1146: mol_type = other DNA
atgtctaatccaagcccgcaggtgcccgaggaggaggcatcaaccagtgtgtgtagacccaagagctccatggccagtacatccagaagacagcgcagggaaagacgatttcgcaggtacttgagtgcaggcagactagttagagctcaggctctactccagaggcaccctggtctggacgtcgatgcgggacaaccccctcccctccaccgagcctgcgctcggcacgatgcaccagcactgtgtttgcttcttcgactgggcgctgatcccgcacaccaggatcggcacggtgatactgcactgcacgccgctgccagacagggccctgatgcgtataccgattttttcttgccactgctgagccgttgcccgagcgccatgggaatcaagaataaagatggcgagacgcctgggcaaattcttggctggggcccaccttgggatagcgctgaagaggaggaggaggacgacgcctccaaggagagggaatggcggcagaagctccagggggagctggaagacgagtggcaggaagtaatgggcagattcgagggagacgcctcacacgaaactcaagagcctgagtctttttccgcttggtctgaccgactagcacgggagcacgcacaaaagtgccaacagcaacaacgggaagccgaggggtcttgcagacccccaagagctgagggatctagccagtcctggcgacagcaagaggaggagcagcgcctcttccgagaaagggcacgagccaaagaagaagaactgcgagagtctcgggctcgaagagctcaagaggcactgggggacagggaaccaaagccaacccgggcaggtccaagggaggagcatccgaggggagcaggccgagggagcctctggagattcggtgatgtgccttggccctgccctggaggcggagaccccgaggcgatggccgctgctctggtcgccagggggccacctcttgaagaacagggggcactgcgcaggtacttgagggtccagcaggtgcgctggcatcccgatcggtttctgcagcggtttcggtcccagatcgagacctgggagctcgggcgtgtcatgggcgctgttactgctctcagtcaagctcttaacagacatgccgaagcgttgaaatag

SEQ ID NO: 233025 - DNA, 1101 bp, synthetic construct
  misc_feature 1..1101: note = Description of Artificial Sequence: Synthetic coding sequence
  source 1..1101: mol_type = other DNA
atgagcaatccatcaccccaggtgccggaggaagaggcttccacgtccgtctgccggccaaaaagtagtatggccagcacaagtcgccgacagcgccgagagagacggtttagacggtacctgtcagcgggacggctcgtaagggcacaggccctcctccagcgtcacccgggactcgacgttgatgctggtcagcctccccctttacatcgtgcgtgtgcgaggcatgacgctccagccttgtgcctgctcctgagactaggggctgaccccgctcatcaggaccgccatggtgacactgctctccatgccgctgccagacagggacctgacgcctacactgacttcttcttgcccctgctgagcaggtgtccttcagccatgggtattaaaaataaagatggtgagacacctggccagattctcggctggggaccaccatgggacagtgcagaggaagaagaggaagacgatgcctccaaggaacgtgagtggcggcagaaactccagggggacgcaagccatgaaacccaggagcccgaatctttcagtgcttggagcgaccggctggctcgggagcacgcccaaaagtgtcaacagcagcagagggaagctgaaggttcatgccgcccacccagggcagaagggagctcccaatcttggcggcagcaggaggaggagcagagactctttcgcgaaagggccagggctaaagaagaggagctccgggaatctagagccagacgtgcccaggaggccctcggggacagggaacctaaacccacccgcgctggacccagagaagaacatccacggggagccggacggggttctctctggagatttggtgacgtcccctggccttgcccaggagggggagatcctgaggcaatggccgcagccctggtcgcgagaggccctccactggaagagcagggcgcattgcggagataccttagagtgcagcaggttaggtggcatcctgaccgttttctccagcggttcagatctcaaatcgaaacttgggaactcggtagggtgatgggagcagtgaccgccttatcacaggcgctgaataggcacgctgaggcgctgaaatag

SEQ ID NO: 233026 - DNA, 1077 bp, synthetic construct
  misc_feature 1..1077: note = Description of Artificial Sequence: Synthetic coding sequence
  source 1..1077: mol_type = other DNA
atggcttctacatctcgcagacaacgtagggaaaggcgcttcaggaggtacctttcggccggaaggctggtgagggctcaggccctgcttcaaaggcatcctggcctggatgtcgatgctggacaacctcctccattgcatcgcgcttgcgcacgccacgacgcaccggctctgtgcctcctcctgcggctgggggctgatcccgctcaccaagaccggcatggcgacactgctctacatgcagcggctcgacaggggccagacgcttataccgacttcttcctgcccctgctctcacggtgtccatccgccatgggaatcaaaaataaagacggtgagacacctgggcagattttgggatggggtcctccctgggattctgcagaggaggaggaggaggatgacgcttccaaagagagagagtggcggcagaagttgcaaggagaactcgaagatgaatggcaagaggttatgggacgcttcgagggagacgcctcccacgagacccaggagcccgaaagctttagtgcctggagcgacagactcgcacgggaacacgctcaaaagtgccagcagcagcagcgtgaagcagagggttcttgtcgccctccgcgagccgaaggatctagtcagtcttggcgccagcaggaggaggaacagagactcttccgggagagggccagagctaaggaagaggaactacgcgagtcccgcgctcggagggctcaggaagccctgggcgaccgcgaacccaagcctacccgggctggaccacgcgaagaacatcctcgcggagctgggaggggttcactgtggcgatttggggacgtaccctggccttgccccggaggtggcgacccggaagccatggccgcagccctggtcgcaagagggccacctctcgaagaacaaggcgctctacgtaggtatctgcgcgttcagcaggtaagatggcatccagatcgattcctgcagagatttcgttcgcagattgaaacatgggagcttggtagggtgatgggcgcagtgacggccctgtcgcaggcgctcaataggcacgctgaggctctcaaatag

SEQ ID NO: 233027 - DNA, 1146 bp, synthetic construct
  misc_feature 1..1146: note = Description of Artificial Sequence: Synthetic coding sequence
  source 1..1146: mol_type = other DNA
atgagcaacccatctccccaagtgccagaggaagaagcttcgacatcagtgtgtagacctaagtccagcatggcgagcaccagccgcagacagcgtcgggagcgtagattccggagatacctgtccgctgggaggttggtgcgcgcacaagctctgctgcagcgccaccccggactggatgtggacgccggtcagccgcctccacttcacagagcgtgcgcacgccacgatgctcctgctctctgtctgctgttaagactgggcgctgatcccgctcaccaggatcgtcacggcgacactgcattgcatgcggcagcgcgacagggaccagatgcctataccgatttctttttgccactcttgtcaagatgtccaagtgccatggggattaagaataaagatggggaaacccctggccagatcctgggctgggggcctccctgggacagcgccgaggaggaagaagaggatgacgcaagcaaagaacgggagtggagacagaagttgcagggtgagctggaagatgagtggcaagaggtgatgggacgctttgagggggatgccagccatgagacccaagagcccgaatcattttccgcctggtctgatagacttgcccgagagcacgctcaaaagtgtcagcagcagcagagagaagcagaagggtcctgtcgaccacctcgtgccgaaggttcttcccaatcatggcgtcagcaggaagaggaacagcggctgttcagggaacgggctcgtgccaaagaagaagagctgcgtgagagccgcgctcggagggcccaggaggctttgggggacagggaaccaaagcctaccagggctggtcctcgtgaagaacatccccgtggcgctggtagagggagcctttggcgatttggagatgtgccatggccctgcccagggggaggggatcccgaggcaatggcggctgccctcgtggcccgagggccaccgttagaggagcagggcgcattgagacgatatttgcgagtacagcaggtgcgctggcatcccgacagatttctgcagaggttccggagccagatcgaaacatgggagcttggcagggttatgggagcagtcaccgccttaagccaggctttgaatagacacgcggaggcgctgaaatag

SEQ ID NO: 233028 - DNA, 1077 bp, synthetic construct
  misc_feature 1..1077: note = Description of Artificial Sequence: Synthetic coding sequence
  source 1..1077: mol_type = other DNA
atggcgtctacaagccgcaggcaaaggcgcgagcgtcggtttcggaggtatctatctgctggcaggctggtgagagcgcaagcactcttgcagcgacaccccggtttggatgtcgacgccggacaaccgccacctttacaccgagcctgcgcccgacatgacgctcctgcactctgtcttcttctgcgactgggcgctgaccctgcccatcaggacagacacggcgatacggctctgcacgcagcggctcggcagggccctgacgcttataccgatttttttctgccacttctcagcagatgtccttccgccatgggaatcaagaataaagacggcgagacccccggacagatcctgggttgggggccaccgtgggacagtgccgaggaagaagaggaggacgacgcatccaaagagcgcgagtggcgccaaaaactgcaaggagaacttgaggatgagtggcaggaggtgatgggacgctttgagggcgatgcgtctcatgaaacacaagaaccagaatcttttagcgcctggagcgataggctagctcgagaacacgcacaaaagtgtcagcagcagcagcgggaggctgagggcagttgccggcctccacgcgcagagggaagctcacagagctggaggcagcaggaggaggagcagaggctgtttcgcgagcgggctcgcgcaaaggaggaagagttgagagaatcccgtgccaggcgcgctcaggaggcactgggggatagggaaccaaaacctacccgcgcaggcccacgagaggagcacccaagaggcgcagggcgaggcagtttgtggagatttggcgacgtaccatggccatgcccaggcggtggtgaccctgaggcaatggccgctgccttggtggcaagaggccctcccctagaggaacaaggggctttgagaaggtacctccgagttcaacaggtacgttggcatcctgatcgcttcctgcagcgatttcggtctcagattgagacttgggagctcggccgagtgatgggcgctgtgacagcactgagccaggctttgaaccggcacgcagaggctctcaagtag

SEQ ID NO: 233029 - DNA, 699 bp, synthetic construct
  misc_feature 1..699: note = Description of Artificial Sequence: Synthetic coding sequence
  source 1..699: mol_type = other DNA
atggcctctacatccagacgccagaggagggaaagacgattcagaaggtacctgagtgccggacgccttgtgcgcgctcaggcactgctgcagcgccatccaggtttggacgtggatgccggtcagccccctcctctccatcgggcatgcgcgagacacgacgcgccagcgctttgcctgttactccgtctgggcgctgaccccgctcatcaggatcgtcacggcgatactgctctccacgccgcagctcggcagggacccgatgcgtacaccgacttctttctcccacttctctcaaggtgtcctagcgcgatgggcatcaaaaataaggatggcgaaacccccggacaaatacttggctgggggccaccctgggattcggctgaagaggaagaggaggatgacgctagcaaagagcgcgaatggcgtcagaaactacagggtgaattggaggacgagtggcaggaagtcatggggcgttttgagggtgacgcctctcatgagacccaggaacccgagagtttcagcgcctggtctgacaggttagcaagagaacacgcccagaagtgtcagcagcagcagcgggaagccgagggctctcgcaggccccctcgagccgagggatcaagccagtcctggcggcagcaagaggaggagcagagattgttccgcgagcgcgcaagagccaaagaagagtag

SEQ ID NO: 233030 - DNA, 699 bp, synthetic construct
  misc_feature 1..699: note = Description of Artificial Sequence: Synthetic coding sequence
  source 1..699: mol_type = other DNA
atggcatcaaccagcaggaggcaaaggcgagaaagacgcttccgacgctacctgtctgcaggtcgcttggtgcgagctcaagccctgctgcagagacaccctggtttagacgttgatgcgggtcaacctccacccctccacagggcttgcgccaggcacgatgcacccgctttgtgccttctgctacgtctgggtgctgaccccgctcaccaggaccgccatggagacacggcattacatgcagccgcaagacaaggtcccgatgcctacacagacttttttctgccactcctcagtagatgtccgtccgctatgggaataaaaaacaaggatggggaaacgcccggacaaatcctgggctggggacccccatgggattccgccgaggaggaagaggaggatgatgccagcaaggagcgcgagtggaggcagaaattacagggggagcttgaggacgaatggcaggaggtgatgggccgattcgaaggagatgccagtcacgaaacccaggaacctgagtctttttccgcctggtctgacaggcttgcacgggaacacgcccaaaagtgtcaacagcagcagcgagaggcagagggctcctgccgacctccgagggctgagggatccagccaatcatggagacagcaggaggaagagcaacggctgttcagggagcgtgcaagggctaaggaagagtag

SEQ ID NO: 233031 - DNA, 699 bp, synthetic construct
  misc_feature 1..699: note = Description of Artificial Sequence: Synthetic coding sequence
  source 1..699: mol_type = other DNA
atggctagcacatctaggcgtcaacggcgtgaaaggcgtttccgacgctacctcagtgccggacgcttagtgcgggctcaggcactgctgcagaggcatccaggcttggacgtggatgctgggcagcctccccctctgcaccgcgcatgtgcgagacacgacgctccagctctgtgcctgctcttacgcctgggggctgatccagcccaccaagaccgacacggcgacaccgcgctgcacgctgctgcacgtcagggaccggatgcatacaccgatttttttctgcctctgctctcacgctgtccttctgcaatgggaattaagaacaaagacggagagaccccagggcagatcctggggtggggcccaccatgggatagcgctgaggaggaggaggaggacgacgcgagcaaggaacgcgagtggagacaaaaactgcagggcgagctggaggacgagtggcaagaggttatgggcaggtttgagggtgacgccagtcatgaaacgcaggagcccgagtctttttctgcctggagcgacaggctggcccgagagcatgcgcagaaatgccaacaacagcaacgggaagcagaggggagttgccggccaccacgcgctgagggcagctcgcaaagctggcggcaacaggaggaggagcaaaggttgttcagagaacgcgctagggcaaaggaggaatag

SEQ ID NO: 233032 - DNA, 699 bp, synthetic construct
  misc_feature 1..699: note = Description of Artificial Sequence: Synthetic coding sequence
  source 1..699: mol_type = other DNA
atggcctccacctcaagaagacagcggagagaaagaagatttcgcagatatctcagcgcgggacgtttggttcgggctcaggccctactgcagcgacatcctggattagacgtggacgcgggacagccaccacctctgcacagagcttgcgcaaggcacgacgctccagctctgtgcctgttattacggttaggggctgaccccgcacaccaagatcgccatggagacaccgcactgcacgccgcagctaggcagggaccagacgcttacacagacttcttcttgcctctactgtcccgatgtccatccgccatggggatcaagaataaagatggagagaccccgggacagattctggggtgggggccaccatgggactccgccgaggaagaagaagaagatgacgcttcaaaagagagagagtggcgtcaaaaattacaaggagaactggaagatgaatggcaggaggtcatgggcagattcgagggcgatgcatcacacgaaacacaggagccggagagtttttcagcgtggtccgatcgtctggcacgggaacatgctcaaaagtgccaacagcaacagagggaagccgaagggtcctgtaggccgccaagagccgagggatcctcacagagctggagacagcaagaggaggagcagcggctgtttagagaaagagcacgggctaaagaagagtag

SEQ ID NO: 233033 - DNA, 699 bp, synthetic construct
  misc_feature 1..699: note = Description of Artificial Sequence: Synthetic coding sequence
  source 1..699: mol_type = other DNA
atggcaagtacttcgagaagacaaagaagagaacggagattcaggagatatcttagtgctggacgtctagtcagagctcaggccttgttgcagagacaccctgggctcgacgtcgatgctggccagccaccgcctctgcacagggcctgtgcgaggcatgacgctccagctctgtgtctcctgcttcggttgggagccgacccagctcatcaagataggcatggagatacagcacttcacgctgccgcaaggcagggtcctgatgcctatacagacttctttctccctttgctttccagatgccccagtgctatgggcatcaagaacaaggatggagaaacccctggccaaatattgggctggggaccgccttgggacagcgccgaagaggaggaggaggacgatgcctctaaagaacgggagtggcgccagaagcttcaaggtgagctcgaagacgagtggcaggaggttatgggaaggttcgaaggtgatgcttctcacgagacacaggagccggaatcgttcagcgcttggtcagaccggcttgctcgggagcatgcccagaagtgccaacagcagcagagagaagcagaagggtcatgtcgacctcctcgggctgaaggatcatcacagagttggcggcagcaggaagaggaacaacggctctttcgagagagagcacgagcgaaggaggaatag

SEQ ID NO: 233034 - DNA, 699 bp, synthetic construct
  misc_feature 1..699: note = Description of Artificial Sequence: Synthetic coding sequence
  source 1..699: mol_type = other DNA
atggccagtacatctcgaagacagcgccgagagcgacgcttccgcagatatctcagcgcgggacggctagttagagcgcaggccttgctgcaacggcatccgggactcgatgtagatgctggccagcctcccccactgcacagagcctgtgcgcgtcatgacgcacccgctctgtgtctcctcctccggctcggggctgacccagcacatcaagatcgtcacggagacaccgcgctgcatgccgcagccaggcagggtcccgacgcgtatacagacttctttctgccactcctgtccagatgcccctctgccatgggaattaaaaataaggatggtgaaacaccaggtcagattttaggatgggggccaccatgggactctgctgaggaggaggaagaagacgatgcgtccaaagagagagagtggcgacagaaactccagggagaacttgaggatgaatggcaggaagtcatggggagatttgagggcgacgcctctcatgagacccaggaacccgagtcattctctgcctggagtgacagactggctcgggagcatgcccagaagtgccagcagcaacagagggaggcagaaggcagctgtcgacccccacgtgctgagggctctagccaatcctggcggcagcaggaagaagagcagcggttattcagggagagggcgagggccaaggaagagtag

SEQ ID NO: 233035 - DNA, 699 bp, synthetic construct
  misc_feature 1..699: note = Description of Artificial Sequence: Synthetic coding sequence
  source 1..699: mol_type = other DNA
atggccagcacatcccgacggcagcgcagagaacggaggttccgacggtacttatctgccggtcgcctcgtacgggcacaggctctgctgcagcgccatcccggtctggatgtagacgctgggcagccaccacctctgcaccgtgcctgcgccagacacgacgccccagctttgtgccttcttctgcgactgggggctgatcccgcacaccaggatcggcatggcgatacagcactccacgcagcagccagacagggcccagacgcttacactgacttcttcctccccttgcttagtaggtgcccctccgcgatgggtatcaagaacaaagatggggaaacacccggacagatcctaggctgggggcctccttgggacagcgcagaagaggaggaagaagatgacgcttccaaggaacgcgagtggcggcaaaaactccaaggtgagctggaggacgagtggcaggaggtaatgggcagattcgaaggggatgcaagtcatgaaacccaggaacctgagtcattcagtgcctggtctgaccgcttagccagagagcacgcacagaaatgccaacagcagcagagggaagcggaggggtcttgtcgccctccacgcgctgaaggttcttctcagagctggaggcagcaggaagaagagcaacgcctgtttcgcgagagagccagggcaaaagaggaatag

SEQ ID NO: 233036 - DNA, 3900 bp, synthetic construct
  misc_feature 1..3900: note = Description of Artificial Sequence: Synthetic coding sequence
  source 1..3900: mol_type = other DNA
atggattctttggaccatatgcttaccgaccccctggaactgggcccttgtggcgacggacacggtacccgcatcatggaagattgtctgcttggcggaacccgcgtgtctctgcccgaagatttacttgaagacccagaaattttcttcgacgtcgttagcctgtctacatggcaggaggtgttgtccgattcacagagagaacacctccagcagttcctccctcagtttcccgaggactcggcagagcaacagaatgagctcatcctcgctctgttcagcggggagaatttccggtttgggaatcccctgcacatcgcgcaaaaactgtttcgtgacggacactttaatccggaggtcgtgaaatacagacagttatgttttaagagtcagtacaagcgctacctgaacagccaacagcagtattttcatcgactactaaagcagatccttgcttcacgttcagaccttcttgagatggctcgcagatcagggcctgctctgccgttcaggcagaaacgacctagtccctcccgtacccctgaggaacgcgaatggcgaacccagcagaggtatcttaaagtgctgcgagaggtgaaagaagaatgcggtgatactgccctctcgtcggacgaggaggatctatccagttggttgccatcctcacccgcacggagccccagcccagcagtgcccctgcgtgtagtccctactctgagcacgaccgacatgaagacagccgataaagttgagctgggagattcggacctcaagattatgctgaaaaaacaccacgaaaaacgcaagcaccagcccgaccaccccgaccttctcaccggagatctgaccttgaatgacataatgacacgagtgaatgccggacggaaaggctcactggccgctttgtatgatctggcagtgcttaagaagaaagtcaaggagaaagaggaaaagaagaaaaaaaagattaagacgattaagagcgaggctgaggatttggctgagcctctttctagcaccgaaggagtcgctcccctgtcgcaagccccttctccactggctatacctgcgattaaagaggaaccccttgaggatttgaaaccctgcctgggtatcaatgagatatcctcctcttttttctctctgctgctggagatcttattgttggaatcccaggcaagcttacccatgctcgaggaacgtgtgctggactggcagtcttctccagctagtagtctgaatagctggttctcagctgccccaaattgggctgagctagtccttcctgcactgcaatacctggcgggagagtcacgagccgtgccgagctcattctccccctttgtggagtttaaagagaaaacccagcagtggaagctcctcggccagtcccaagataacgagaaagagttagccgcactgtttcagttgtggctggaaacaaaagaccaggccttttgtaaacaagaaaatgaggattcaagcgatgcgacaactcctgtgcccagagttcgcaccgactacgtggtgcgccctagcaccggcgaagagaaacgggtctttcaggaacaggagaggtataggtactctcaacctcataaggccttcaccttcaggatgcatggtttcgaatctgtggttgggcctgtcaaaggcgtattcgataaagagacttcactgaacaaggcccgagaacacagcctactgaggagcgatagacccgcttacgtcaccatcctgagtctggttcgagatgctgcagcaagactacctaacggggagggaaccagagccgagatatgcgaactgcttaaagattcccagtttctggctcccgatgtcacctccactcaagtgaataccgtggtatctggggcattggatcggctgcattacgaaaaggacccatgtgtgaagtacgacattggcaggaaattgtggatctacctgcacagagatagatccgaggaagaatttgaacgtatacaccaagcccaggccgcagctgccaaagcccgaaaggccctccagcagaaacctaaacctcctagcaaggtgaagagctcaagcaaagagtccagtattaaagttctctccagcggaccctctgagcagagtcaaatgtctttgagtgattcatccatgccccctacgccagtgacacctgtgacacctacgactccagctctccccgctattccaatttcaccaccaccagtgagtgctgtgaacaagagtgggccaagcacagtctctgaacctgcaaagtcctcctccggtgtcctactcgtcagctctccaactatgccccatctgggaactatgctgagccccgcaagtagccagacggctccaagctcacaggccgcagcccgagtggtgtcacactcgggctctgctgggctgagccaggttcgggtggtggcgcaacctagcctccccgctgtacctcagcagtccggaggtcctgctcaaactctaccccagatgcccgcagggccacagattagggttcctgcaactgctacgcaaacgaaggttgtgccccagaccgtgatggcaaccgtaccagttaaggcacagactaccgccgcaacagttcagagaccaggaccagggcaaacaggcctcacagtgacaagtctcccagctactgcttctcccgtgtccaagccagctacaagctcccctgggacgtcagcgccttctgcctccacagcagcagtcattcaaaatgtgactggacagaacatcattaagcaagtggctatcactgggcaactgggcgtcaagccccagacagggaacagtatcccgttaaccgcaactaattttagaatacaaggcaaggacgtacttagactgcctcctagttccattactaccgatgccaaaggtcaaacggtgcttagaatcacacccgacatgatggctacactcgctaaatcacaggtgacaaccgtgaagttgacccaagacctcttcggcactgggggaaataccacagggaaaggtatcagtgcaaccctacacgtcacaagtaatcctgttcacgctgcagattcacccgcaaaggcgtccagtgcatccgcacctagtagtacccccaccgggacaactgtcgtaaaagtaacaccggatctgaagccaacagaggcttcttctagcgcgttccgactgatgccagccctaggggtctctgtcgctgaccagaaaggaaaaagtacggtagccagtagcgaagctaagcctgccgctacaatccggattgtgcaggggttgggcgtgatgcctcccaaagcaggccagaccatcactgtggcaacacacgccaaacagggcgcaagcgtcgctagtgggtccggcacggtccacacgagcgctgtctcccttccaagcatgaatgcagcggtgtctaaaaccgtagccgtggcttctggggcagccagcaccccaattagcatcagcacgggcgcaccaacagttcggcaagtgccagtgagtacaactgtggtctcaaccagccaggcgggaaaactacccactcggattaccgtacccttgtctgtgatctcccagcccatgaaggggaagtctgtcgtgactgcacctataattaagggcaacctgggggcaaacctgagtggcttggggaggaacattatcctcacgaccatgcctgctggtaccaaattgatagctgggaacaaaccggtgtcttttctcacagctcagcaactacaacagctccagcagcagggtcaggccactcaggtgcggatacagacggtgccagcttctcacctgcagcagggcacagcttccggttcttcaaaagccgtgagcaccgtagtcgttaccactgctcctagcccaaaacaagcacccgaacaacagtag

SEQ ID NO: 233037 - DNA, 3900 bp, synthetic construct
  misc_feature 1..3900: note = Description of Artificial Sequence: Synthetic coding sequence
  source 1..3900: mol_type = other DNA
atggattccctcgaccatatgttaaccgaccccctggaactaggcccatgcggcgatggccacggcactaggattatggaagattgtctcctcggaggaacccgggtatcattgcccgaggatctactcgaggaccctgaaatctttttcgatgtcgtttctctcagtacatggcaagaggtgctgtcagactcgcagcgggaacacttacagcagtttcttccacaatttcccgaggattcagctgagcagcaaaacgagctgatcctggccctgttcagcggcgagaacttcaggttcggaaatccactccacatcgcacagaaactgttccgggacggtcatttcaatccagaagtggttaagtacaggcagttgtgcttcaagtcgcagtacaagcgctacttgaatagccagcaacagtacttccaccgcttgctgaaacagatcctcgcctctagatcagaccttctggagatggctcggagaagcggtcctgccttgccatttaggcaaaagcggccatcaccctcgagaacaccagaagaacgtgaatggcgcactcagcagcgctacctgaaagtgttgagagaagtaaaagaggaatgcggggatacagctctatcctccgacgaagaagacctctcttcatggcttcctagtagcccggctcgcagtccatcccccgctgttcccctgcgtgtggtacccaccctgtccacgaccgatatgaagacagccgataaggtcgaactgggggacagtgatttaaagattatgctgaaaaagcaccacgaaaaaagaaagcatcagccagaccatcccgaccttttgaccggggatctgacattgaatgacattatgaccagggtcaatgcgggtcggaagggatctttagccgctctgtatgacttggctgtgctgaagaagaaggtgaaggaaaaagaggaaaaaaaaaagaagaaaatcaaaacaatcaaatctgaggcggaagacctggccgagcctctcagttctacagaaggagtggcgcctctttcccaggccccttctccattggcaattccagctatcaaggaggaaccactggaagatctgaagccgtgtttgggcattaacgaaatctccagtagcttcttcagcctcttacttgagatcctgctgctcgaaagccaggcttccctcccaatgcttgaagagcgggtgctggattggcaatcttctcctgcttcaagtttaaattcttggttcagcgcagctccgaactgggcagagctcgtgttacccgctctgcagtacctcgccggagaaagcagagccgtgccttcctctttcagccccttcgttgaatttaaggagaagacacaacagtggaaactcttgggtcagtcacaggataatgaaaaggagcttgccgcactgttccagctgtggctcgaaacaaaggatcaggcgttttgcaagcaggaaaatgaggacagtagcgacgctacaactcccgtgccaagggtgagaacggattatgttgtccggccttcgacaggagaggagaagcgggtcttccaggagcaagaacggtaccggtattctcaaccacacaaggccttcacatttcgtatgcacggttttgaaagcgtggtcggtcccgtaaagggcgttttcgataaagagacttccttaaacaaagcccgagaacatagtctccttcgaagtgataggcctgcatatgtgaccattttaagtctcgtgcgagacgccgctgcaaggctgcctaatggcgaaggaaccagggctgagatctgtgaactgctgaaagatagtcagttcctcgcccctgatgtcacttctacccaggtcaatactgtcgtgagcggagccctggacaggttacattacgagaaagatccatgcgtaaagtacgacatcggtcggaagttgtggatctatctgcatagagacagatctgaggaagagtttgaaagaatacatcaggcccaggccgcagcagctaaggccaggaaagctctacagcagaagcccaaacccccttcaaaggtaaaatcatcaagtaaagagtcttccatcaaggtgctcagttccgggcctagtgagcagtcccaaatgtccctctctgactcatcaatgccgccaacccccgtgacaccagtcactcccaccacgcccgctctgccagcaatcccaatttcacctcccccagtctcagcagttaacaaaagcggcccaagcacggtgagcgagccggcaaagtcgtccagcggtgtactgcttgtgagctccccaactatgcctcacctaggcaccatgcttagcccggctagttctcagactgcgccatccagccaggcggcagccagggtcgtgagtcacagcggcagtgcagggctgagtcaggtccgggtggtagctcagccttctctccctgcagtcccgcagcagtctgggggaccggcacagacacttccccagatgcctgccggaccacagattcgggtacccgctactgcaacccaaacaaaggtggttccacagactgttatggctaccgtacccgtgaaagcccaaaccacagccgcaactgtccagagacctgggccaggtcagaccggcttaaccgttacaagcctacctgccacggcatcaccagtgagtaaacccgcaacctcaagccctgggacgtccgccccttctgcttccactgctgccgtgatccagaatgtgacaggccagaatattatcaagcaggttgcgattacaggacagctgggggtcaagcctcagacagggaacagtattcccttaaccgcgaccaactttcggatccaaggtaaagatgtgcttcgcctgcctccaagtagtataactacagacgctaagggccagaccgtgctgcgaattaccccagatatgatggcaactcttgcaaaaagccaagtcacaaccgtaaagctgactcaagacctttttggaaccggaggcaacaccaccggaaagggcatttcagctacactgcatgtgacttccaatcccgtccacgccgcagatagcccagcgaaggcctcatccgccagtgctccttcctctacccctaccggtactaccgtggtgaaggtcacccccgatctgaagcctaccgaggcaagtagctcagcctttcgtctgatgcctgccctgggagtttctgtagccgaccagaagggaaaaagtaccgtggctagttctgaggctaaaccggcagcaactatcagaatcgtacaagggcttggtgttatgcctcctaaagccggacagactattaccgttgccactcatgcaaaacagggagcctcagtggcctccgggtctggcacagtgcatacatccgctgtgtcccttccatcaatgaacgccgcagttagcaagacggtcgctgtcgcctctggagcagcaagtacgcctatcagcatcagcactggagcaccaacagtgagacaagtgccggtcagcactactgtggtctccacctcccaggccggtaagttaccaacccgcatcacggtgccactgtccgtaatctctcagcccatgaaagggaaatccgtggttaccgcccctataatcaagggaaatcttggtgctaatctgtcaggtttgggcaggaatattatcctgaccacaatgcccgctgggaccaagctgatagctgggaacaagccagttagcttcctgacagcccagcagttgcagcagctgcagcagcagggacaggcaactcaggtgaggatacagacggtgcctgcttctcacctgcagcagggaactgcctctggcagcagcaaagccgtgagcactgtagtcgttactactgctccttctcccaagcaggctccagagcagcagtag

SEQ ID NO: 233038 - DNA, 3900 bp, synthetic construct
  misc_feature 1..3900: note = Description of Artificial Sequence: Synthetic coding sequence
  source 1..3900: mol_type = other DNA
atggactctctcgatcatatgctgactgatcctctggaattaggcccttgcggcgacggccatggaaccaggattatggaggactgcctgctcggaggaacaagggttagcttgcccgaagaccttctggaggacccagagatatttttcgacgtggttagcctgtcaacatggcaggaggtgctgtccgacagtcaacgcgaacacctacagcaattcctcccacagtttcccgaagacagtgctgaacaacagaatgagttaattttggccctttttagcggcgagaactttcgatttggtaacccactccacatcgcacagaagctgtttcgtgatggtcacttcaatccagaggtagtaaagtacagacagctttgttttaagagtcagtacaagcggtatctcaactcacaacaacagtacttccatcgactgttaaagcagattcttgccagcaggtccgacttgttagagatggcccgacggtcgggcccagccctaccattccgccagaagaggccgagcccaagccggacaccagaagagcgcgaatggcgcacgcaacaacgatacctcaaggtgctccgggaggttaaagaagaatgtggtgataccgcactatcatctgacgaggaggatctcagctcttggctgccaagtagcccggctcgttccccgtcgcctgctgtgcccctacgggtcgtgcctacactgagtacaaccgacatgaagactgcggacaaggttgaactaggagatagtgatctgaaaattatgctgaagaaacatcacgagaagagaaaacatcagcccgaccatccagacttgttgaccggcgatctcactctgaacgatattatgaccagggttaacgcgggtcggaaaggttcacttgcagctctgtacgatctagccgttctcaaaaaaaaggtgaaagagaaggaggagaagaagaaaaagaaaataaagacaattaagagtgaggccgaggacttggctgaaccactgtcctcaaccgagggcgtcgcccctctgtcacaggccccaagccccctggctatccccgcaattaaagaggagccccttgaggatctcaagccatgtcttggcatcaatgaaattagttcctcttttttcagcctgctcctcgagattctgctgcttgagtcgcaggcaagcctccctatgctagaagaaagagtgctcgattggcaatccagcccagccagttctctaaattcgtggtttagcgctgctccaaactgggccgaactcgtactcccagcactgcagtacctcgccggtgaatctcgcgcagtcccgtcctccttttctccatttgtggaattcaaggagaagacccagcagtggaagctcttgggacagagtcaagataacgagaaggaactggccgctctgttccagctgtggctcgagactaaggatcaggccttctgcaaacaagagaacgaggattcctctgatgcaaccacccccgttccacgcgtgagaacggattacgttgtacggccaagtacaggtgaggagaagcgggtgttccaggagcaagagaggtaccggtatagccagcctcataaagctttcacattcaggatgcacgggtttgagtccgtggttggacctgttaagggggtattcgacaaggagactagcttgaacaaagcaagagagcattcactgctgcgatccgaccgcccagcttacgttactattctctcccttgtcagggatgcagccgctcgcctgccaaatggcgaagggactcgagccgagatctgtgagctacttaaagactctcagttccttgcaccagacgtgacctccactcaagttaatactgtagtttcaggggctcttgaccgactccattacgaaaaggacccgtgcgtcaaatacgacattgggagaaagctatggatttaccttcaccgagatcggagtgaggaggagttcgagaggatacatcaagcccaggctgccgctgcaaaggccagaaaggccctgcagcagaagccaaagcctccttccaaagtgaaatcttctagcaaggagagtagcatcaaggtgctctcaagtggacccagcgagcagtcacagatgagcctttctgacagcagtatgccacctactcccgtcacgcccgtgacaccaaccacgcccgctttgcccgcaatccccatttcgccaccccctgtcagcgcagtcaataaatctggcccatcaaccgtaagcgagccagcgaaatctagtagtggggtgttgctagtgtcatctccaaccatgccacacttgggcacaatgctgagcccagcatcatcccagacagctcctagttctcaagcagccgcaagagtagtgagtcactctgggagcgcgggtctctcacaggtgagggtcgtggctcagcccagcttgcccgctgtgccacagcagtccgggggacccgcacagacactaccccagatgccagccggaccgcaaatcagggtgccagcgacagccacacagacaaaggttgtcccccagacagttatggccactgtgccggttaaagctcagactaccgctgcgacggtacagagacctggccctggccagacaggcctaactgtaacatcccttcccgcaacagcgtcgcccgtgagcaagccagctacctcgagtccagggacttccgccccttccgcctccacagctgccgtgattcagaatgtcaccggacagaacataattaagcaggtggctataactggccagcttggcgtaaaaccccagacagggaatagtattcccttgacagccacaaacttccgaatacaggggaaggacgtgcttaggttgccacctagttcgattaccacagatgccaaggggcagaccgtactccgaattactcccgacatgatggccactttagcaaagtcacaggtcacaaccgtcaagctcacacaagacctgtttggcactggaggaaacactactggaaaagggatctcagcaactttgcatgtaactagtaacccagtgcacgcagccgattctcctgctaaggcatccagtgcctccgcaccttcctccacacctacgggtacaacagtggtgaaagtcacccccgacttaaagcccacagaagctagttcttccgctttcagactgatgccagcccttggcgtgtctgtggcagaccaaaagggcaagtccactgtcgcttcatctgaagccaaacccgctgctaccataagaatagttcagggcctcggcgtgatgccacctaaggctggacaaacaattacagtggctacacatgccaagcagggggcatcagtggcatctgggtcaggaaccgttcacacttctgccgtgtcgctcccaagcatgaatgcggcagtcagtaagacagtggcagtggccagcggggcagcgtctactcctataagtatcagtactggggctcctactgtgaggcaggtccccgtgtcaaccacggtggtgtctacctctcaggcaggcaagctgcctacaaggatcaccgtcccgctctctgtgatcagtcagcctatgaagggaaaaagcgtggttacggctcctatcatcaagggcaatttaggggctaacttatctgggctgggcaggaacataatcctgacaacaatgcctgctggtacaaagctgattgcgggtaataagccagtgagttttctgacagctcagcagctgcagcaactccagcaacaggggcaagctacgcaggtgaggattcagaccgtcccagccagtcatcttcaacagggaaccgcatcagggagctcgaaagctgtgtcgaccgtggtagtgaccactgccccttcccctaagcaggctcctgaacagcaatag

SEQ ID NO: 233039 - DNA, 3975 bp, synthetic construct
  misc_feature 1..3975: note = Description of Artificial Sequence: Synthetic coding sequence
  source 1..3975: mol_type = other DNA
atgcacgtgtttgtccagagtacctgcggagaggagactatggacagtctggaccacatgttgaccgacccgttagaactgggaccttgtggcgatgggcacggcacgcgcatcatggaggactgccttcttggagggacccgggtctccctgcctgaagatctgcttgaggatccggaaattttctttgacgtcgtgtccctatctacttggcaagaggtcctgtccgattcacagcgggaacacctccagcagttcctgccgcagttcccggaggacagtgcagaacagcaaaacgagttgatactggccctcttctctggcgaaaattttcggtttggcaacccccttcatatcgcccagaaattgtttcgggatggccatttcaaccccgaggttgtgaaatatcggcagctttgctttaagtctcagtataagcggtacttgaactcacagcaacagtacttccatcgcctcctgaagcaaatcttagccagtagatccgatctgctcgaaatggccagaaggtccggacccgctctcccttttcgtcagaaaagaccgtctccatctcgaacccctgaagagagagagtggagaacccaacagcgatatttgaaggtgctacgagaagtgaaggaggagtgtggcgacacggccctgagtagtgacgaagaagcaacgctagatttgcaggagcaatttagtttcgaagacttgagttcttggctgcccagttcccctgctaggagcccgtcacctgccgttcctttgagagttgtccccacactgagcaccacagatatgaaaacagctgacaaggtcgagttgggggacagcgacctaaaaattatgttaaagaaacaccacgagaaaagaaaacaccaacccgaccaccccgacttgcttaccggagatctaactctcaacgatatcatgaccagggtcaacgctgggcgaaaagggagtctcgcggctctgtatgacctggcagtgcttaagaagaaagtgaaagaaaaggaggaaaaaaaaaaaaagaaaatcaagacaatcaaatcagaagccgaggatctcgccgagcccctcagctcgactgagggggtggcccctctgtcccaggccccttctccactggcaatccccgcaataaaggaggagcccttggaggacctcaaaccgtgtctcggcataaacgaaataagttccagttttttctcccttttgttagagattctgctcctagagtcccaggccagtctgccaatgcttgaggaacgggtgttggactggcagtcatcgccagcatcctcgctcaactcctggttttctgctgctcccaactgggccgagcttgtgttacccgctcttcagtatttggcgggagagtccagagcggtgccgtcatcctttagcccatttgtcgaatttaaagaaaagacccagcaatggaaactcctaggccagagtcaggataatgagaaggaactagcagcgctgtttcagctgtggttggaaacaaaagaccaggcattttgcaaacaggagaatgaagattcaagcgacgccactaccccggtcccacgggttaggaccgattatgtggtcagaccatccaccggggaggagaagagagtgttccaggaacaggagcgctaccgctattcacaaccgcacaaggctttcacatttcggatgcatgggttcgaatctgtggttgggccagtcaagggagtgtttgataaagaaacgtcattaaacaaagctagagagcattctctattgagatctgacagacccgcttatgttaccatactgtctctggtcagagacgctgctgctagactgcctaacggagaaggcacacgggctgagatttgcgagctgctgaaggattcccagtttttggctcctgacgtgaccagcacacaagtgaacacagtggttagcggagcgctggacagactgcactacgaaaaagatccttgtgtgaagtacgatattggtagaaagctttggatctacctccatcgggatcggagtgaggaagagttcgagagaattcaccaggcccaggcggctgctgctaaagccagaaaggccctgcagcagaagcctaagcctccttcaaaagtaaaaagcagttcaaaagagtcttccatcaaagtcctgtcaagcggccctagtgagcagagccagatgagtctgtccgattctagtatgcctccaactcccgtcactccggtcactcctacgactccagccctcccagcaatacctatctcccctccgccagtgtcggcagttaacaaatcgggtcccagcaccgtatctgagccagcgaaaagctcatcgggggtccttctggtatcttccccaacaatgccccacttaggcacgatgctttcacccgctagctctcagactgcgccatcaagccaggctgccgcaagagtggtgtcccactctggctctgccggactaagccaggtaagagtagttgcacagccctcccttcccgctgtgccgcagcagagtgggggaccagcccagacccttcctcagatgcccgctggaccgcagatcagagtgccagccaccgctacacagacaaaagttgtgcctcaaaccgtcatggccactgtccccgtcaaggcccagaccaccgcagccaccgtccagcggccagggcctggccagacaggtttgaccgtgacgtccctgcccgcaactgcttcccccgtgtctaaaccagctaccagctctcccggaacttccgccccttccgcctctactgccgctgttatccagaatgtgaccggacagaacatcattaagcaggttgccattactgggcagctcggcgtgaagcctcagacgggtaattcaattcccctgaccgcaacaaattttcgaattcaaggcaaggacgtgctgaggctgccaccctccagtatcaccactgacgctaagggtcagaccgtcttgcggattacgccagatatgatggcaacacttgctaagtctcaggtaacaactgtgaagctgacccaggacttgttcggcactggaggaaacacgacaggcaaggggatcagtgctactcttcatgtaacttcaaatcctgttcacgccgctgacagcccagccaaagcctccagcgcatccgccccatcttcgactccaaccggcaccaccgtcgtaaaggttacaccagatcttaagccaacggaggctagttcgagcgcgttccgactgatgccggcactcggggtcagtgttgctgaccagaagggaaaaagtacagttgccagctccgaagccaaacccgctgccaccatcaggatcgtgcaagggctgggggttatgcctcctaaggccggtcagaccattactgtggccacccacgcgaagcaaggcgcttctgtggcatcagggtctgggaccgtccatacatctgcagtgtcccttccctccatgaatgctgcagtgtcaaagaccgttgcagtggcttccggcgctgctagcacccctatctcaatcagcaccggagcacccactgtacgccaagtgccagtgtcaactaccgtcgtcagtacctctcaagccggtaagctgccaaccagaataactgtgcccctgtcggtgattagtcagcccatgaagggtaagagtgtggtcactgcacctatcataaaagggaatctgggtgctaatctttcgggcttaggccgtaacatcattttgaccaccatgcctgcaggcaccaaactcatcgctggcaataaaccagtgagtttcctcacagctcagcagctgcagcagctgcaacagcagggacaggctactcaagtgaggattcagaccgtcccagcaagtcacctgcagcaggggactgctagcggctcgtctaaggcagtgtcaaccgtcgtggtgacaacagccccttcccctaaacaggcgccagaacagcagtag

SEQ ID NO: 233040 - DNA, 1389 bp, synthetic construct
  misc_feature 1..1389: note = Description of Artificial Sequence: Synthetic coding sequence
  source 1..1389: mol_type = other DNA
atgcaactgcgcaagatgcagaccgttaagaaggagcaagcatctctggacgccagcagtaatgtggataagatgatggtgctcaactctgccctcaccgaggtgtctgaggacagtacgactggcgaagaactcctgttgagcgaaggctccgttgggaagaataaaagtagcgcctgccgccgtaagcgggaattcatacccgatgagaaaaaggatgccatgtattgggaaaagcgacgcaagaacaacgaagcggcaaagaggtcacgggagaagaggaggctaaatgacctcgtgttagaaaataaactcatagccctgggagaggaaaacgcgactcttaaggctgaattattgtcacttaagcttaagtttggattgatatcgtcaaccgcgtatgcccaggagatccagaaactctccaactcaactgccgtgtatttccaggactatcagacatctaaatctaacgtgtcaagcttcgtcgatgaacatgagccttcaatggtatcctcctcatgtatttctgtcatcaagcacagtccacaatcctccctaagcgacgtctcggaggtgtctagcgtagaacacactcaggagtctagtgttcaggggtcctgtaggagccctgagaacaagtttcagattattaagcaggagccaatggaactggagtcttacaccagggagccacgggacgatagaggcagttataccgcttctatttaccagaactacatggggaactctttttccggctacagtcactccccgcctttattgcaggtcaataggagctcctccaatagcccgagaacttccgagacggatgatggcgtggtcggcaagagctcggacggagaggacgaacagcaagtgcctaaaggcccaatccactctcccgtggaactcaagcatgttcacgccactgtagtgaaggttccggaggtgaactcctcggctctgccacacaagctgaggatcaaggcaaaggctatgcagatcaaggtggaggctttcgacaacgagtttgaggcgacccagaaactgtccagtccgattgacatgacctctaaaaggcacttcgaactagaaaagcacagtgccccatctatggtgcactcaagcctcaccccttttagtgtccaagtgaccaatattcaagactggtcactgaagtctgaacattggcatcagaaggaactcagtgggaagacacagaacagctttaagaccggggtggtcgaaatgaaagatagcggatacaaggtttcggacccagaaaacctctacttaaagcaagggatagccaatctgtctgccgaggtcgtctctcttaaacggcttatagcaacccaaccaattagcgcttctgattcagggtag

SEQ ID NO: 233041 - DNA, 1389 bp, synthetic construct
  misc_feature 1..1389: note = Description of Artificial Sequence: Synthetic coding sequence
  source 1..1389: mol_type = other DNA
atgcagctcagaaaaatgcagacagtaaaaaaggagcaggcaagcctcgacgcctccagcaatgttgataaaatgatggtgctaaatagcgcccttactgaagtgagcgaagactcaacaacgggcgaggaacttcttctgagcgaggggtctgttggcaagaataagagttccgcttgtagaaggaaacgtgaattcatcccggatgagaaaaaagacgctatgtattgggagaagaggagaaagaataatgaagccgcaaagcgatcacgggagaaacgtcggctaaatgacctcgtcctcgagaataagctgatcgccctgggcgaagagaatgcaaccctgaaagccgagctgctaagtcttaaactcaagttcggattgatcagctccaccgcatacgcccaggagattcagaaattgtcaaacagcactgcggtctacttccaagattatcagacaagcaagagcaacgttagctctttcgtggatgagcatgaaccctctatggtctccagctcctgtatatcagtcattaagcactcacctcagagctccttgagcgacgtgagcgaagtttcctccgtagagcatacccaggagtcctcagttcaggggagctgtcgctcccccgagaacaaatttcagatcattaagcaagaaccaatggaactagaaagttacacccgggagccgagggacgacagggggtcatacaccgcatcaatttatcagaattacatggggaactccttctctgggtacagccactcccccccattgcttcaagtgaatcggagcagctctaattcccccagaactagtgagaccgatgatggggtggtgggcaaaagttcagatggagaggacgagcagcaagtgccaaaaggcccaatacacagccccgtagagctcaagcacgtccacgcaaccgtagtgaaagtccccgaggtgaactcctccgcgctgccccataagctgcggattaaggctaaggctatgcagatcaaggtcgaggcttttgacaatgaattcgaggcgacgcaaaaattatcctcaccaattgacatgacctcaaagaggcacttcgagttagaaaaacactctgccccttccatggtgcactcttcgctgaccccctttagcgtccaggtgaccaacatccaggactggtccttaaagagtgagcactggcaccagaaggaactgagcggtaagacccaaaactcgttcaaaaccggtgtggtcgaaatgaaagactccggctacaaagtgtctgaccccgagaatctttatctaaagcaaggcatcgcaaatttaagcgccgaagtggtgagcctgaaacggttgattgcaacacaaccaatatctgccagtgacagtggctag

SEQ ID NO: 233042 - DNA, 1488 bp, synthetic construct
  misc_feature 1..1488: note = Description of Artificial Sequence: Synthetic coding sequence
  source 1..1488: mol_type = other DNA
atggctgagccaacaagtgacttcgagacacctattggctggcatgcgtcccccgagctgactccaaccctaggccctctgtctgacactgcgccaccgagggactcttggatgttttgggccatgctgccccctcctcccccaccgctcacttcgagcctgcctgccgctggcagtaaaccatctagtgaaagccagccacctatggaagcccagtctctgcccggagctcctccgcctttcgacgctcagatcctccctggcgctcaaccacccttcgatgcgcagtcccctctggatagccagccccaacccagtggccagccgtggaacttccacgcatctacctcctggtattggcgccaaagttccgacagattcccacgacaccagaagagcttcaaccccgctgttaaaaactcatactaccctcgaaaatacgacgccaaattcaccgactttagcctgccaccttcgcgtaagcagaaaaaaaaaaagcgcaaggaacccgtgttccacttcttttgtgacacctgtgatagaggattcaagaatcaagaaaagtatgataagcacatgtcggagcataccaagtgtccagaattagactgctcttttacagctcacgagaaaatagtgcaattccactggcgcaatatgcacgcacctggaatgaaaaaaatcaaactggacactccagaggaaattgcaaggtggagagaggaaaggaggaagaattatcctacattggctaacatagagcggaaaaaaaagctcaaattggagaaggaaaagcgcggagcggtgctcactaccacccagtatggcaagatgaagggaatgtcccgccattcacaaatggccaaaatccgtagtccgggtaaaaatcacaaatggaagaacgataatagccgccagcgagccgtcacaggctctggctctcatctatgcgacttaaagctcgagggccctcccgaagccaatgcggaccctcttggtgtcttaataaactccgactcagagagcgataaagaagaaaaacctcagcactccgtgattcccaaggaggtcactcctgctctgtgcagcctcatgtcaagctacggatcactgagtgggtcggaaagcgagcctgaggagacacccatcaagacagaggcagacgtcctcgctgagaaccaggtgttggattcaagtgcacccaagagcccgtcacaggacgttaaggcgaccgtgagaaacttctcagaggcgaagagcgagaataggaagaagtctttcgaaaaaactaacccaaagcgcaaaaaggactatcacaactatcagacactgtttgaacctagaacgcaccatccctatctgcttgagatgctgctcgccccagatatccgccatgagaggaatgttatcttgcagtgcgtgagatatatcattaaaaaggacttcttcggccttgacacaaattccgccaagtctaaggatgtttag

SEQ ID NO: 233043 - DNA, 648 bp, synthetic construct
  misc_feature 1..648: note = Description of Artificial Sequence: Synthetic coding sequence
  source 1..648: mol_type = other DNA
atggaaacccaggctgaacagcaggaactggagactctgccaactaccaaaatggcccagacaaatcccacacccggaagcctgggaccatggaaaatcactatttatgatcaggaaaactttcagggtaaacggatggagtttactagcagttgtccaaatgtgtcagagcgaagctttgacaacgtgcgatccctcaaggtggagagcggtgcatggatcggctatgagcacacttcattttgcgggcaacagttcatactagaaaggggcgagtatcccagatgggacgcctggtctggcagcaatgcataccacatcgagagattaatgtcttttcgtccgatatgcagcgctaatcacaaggagtccaagatgacgatttttgaaaaagagaactttatcggcaggcagtgggagatttccgacgattatccctccctgcaagctatgggctggtttaataatgaagtgggatccatgaaaattcagagcggagcgtgggtatgctaccaataccccggataccgcggatatcagtatatcctggaatgtgatcaccacgggggagattataagcactggcgggagtggggctcccatgcccagaccagtcagatacaaagcatccgacgcatccagcagtag

SEQ ID NO: 233044 - DNA, 2940 bp, synthetic construct
  misc_feature 1..2940: note = Description of Artificial Sequence: Synthetic coding sequence
  source 1..2940: mol_type = other DNA
atgaccctgcatgccacccggggagccgctctcctgtcatgggtaaactctcttcacgtcgccgatcctgtggaggcggtgctgcaactgcaggactgtagtatatttattaagatcattgatagaatacacgggacggaagaaggacagcaaatcttgaaacaacccgtgtctgagcgtctggatttcgtatgctcatttctgcaaaagaacaggaaacacccatcaagtcccgaatgtttggtttctgcacagaaggtgcttgagggttcagagttggagctcgcgaagatgaccatgttgctgctctatcatagcactatgagttccaagtcccctagagattgggagcagtttgagtacaaaattcaagccgagctggcagttatccttaagtttgttctggaccatgaggacggactaaacttgaacgaggacctggagaatttcctgcaaaaggcaccagttccaagcacctgtagtagtacttttcccgaagagctgagccctccttcccaccaggctaaaagagagataaggttcctggaacttcaaaaagtggccagttcctcctctggtaacaattttctgtccgggtccccagcatctcccatgggcgacattttacagacgccccagtttcagatgaggcgccttaagaaacaactggccgacgaacgctcaaatcgagacgaattggagctggaacttgctgagaaccggaaactactgaccgaaaaggatgcacagatcgctatgatgcaacagagaatcgacagactggccctcctaaatgagaagcaagctgcatcgcctctcgaacccaaggaactggaggagctgcgggacaagaacgaatctttgacaatgcgtctccacgagacgcttaagcagtgccaagacttaaagactgagaaaagccagatggacagaaaaatcaatcagttatccgaggagaatggcgacctgtctttcaaactgagggagtttgctagccacttacagcagctacaggacgcgctgaacgaactcacagaagaacactcaaaagctacccaggagtggctggagaagcaggctcagctggagaaggagttatccgctgctttgcaggacaagaagtgcctggaggaaaagaatgaaattctccagggaaaactgtcccagttagaggagcatctttcacagcttcaggacaatccacctcaagagaagggagaggtgctgggagatgtgctgcaggtcgaagagctctctaaaaagctggctgacagtgaccaggctagtaaagtccagcagcagaagctgaaggcagtgcaggcgcaggggggagagagtcaacaggaggcccagcggctccaggcccagttgaacgaattacaggcacagctgtctcagaaggaacaggccgctgaacattataagctacagatggagaaggctaaaactcattacgatgctaaaaagcagcagaaccaggagctccaagaacaattaaggtcactggagcagttgcagaaagaaaataaggagctgcgggcagaggctgagcggttaggtcacgaactgcagcaggcaggactcaaaacaaaagaggccgagcagacttgcaggcacctgaccgcacaagtgcgaagcctcgaagcccaagtggctcacgccgatcagcagctccgcgacctgggtaagttccaagtggctacagatgcgctgaagtcaagagagccacaggctaagccacagctagacctctctattgacagcctagacctgtcatgcgaagagggaacacctctgagtatcacatccaagctacccaggacccagcccgacggtacatcagtgcccggtgaacctgcatccccaattagtcagcgtctgcctcccaaagtggagtcgctggaatcattatattttacccccatcccggctcgatctcaggcccctctggagtcttccttagactcgctgggagacgttttcctcgacagcgggaggaaaactcggagcgccaggcggcgtacaacgcagataattaatatcactatgactaaaaagctggatgtcgaggaacctgattctgcaaattctagcttctattcaacaagaagcgccccagctagtcaggcctctcttcgagcgacctcatctacgcagtctttggctcggctcggctctcccgattatggaaattcagccttgctgtccctgccaggataccgtcctacaacgcggtccagcgcgagaaggtcccaggccggtgtttccagcggagctccaccgggacggaattccttttatatggggacgtgtcaggatgagcccgagcagctcgacgactggaaccggattgctgaattgcaacagcggaatagagtgtgtccgccacaccttaagacttgctacccccttgagtcaaggcccagcctcagtctggggacgatcaccgacgaggaaatgaagactggggatccccaggaaactcttcgacgagcctcaatgcagccaattcagatagctgagggaaccggcatcacaactcggcagcagagaaaaagggtgagcctggagcctcaccaaggcccaggcactcccgaaagtaagaaagcaacaagttgcttcccacgcccaatgacaccacgcgacaggcacgaagggcgaaaacagtcgactactgaggcacagaagaaagctgcaccggcatctactaagcaggctgatcggcgacagtcgatggcatttagtatcctgaacacaccaaaaaagctcgggaattcgctactccgcagaggggcaagtaagaaggccctttccaaggccagcccgaacactcggtccggcacacgcaggtccccaagaattgcgactaccaccgcgtccgccgctactgccgcagcaatcggcgcaaccccgcgagcaaaggggaaggcaaagcactag

SEQ ID NO: 233045 - DNA, 6305 bp, synthetic construct
  misc_feature 1..6305: note = Description of Artificial Sequence: Synthetic coding sequence
  source 1..6305: mol_type = other DNA
atgacccttcatgcaactaggggtgcagctttactttcgtgggttaactcattacacgttgctgatcctgtggaggccgtcttgcagctccaagactgcagcatcttcataaagatcattgacagaatacatggaactgaggaagggcagcagattctgaagcagccagtgagtgaaaggcttgacttcgtgtgtagtttcttacagaagaatcggaaacatccaagttcacccgagtgtctagttagtgcccaaaaagtgctcgaaggatcagaactagaacttgcgaaaatgaccatgcttctactttaccattcaacaatgtccagtaagtccccccgtgactgggaacagttcgagtataagattcaggcagagttagcggtcatccttaagtttgtgcttgatcacgaagatggcctgaacttaaatgaggatctggagaactttcttcagaaagctccagtcccgtccacatgcagtagtacattccccgaggaactgagcccaccgagtcatcaagccaagagggagattcgcttcctggagctgcagaaagtcgcaagctcttcttccggcaacaattttctgagcggcagcccagcttccccaatgggtgacattctgcaaactccacagttccagatgcgtcggttaaaaaaacagttggctgatgagcgcagcaatcgggatgaactagagctggagctggcggagaacagaaaacttttaaccgaaaaggacgcacaaatagccatgatgcagcagcgtattgatcggttagcgctccttaatgaaaaacaagctgccagtcccctggaaccgaaagaactggaggagctgcgggataaaaacgagagccttacgatgcgtctccacgaaactctgaaacagtgccaggatcttaagacggagaaatcccagatggacagaaaaatcaaccagctgtcggaggagaatggggatctttctttcaagctgcgcgagtttgctagccacttgcagcagttgcaagatgccctgaatgagctgactgaagaacattctaaggccacccaggaatggctcgagaaacaggctcaacttgagaaagaactgagtgccgcactgcaggataaaaaatgcttagaggagaagaacgagatcctgcagggcaaactctcccagctggaggagcacttgtctcaattgcaggataatccacctcaagagaaaggcgaggtccttggcgacgttctgcagttagagacactgaaacaggaagctgcaacactggcggctaacaatacccagctccaggccagagtggagatgctggagacagaacgaggacagcaggaggcaaaactgttggcagaacgcggacatttcgaggaagaaaaacagcaacttagttccctgataaccgatcttcagtctagtattagcaacctgtcacaggccaaggaggagctcgagcaggcgtcgcaggcccatggcgcacgtctgaccgctcaagtggcaagcttaacatctgagcttaccactcttaacgccacaattcaacagcaggatcaggagcttgcaggcttaaagcagcaggccaaggagaaacaggcccagctggcacagactctgcagcagcaagagcaggcttcacagggactgcggcaccaagtggaacaactgagctcatctttaaagcagaaagagcaacaactcaaggaggtggcagagaaacaagaagcgacccgccaagaccacgcgcaacagctggcgacagccgctgaagagcgtgaagcatctcttcgcgagcgcgatgccgctttgaagcagctggaagctctggaaaaggagaaggctgcgaagctggaaattttgcagcagcagctgcaggtcgccaacgaagcacgcgactcagcccaaacaagtgtcacacaggctcaacgcgaaaaagccgaactgtccagaaaagtggaggagctccaagcctgtgttgaaacagcccgtcaggagcagcatgaggcacaggcgcaggtcgccgaactggaactccagcttaggtccgaacagcagaaggccacagagaaggagcgggtggcacaggaaaaagaccagctacaggaacagctccaagctctcaaagagtcactcaaagtgactaaaggcagcctggaggaggagaagcgcagagccgctgatgcccttgaggaacagcaacgttgcatttctgagctgaaggcagagaccagaagtctagtggaacaacacaagagagagagaaaggaactcgaggaagagagggctggcaggaaggggctggaagcgcgtttgcaacagctcggagaggcacaccaggctgagactgaggtactccgcagagaactcgccgaggccatggctgcccagcacaccgccgagtcagagtgcgagcagctggtgaaggaagtggctgcatggcgcgaacgctatgaggattcacaacaggaagaagcccagtatggagcaatgttccaagaacaacttatgaccctaaaggaagaatgcgagaaagctcggcaggaactccaggaagcgaaggagaaggtggctggcatcgagtctcacagtgaactccagatcagcaggcagcagaacgagctggccgagttgcatgccaatttggcaagagcactccagcaagttcaagagaaggaggtgagagcccagaagctagccgacgatttaagcaccctacaggaaaaaatggctgccacttcgaaggaggttgctcgcctggagactctcgtgcgtaaagccggtgagcagcaagagaccgcctctagggagctagtaaaggagccagccagagcaggggataggcagccagagtggttagaggaacagcagggcagacagttttgttccacacaagctgccctgcaggctatggagcgagaagcggagcagatgggtaatgaactggagaggctgcgcgctgctctgatggaatcccagggacaacagcaggaggaaaggggacagcaagagagagaagtggcgcgtctcactcaagagagagggcgagcccaggccgaccttgctctggagaaagcagctcgagctgagttggaaatgaggttacagaacgcactgaatgagcagcgagtggaattcgccacactgcaagaggccttggcccatgcactcactgagaaggagggtaaggaccaggagcttgccaaactgaggggattggaggcagcccagattaaggaactggaggaactgcgccagaccgtgaaacagttaaaagagcagctggccaagaaggaaaaagaacacgcttcaggcagcggggctcagtctgaagctgctgggagaaccgagcctacaggccctaaattggaagcattgagagcggaggtgagcaaattggagcagcaatgtcaaaaacagcaagaacaagccgactccctggagcgttcacttgaagcagaaagagccagcagagctgagcgcgactccgccctggagaccctgcagggccagttggaggaaaaagcccaggaactcggacactcccagtcagccctcgctagcgcacagcgcgaactggctgctttccgtaccaaggtgcaggaccactctaaagctgaagatgaatggaaggcacaggtagccagaggaagacaggaggcagagcgtaagaattctctgatttcttcgttggaggaggaggtctcgatccttaacaggcaggtcttggagaaggaaggtgagtccaaggagttaaagcgtctggttatggcagaaagcgagaaaagccaaaaactggaggagaggctaagactactgcaggccgagaccgcctcgaattcagctagagctgctgagagatcttctgccctcagagaagaggtccagagcttacgcgaagaagccgagaagcagcgcgttgcctctgagaatctgcggcaggaactgacctcacaggccgagagggccgaggaactgggccaggagctgaaggcatggcaggaaaagtttttccagaaggagcaggctctttctacattacagctcgagcacacctcaacgcaggccctggtatcagagctgttgcccgctaagcatctgtgccagcagttgcaggcggagcaggctgcagcggaaaaaaggcaccgcgaagaactcgaacagagtaaacaggcagccggaggactgcgggctgagcttcttagagcacagagggagctgggtgagctgataccgctgcgtcagaaagtggctgagcaggagagaaccgctcagcagcttcgggcagagaaggcaagttatgccgaacaattgtctatgctcaagaaggctcacggtcttctggctgaagagaacagaggtcttggagaaagggccaacctgggcagacaatttctggaggtggagctcgatcaggcgagagagaagtatgtgcaggagctggctgccgttcgggctgatgccgagacccgcctggccgaggtacagagggaagcccagtccaccgctcgcgaactggaggttatgaccgctaagtatgagggtgcgaaggttaaagttcttgaggagaggcagaggttccaagaggaaagacagaagctgaccgcgcaagtggaagaactctctaagaagctggctgatagcgatcaggccagtaaggtgcagcagcaaaaattaaaggcagttcaggcccaaggaggggagtctcaacaggaggcccagagactgcaggcccagctcaatgaactacaagctcagttgagtcaaaaagagcaggccgctgaacactacaagttgcagatggagaaggcgaaaactcattacgacgctaagaaacaacaaaaccaagagctacaggagcaactcaggagtctcgagcagctacagaaagagaacaaggaactacgtgccgaggctgagagacttggtcatgaactgcagcaggccggattgaaaacaaaggaggccgaacaaacctgccggcacctcactgcccaggtgaggtctcttgaggctcaagtggcccacgccgatcaacagctccgggatctgggcaagttccaggtagcaaccgatgcactaaagtctcgggagcctcaggccaagcctcagctggatctgtcaatcgacagcctcgacctcagctgcgaggaaggaacgccacttagcatcaccagcaagttgcctaggacacagcctgacgggacatcagtgcccggagagcctgcttcccctatctctcagaggctgccacctaaagtagaatccctcgagtccctttacttcacacccatccctgcgagaagtcaggcccctcttgagtcttccctggactcacttggggatgtgttcctggatagtggcagaaaaaccagatctgcccgacgccgaacaacccagatcattaacattaccatgaccaaaaaactagatgtggaagagcccgacagcgccaacagtagcttctactctacgaggtcagctcctgcttcccaagcctccttacgtgcaacttcttccacacagtcactggctagactggggtcccccgattatggcaactcagcccttctgtcgctccccggatatcggcctaccaccaggtcttcagcgcgacgctcccaagcgggtgtctcaagcggtgcccctcctggccgaaactcgttttatatgggcacttgtcaagacgagcctgaacagctggacgattggaataggatcgcagagcttcagcaacgaaatcgagtttgcccccctcacctgaagacatgctatccactcgaaagtcgaccgtcgctatccctcggcaccatcaccgatgaagagatgaaaacaggggaccctcaggagaccctccgacgagcgtcgatgcaacctattcagattgctgaggggaccggcataacaacaagacaacagcgtaaacgggtgtctctcgaacctcaccaaggaccaggaactcctgagtctaagaaggccactagttgcttccccagacccatgactcctagagatagacacgaaggcagaaaacagtctactaccgaggcacagaaaaaagccgcacctgcatctaccaagcaggctgataggaggcagtccatggcattcagcattctcaatacgcccaaaaagcttggcaacagtctgctgcgaaggggcgcaagcaagaaggcactgagtaaagcgtctcctaatactcggagcgggacccggaggtccccaaggattgccacgacaacagctagtgccgctaccgcagcggcaattggcgctacgcctagggccaaggggaaagcaaaacacta

SEQ ID NO: 233046 - DNA, 4994 bp, synthetic construct
  misc_feature 1..4994: note = Description of Artificial Sequence: Synthetic coding sequence
  source 1..4994: mol_type = other DNA
atgctggaaacggagcgtggccagcaggaggccaagttgcttgcagaacgcggacactttgaggaggaaaagcagcagttgtctagtctgattaccgatttgcagtcctctattagtaatctgtcccaagcaaaagaggagctcgagcaggcatcacaggcccatggtgccagattgaccgcgcaggttgcttctttaacgagcgagttgacgacgctgaacgcaactattcagcaacaggaccaggagctcgccggtttaaaacagcaggccaaagagaagcaggcccaactggcacagacgctccagcagcaagagcaggccagtcagggacttcgccatcaggtggagcagctgagtagcagcctaaaacagaaggagcagcagctgaaggaagtggccgagaaacaagaagccactcgacaggaccatgctcagcaacttgccacagcagccgaggagcgcgaagctagcctgcgagagcgagacgctgctctcaagcagttggaggccctggaaaaggagaaagctgccaaactggaaattctgcaacagcaactgcaggtggccaacgaggctagggattcagcccagaccagcgttacgcaggcccagcgtgagaaagctgaattgagcaggaaagtcgaggagctgcaggcctgcgtcgagacagccagacaggaacagcatgaggcacaagcccaggtggctgaactggagttgcagctgcgatcagaacagcagaaggccaccgaaaaggagagagtggcccaagagaaggaccagctgcaggaacagctgcaggcactcaaggaatcattaaaagtgaccaaagggagcctggaggaggaaaagaggagggccgctgatgctctcgaggaacagcagcggtgtatctctgagctgaaagccgaaacccgctctctcgtcgaacagcataagcgggaaagaaaggagctggaggaggagcgggctggcagaaagggccttgaggccagactccagcagctaggcgaggcacaccaggccgagaccgaggtgctccgcagagaactggctgaggctatggcagctcagcacactgcagagagcgagtgtgaacaactcgttaaggaggtcgccgcatggcgcgaacgatacgaggactctcagcaggaagaggctcagtatggcgctatgttccaagagcagctgatgaccttgaaagaagaatgtgagaaggccaggcaagagttgcaggaggctaaagaaaaggtcgcgggaattgaaagtcacagtgagcttcagatctcacgacagcaaaatgagctggccgagctgcatgcaaacctggccagagcgttacagcaggttcaggaaaaggaggtgcgagcccagaaactagctgacgacctgtctacccttcaggagaaaatggccgcaacttctaaagaggtcgcaaggctcgaaacgcttgtgcgtaaggcgggtgagcagcaggagacggcctctagagagctagtgaaggagccggcaagagcaggcgatagacagcccgagtggttggaggagcagcaggggcgtcagttttgtagcacccaagcagcactccaggctatggaaagagaggcagagcagatggggaacgaactagaaagattacgagcagccttgatggagtcccagggccagcaacaggaggagcgaggacagcaggaacgggaggtggcgcgtctgactcaagaaagggggcgtgctcaggctgacctcgcactcgaaaaagccgctcgggcagaattagagatgaggcttcagaatgcactgaatgaacagcgcgtggagtttgctacactgcaagaggcactggcccacgccctcaccgaaaaagaagggaaagatcaggaactagccaagctgcgaggactggaagcggctcagattaaggagctggaggaactgagacaaactgtcaaacagctgaaggagcagcttgctaagaaggaaaaagagcacgcgtctgggtctggcgcacaaagcgaggccgcaggcagaactgaaccaaccggacctaagctcgaggcactacgggctgaggtgagcaaactggagcagcagtgtcagaaacagcaggaacaggcagacagcttagaaaggtcactcgaagccgaaagagcctcgagagcagaaagagactccgccctggagaccctgcaaggccaactggaggaaaaagcccaggaattaggacactctcagtcagcactggccagcgcgcagagggagctggccgctttcagaaccaaggtccaggatcattcaaaagcagaggacgaatggaaagcgcaagtggctagaggcagacaggaagctgagcgtaagaattctttgatcagctctctggaggaggaagtgtccatcctcaaccgtcaggttctggagaaggagggggaatctaaggaacttaagaggttggtcatggcggagagcgaaaagtctcagaagctggaggaaagactgcgtcttcttcaagccgagactgcctctaacagcgctcgtgctgcagaacggtcaagcgcgctcagagaggaagttcaatccttgagagaagaagcggaaaagcagagggtcgctagcgagaatctgcgacaagagttgaccagtcaggcggaacgggctgaggagctcgggcaggagctcaaggcttggcaggagaagttcttccagaaagaacaggcgctctctaccctacagttagaacacacctcaactcaggctcttgtgtctgagcttctacctgcaaaacatctgtgtcaacagctccaggcggaacaggctgccgctgaaaagcggcaccgcgaagagttggagcaaagtaagcaggctgctgggggacttcgggcagagctactcagggcacaacgggagctgggcgaactgattccgctccggcagaaggtggcagagcaagaacggaccgcacagcaactcagagccgagaaggcaagttacgctgagcagctctcaatgctgaaaaaagcccatggcttgcttgccgaagagaataggggcctgggcgagcgggctaatctgggcaggcagtttctggaggtggaactcgaccaggctagagaaaagtacgtgcaggagttggccgctgtgcgggcagacgcagaaacccggctggctgaagtgcagagggaggctcagagcaccgctcgggagctggaggtgatgaccgccaagtatgaaggtgctaaagtcaaagtactggaagaacgtcagcgctttcaggaggagaggcaaaaattgactgcccaggtggaggagctgagtaagaaactggcggatagcgaccaggctagtaaggtgcaacagcagaagctcaaagctgttcaggctcagggtggcgagagtcagcaggaggcccagcgcctccaggctcagttaaatgaactgcaagctcagctgtctcaaaaggagcaagctgcagagcactataaactgcagatggaaaaagccaaaacccattacgacgcaaaaaagcaacagaatcaggaactgcaagagcagttacggagcctcgaacagttgcagaaagaaaacaaagaactccgcgcagaggcggagcggttgggacatgagctccagcaagctgggcttaaaaccaaggaagctgagcagacatgcaggcatctcaccgcccaggtccgcagccttgaggcccaggtggcccacgcagatcagcagctgagggatcttggaaagttccaggttgccaccgacgctttgaagagccgggaaccccaggctaagccacagttggacctgtcaattgactccttggatctgagctgtgaagagggcactcccctaagtatcacatctaaactgccccgaactcaacccgatggaacctctgttcctggcgaaccagcatcaccgatatcgcagcggctgccacctaaggtggaatctctggaatctctgtatttcacaccaattcctgcccgtagccaagcacctctggaaagtagcttggactcgctgggagatgtctttctcgatagtgggaggaagaccagatctgcccgtcgaaggactacccagattattaatatcactatgaccaaaaagcttgacgtagaagagccggatagcgctaacagcagcttctactctaccaggtccgccccagctagtcaggcttccctacgggctactagttccacacaatccctagctaggctggggtcacctgattatggtaatagcgcccttctgtcactgcctggctacagacctacaaccaggagctccgcccgacggtctcaggctggcgtgtcctcgggcgctcccccaggaagaaactccttctacatgggtacctgtcaagatgaaccagaacagctggacgattggaaccgcatcgctgaactgcagcagaggaatcgggtctgccctccacacctaaaaacttgctatcccttggagtcccgaccatcactgtcattgggaacaattacagatgaggaaatgaaaaccggagatccacaggagactctaaggcgcgcaagtatgcagccaatccagatcgcggaggggacaggaatcacaacacgtcagcaaagaaagagagtgtcattggagccacatcaggggcctggcacccccgaaagcaagaaagctacctcctgttttcctcggcctatgacacccagagaccgtcacgaaggtaggaaacagagtaccactgaggctcagaagaaggcggcacccgcttccaccaagcaagccgatcggagacaatcaatggccttctccattctaaatacacccaaaaaactggggaacagcctgttaagaagaggggcttccaagaaagcactctccaaggccagcccaaacacccgctcaggcactaggcgttcccctcgcatcgctacgaccaccgcgagcgccgctactgcagccgcaataggagccactccacgggcaaaggggaaggcaaagcacta

SEQ ID NO: 233047 - DNA, 228 bp, synthetic construct
  misc_feature 1..228: note = Description of Artificial Sequence: Synthetic coding sequence
  source 1..228: mol_type = other DNA
atgactctccacgcgacacgcggagctgcccttctatcttgggtgaactctctccacgtcgcagatcccgtggaggctgtactgcagctccaggactgcagcatctttatcaaaattatcgatcggattcacggcacggaagaaggacaacagatactcaaacagcctgtctcagagcgcctggattttgtgtgcagctttcttcagaaaaacaggaaacacccctag

SEQ ID NO: 233048 - DNA, 276 bp, synthetic construct
  misc_feature 1..276: note = Description of Artificial Sequence: Synthetic coding sequence
  source 1..276: mol_type = other DNA
atgacattgcacgctactagaggagccgctctgctgtcatgggtgaacagcctgcatgtggctgatccagtggaagccgtattacagctacaggactgtagcatctttattaaaattattgataggatacacggtaccgaagaaggccagcagattcttaaacagcctgtgtctgaacgccttgattttgtgtgtagctttctgcagaagaaccggaaacacccgtcctcccctgagtgcctcgtctcagcccagaaggtgctggaagggtcttag

SEQ ID NO: 233049 - DNA, 6347 bp, synthetic construct
  misc_feature 1..6347: note = Description of Artificial Sequence: Synthetic coding sequence
  source 1..6347: mol_type = other DNA
atgacgttgcacgccaccagaggagctgcgctcctgtcctgggtgaattcactccacgttgccgacccagttgaggctgtcttgcaattacaggattgctcaattttcattaaaatcatagaccggatccatgggactgaagaaggacagcaaatcttgaagcaaccagtgagcgagagattggatttcgtgtgtagctttttacagaagaaccggaagcatcctagctctcctgagtgtctagtgtccgcccaaaaggttctggaagggtccgagctggagctggccaagatgacaatgctcttgctttaccatagtacaatgtcatccaagagcccaagggactgggaacaatttgagtataaaattcaagcggagctcgcagtgattctcaaatttgtcttggaccatgaggacggacttaatctgaatgaggacctggaaaacttccttcagaaggccccagtcccaagtacttgctcctcgaccttcccagaggaactctcacctcctagtcaccaggctaagcgtgaaatcagattcttagaacttcagaaagtggcctcctcatcctccgggaataactttcttagcgggtcgcctgctagtcctatgggtgacattttacagacaccccagtttcaaatgcgcaggctgaagaaacagcttgccgacgagcgcagtaacagggatgagctcgagctggaactcgccgaaaatcggaagttgttgaccgagaaggatgcccagatcgccatgatgcaacagcggattgaccggttggctctgctcaacgaaaagcaagccgcatcacctctggaaccaaaagaactagaggagctcagggataaaaacgaaagcttgacgatgagactccatgaaaccctgaaacagtgtcaggacctaaagactgaaaagagccagatggacagaaaaataaaccagctatcagaggagaatggcgacttgtcattcaaattgagggaattcgccagccatcttcaacagttgcaggatgctctgaacgaacttaccgaagaacacagcaaggccacccaggagtggctggaaaagcaggcccagctggaaaaagaactaagcgctgccctccaggataaaaagtgcctggaggagaagaatgaaattctccaggggaaattgtcgcagttagaggaacacctctcgcaactccaagacaaccccccacaggaaaagggagaagtgctcggggacgtgttacaacttgaaactttgaaacaggaagctgcaacattagctgccaacaatacccaattgcaggccagggtggaaatgctggaaacagaaagaggtcagcaggaggcaaaacttctggccgaaagagggcattttgaagaggagaagcagcagctgagctccctgattacagatcttcagagcagtatctcaaacttgagtcaggcgaaggaggagttggagcaggcgagtcaggcacatggtgcgagattgacggcccaagtggccagcctgaccagtgagctaacgacgctcaacgctacaattcagcagcaagaccaagagcttgccggacttaaacagcaggcgaaagagaaacaggctcagttggctcaaacattacaacagcaagagcaagcttcacagggactaaggcaccaggtggagcaactgtcatccagtttaaaacagaaagagcaacagcttaaagaagtggctgagaagcaagaggctacaagacaggatcatgcccagcaattggctaccgctgcagaagagcgggaggcctctctgagagagagagacgcggcactaaaacagctggaggccctggagaaagaaaaggcagccaaactcgaaatattgcaacagcaactgcaagttgccaacgaggcaagagactcagcccagacgtcagtaacccaggctcaacgtgaaaaagctgagcttagtaggaaggtggaagagctccaggcatgtgtggagactgcgaggcaggagcaacacgaagcgcaggctcaggtggccgaactcgagctgcaattgcgaagtgagcaacagaaagctaccgaaaaggaacgagtggcccaagagaaggaccagctgcaggaacaactccaggccctgaaggaaagtctgaaggtgacaaaaggctctctggaggaggaaaagcggagggcggctgatgctttggaagagcagcagcgttgcatttctgagttgaaagctgagactaggtccctggtggaacaacacaaaagggagcggaaggagctcgaggaagaaagggctgggaggaagggcctggaggcgcgtctccagcagctaggggaggcgcaccaagccgaaaccgaggtactccgccgagagctagctgaggctatggcagcccagcacaccgctgagagcgaatgtgagcagctcgttaaagaagtcgccgcatggcgtgaaagatatgaggattcgcagcaagaggaggctcagtacggggcaatgtttcaggagcaactgatgactctgaaagaggaatgcgaaaaagctaggcaggagctgcaagaggcaaaggaaaaggtggccggtatcgagtctcattcggagctgcagattagtaggcagcaaaacgaactggcagagctacacgcgaacctggcaagggcgctgcagcaggtgcaggaaaaagaggtgagagcccaaaaattggctgacgatctttctacactgcaagaaaagatggcagccacatctaaagaagtggcccgtcttgagactctggtccggaaggcgggagagcagcaggaaactgctagccgtgaacttgtcaaggaacctgccagagcaggtgaccgacagcccgagtggctcgaggagcagcagggtcggcaattttgctctacacaggcggcactgcaggcaatggagcgggaggctgagcagatgggaaatgagctggagcgccttcgtgcagccttaatggaatctcagggccagcagcaggaggagcggggacaacaggagcgtgaggttgcaaggctgacgcaagaacggggaagggctcaggctgatctcgcgcttgagaaggccgcacgagctgaactggaaatgcgattgcagaacgccctgaatgagcagagggtcgagtttgcaacgctgcaggaggcattagcacatgccctcactgaaaaggagggcaaagatcaggagctggccaagctgagaggactggaagctgcccagattaaagagctggaagagcttcgccagaccgtgaagcagttgaaggagcaactcgcaaaaaaggagaaggaacatgcctcagggtccggcgctcaatctgaggcagctggacgtaccgagcctacagggccaaaacttgaagctctgcgggcagaagtgagcaagctggaacagcagtgccaaaagcagcaagaacaggctgactcacttgaacgcagtttagaagccgagagggcctcgagggccgagagagattcagcactcgagacactccaggggcagctagaggagaaagctcaggagttaggacactcacagtctgcactcgcatccgctcaaagggagctcgccgcttttcggacaaaggttcaagatcactcaaaggcagaagacgagtggaaggcccaagtggccagaggccgtcaagaagctgagcggaagaatagtctaatttcttcacttgaggaggaagtgtccattttgaatcggcaggtcctggaaaaggaaggtgagtcgaaagaactgaagaggctggtgatggcggagagcgaaaagagccagaaactagaggagaggctgagacttctgcaggctgaaactgccagtaactccgctcgagccgctgaacggtccagtgcactaagggaagaagtccaaagcctgcgggaagaggccgagaagcagagggtcgctagcgagaacctgagacaggagcttacaagccaagcagaaagggccgaagagctgggacaggagctcaaggcctggcaggaaaagttcttccaaaaagagcaggctctgtctaccctgcaactggaacatacatcaacccaagctttggtttccgagctcctccctgccaaacacttatgccagcaactgcaggccgagcaagccgcagcagagaagcggcaccgcgaagagctggagcagagtaagcaggcagcaggaggcctacgtgcagagttgctgcgggcacaacgggaattaggtgaactgatccccctcaggcagaaagtggctgagcaggaaaggacagcccagcaactccgcgctgagaaggcctcttacgccgagcagcttagcatgctaaaaaaagcacatggactgcttgccgaggagaaccgtgggctgggagaacgcgcaaaccttgggagacagttcctcgaagttgagttggaccaggccagggaaaaatacgtacaagaactggccgcagtccgggcagatgctgaaaccagattggctgaagtacagcgggaggcacaaagcaccgctagggagttggaagtgatgacagccaagtacgaaggcgcaaaggtgaaggttctggaagagaggcagagattccaggaggagcggcagaaactcaccgcacaggtggaacagttggaagtgttccagcgggaacaaaccaagcaggtcgaggagttaagcaagaagctggctgatagtgatcaggcctccaaggttcagcagcagaagctaaaggcggtccaagcccagggtggcgagagtcaacaggaggcacagagactacaggcacagcttaatgaattgcaggcacaactcagccaaaaggagcaggccgctgagcactacaaactccagatggaaaaagccaagacccattacgacgccaagaaacaacaaaaccaggagctccaggagcagctgcggtctctagaacagctccagaaggagaacaaggagctgagggcagaagctgaaaggctgggtcatgagttacaacaggcgggacttaagaccaaggaagctgaacaaacctgtagacacttgactgcccaggtccgctccctggaggcgcaggtcgctcatgccgatcaacagctgcgcgaccttggaaaatttcaggtggccaccgacgcacttaagagccgcgaaccacaggccaagccacagctggacctgagtattgactcactggacctttcctgcgaagagggaactcctctgtccataacaagcaagctcccaagaacacaaccagatggcacatccgtccctggcgaacctgcctcacccatttctcagagactgccccctaaggtggagagcctcgaaagtctgtacttcacccctatacctgcaagatctcaggctccactggaaagttcattggattccctgggagacgtgttcctcgacagcggcagaaaaacccgctctgcgaggagaaggaccactcagattataaacataaccatgactaaaaagttggatgtagaggagcctgactcagcaaatagttccttttacagcacacggtccgctcctgcctcccaggccagtctgagagcgacctctagcactcagtcgttagcccgactggggtcaccagactacggaaactccgccctgttgtctctgccagggtatcgccctacgactaggtcttccgccaggcgcagccaggctggtgtcagttccggtgccccacctggcagaaactccttctacatgggcacttgccaagacgagcctgagcagctcgacgactggaaccgcatcgccgagcttcaacaacgaaacagggtctgcccccctcatctcaaaacatgttatcctcttgaatctcggccttccctgtcgctcgggacgataacagatgaggagatgaagaccggcgatcctcaagaaactcttcgcagggccagtatgcagcccatccagatcgctgaaggtacagggattactactagacaacagagaaaacgcgtcagcctggagccacaccaagggccaggcacacccgagagtaagaaggccacgtcatgtttccctaggcctatgacacctcgagatagacatgagggccgtaaacagtcaacaacagaggcacagaagaaagccgctcccgcttccacaaagcaggccgatagacgccagagcatggcatttagcatccttaataccccgaagaagctgggcaactcactcctgaggaggggagcttccaagaaagcgctgagcaaggcttcccccaatactaggagcggaacgcgccgaagccccaggatagcgaccaccacggccagcgccgcaacagccgctgccataggggcaactccaagagccaaagggaaagcaaagcacta

SEQ ID NO: 233050 - DNA, 330 bp, synthetic construct
  misc_feature 1..330: note = Description of Artificial Sequence: Synthetic coding sequence
  source 1..330: mol_type = other DNA
atgaccctccacgcaacccgtggagctgcacttctatcttgggtgaattcactgcacgtagctgacccggtggaggccgtcctgcagctgcaggattgttccatcttcattaagatcatcgatcgaatccacggaaccgaagaggggcagcagatcctaaagcagcccgtaagtgagcgactcgacttcgtgtgcagcttcctgcagaagaatcgcaaacatccctccagccctgaatgccttgtgagtgcccaaaaggtgctggaagggagcgagctcgaactggctaagatgactatgctcctgctttaccattcgaccatgagttag

SEQ ID NO: 233051 - DNA, 186 bp, synthetic construct
  misc_feature 1..186: note = Description of Artificial Sequence: Synthetic coding sequence
  source 1..186: mol_type = other DNA
atgacactgcatgccactcggggtgccgcactgctctcttgggtaaatagtctgcatgtggccgatcctgtcgaagctgtgcttcagctgcaagattgcagtattttcatcaagataattgaccgcattcacggaaccgaagaaggtcagcaaattctgaaacagcctgttagcgagaggctatag

SEQ ID NO: 233052 - DNA, 180 bp, synthetic construct
  misc_feature 1..180: note = Description of Artificial Sequence: Synthetic coding sequence
  source 1..180: mol_type = other DNA
atgactctgcacgcaacacgcggagccgcactcctgagttgggtaaactccctgcacgtagccgatcctgtcgaagccgtcctgcaactgcaagactgcagcatcttcatcaagatcatcgatcgcatccacggaaccgaggaaggacagcagatcttgaaacagccggtaagcgagtag

SEQ ID NO: 233053 - DNA, 441 bp, synthetic construct
  misc_feature 1..441: note = Description of Artificial Sequence: Synthetic coding sequence
  source 1..441: mol_type = other DNA
atgactctgcacgctacccggggtgccgctctgctgtcctgggttaattcgctccacgtggccgatccagtcgaggcagtcctgcaattacaagactgctctatttttattaaaattatcgacaggatccacggtacagaggaaggccaacagatccttaaacagccagtgagcgaacgcctcgacttcgtatgcagtttcctacaaaagaataggaagcacccttccagccccgagtgccttgtgtctgcccagaaggtgctggaaggatccgagctggagctggctaaaatgactatgcttctgttataccatagtaccatgagcagtaaatcacccagagattgggagcagttcgaatacaaaattcaggcagagctggctgtcatcctgaaattcgtgctggatcatgaagacggcttgaatctgaacgaggattag

SEQ ID NO: 233054 - DNA, 3267 bp, synthetic construct
  misc_feature 1..3267: note = Description of Artificial Sequence: Synthetic coding sequence
  source 1..3267: mol_type = other DNA
atgagactgcagaatgcactgaatgagcagcgagttgagtttgcgactcttcaggaggctctggcccacgcgctgaccgagaaggaaggaaaggaccaggagttggcaaagctgcggggtttggaggctgcacagatcaaggaactcgaggagctacgccagaccgttaagcaactaaaggagcaactggcgaagaaggagaaagagcacgccagtggcagcggggcacagagcgaagcggctggacgtaccgagcctacgggtcccaaactggaagccctcagagcggaagtttccaaactggagcagcaatgccagaaacagcaggagcaggccgacagtctcgagcgttctttggaggctgaaagagccagtcgagctgagcgagatagcgcacttgagactcttcagggccagctcgaggaaaaggctcaagagctcgggcattcgcaaagtgcactggcctccgcccagcgggaacttgctgctttcagaacaaaggtccaggaccacagcaaggccgaggacgagtggaaggcccaggttgccaggggccgacaggaggccgagcggaagaattcattgatctcaagtttagaagaagaagtgtcgattctcaacaggcaggtccttgaaaaggagggtgaatctaaagaattgaagcgcctggtgatggcggagagtgagaaaagccaaaagctggaagagagactcagattactgcaggcagagactgcttcgaacagtgctcgggcagctgaaaggagctccgcactgcgggaagaggtccaaagcttgcgcgaggaggcggagaaacagcgggttgctagcgagaatctgcggcaggaattgacttcacaggccgaacgggcagaggaattggggcaagagcttaaagcatggcaagagaaattttttcaaaaagagcaggctctttccacactacaacttgagcacacatcaacacaggcccttgtctcagaactgctgcccgctaagcatctgtgtcagcagcttcaggcagagcaagccgctgccgagaaacggcatagagaagagcttgagcagtcaaaacaggccgctggcggactgcgagccgagctgctcagggcacagcgtgagctcggagaactgatcccactgaggcagaaggtcgctgaacaggaaagaacagctcagcagctccgtgcagaaaaagcttcttacgctgagcagttaagtatgctgaagaaagcgcacgggctccttgccgaagagaataggggtttgggggaacgggcaaacttgggaagacaatttcttgaggtcgagttggaccaagcacgagagaagtacgttcaggagctggctgccgtgagggccgatgcggagacacgtctcgccgaggtccagagagaagctcaatccacagccagagaactggaagtcatgacggctaagtacgagggcgcaaaggtgaaggtgctggaggagaggcagaggttccaggaggagcgtcaaaaactcactgcccaggttgaagagctgagtaagaagttagctgactcggatcaggccagcaaagtgcagcaacaaaagcttaaagctgtgcaagcccagggcggagaatctcagcaggaggcccagagactccaggcccaactcaatgaactccaagctcagctgtcacagaaagaacaagccgctgagcactataagctgcagatggaaaaagctaaaacccattatgacgccaagaagcaacagaatcaagagctacaggaacaactgagatcattggagcaactgcagaaagagaataaggagttgagggctgaggccgagaggttagggcacgaactccagcaggctgggctcaagaccaaagaagcggagcagacatgtagacacctgacagctcaggtgagatccctggaagcacaagtggcacatgccgaccagcagctcagggacctgggcaaattccaggttgctaccgatgcacttaaatccagggaaccccaggcaaaaccccagctggacctaagtatagacagcctggacctcagttgcgaggagggcacccccctgagtatcacacgccataaagcccttatgaccatcattcctgacctgagtcctaacaacccacttagtaagctgcctaggactcagcccgatggaacatccgttcctggcgaacctgcttctcctatctcccaaaggctgcctcctaaagtcgaaagtctggaaagtctgtatttcacaccgattccagctagaagtcaggcacccctggaatccagcctggactcattgggcgacgtcttcctcgattcggggcgtaagacgcgttctgcgaggcgcagaaccacccagataattaacatcaccatgacaaagaaactagatgtggaggagccagattctgccaattctagtttctactccacacgatctgcccctgcgtcccaggcctctctgagagctacatcctcaacccagagtctggccagactgggctcccccgactacggcaacagcgcgctattgtccttacccggatatagacccactactcgcagcagcgcacggcgaagccaggctggagtatcttcgggggctcctccaggacgcaattccttttatatgggcacatgccaggatgagcccgagcaactagatgactggaatcgtatagcagaactgcagcagcggaaccgtgtctgccctccacacctcaagacctgttaccccctggagtctcggccttctttgtcgctggggaccatcaccgacgaggagatgaagacaggtgatcctcaggagaccctgaggcgagcatcaatgcagccaatacagatcgccgaaggcactggaataactaccagacaacagcggaagcgcgttagcctcgagcctcaccagggtccagggactcctgagtctaaaaaggctacctcttgctttcctcgacccatgaccccccgtgaccggcatgaaggcagaaaacaaagtacgacggaggcccagaaaaaagctgcccctgcatcaaccaagcaggccgatcgcaggcagagcatggcattctccatccttaacacacctaagaaactcggcaatagcttgctgcgaagaggcgcatctaaaaaggccctcagcaaagcctctcccaatactaggtctgggaccagaaggtctcctagaatcgccacgactactgccagtgccgcaaccgcggcagcaataggcgctactcccagagccaagggaaaagccaaacattag

SEQ ID NO: 233055 - DNA, 2076 bp, synthetic construct
  misc_feature 1..2076: note = Description of Artificial Sequence: Synthetic coding sequence
  source 1..2076: mol_type = other DNA
atgaccttgcatgccacacggggagcagctttgctgtcttgggtgaacagcctccatgtagctgatccagtcgaagctgtgctgcaacttcaggattgctcaatatttattaaaatcatcgaccggattcacggcactgaggaaggacaacaaattctgaagcagccagtgagtgaaaggctggacttcgtgtgctcttttcttcaaaagaatagaaaacatccctcatcccccgagtgcctcgtgagcgcccagaaggttttggaaggctcagagctggagctggccaaaatgactatgcttttgttgtaccacagcacgatgtcttcaaaatctccacgtgactgggagcagttcgagtacaaaattcaggccgaacttgcagtaatactgaagtttgtcctcgaccacgaggacggtctgaatctcaacgaagatctggagaatttccttcagaaagccccagtgccatcgacctgtagctctacattccccgaagagctgagtcccccatcccatcaagccaagagggagattcgattcttagagctgcagaaagtggcttcttccagctccgggaataatttcctatctggttcccccgcttcccccatgggagatatcctccaaactccacagtttcagatgcggaggctcaaaaaacagttggccgatgaacggtctaatcgcgacgaactggagttggagctggccgaaaatcggaaactcctgaccgagaaggacgctcagatagccatgatgcagcagcggatagataggcttgccctacttaatgaaaagcaggcagcaagcccactggaacctaaggagctggaagagctgcgggacaaaaatgagtccttgacaatgaggcttcacgaaactctgaagcagtgccaagatttgaagacggaaaagagccagatggataggaaaattaaccagttgtctgaggaaaacggcgacctttcatttaagttgcgagagttcgcatcgcatctccagcagctacaagacgcgctgaacgaactgacagaagagcattctaaggccactcaggagtggttggagaagcaggctcaactggagaaggaattatctgccgctctgcaggacaaaaaatgtttagaggaaaaaaacgagatccttcagggcaagttgtcccagctcgaagaacacctctcacagttacaggataacccgcctcaagaaaaaggtgaggtgctgggggacgttttacaactcgagacgcttaagcaggaggcggctacactcgccgctaacaatacacaattacaagcccgagtggagatgctcgaaaccgagcgaggtcagcaggaagccaagctactggcagagagggggcattttgaggaagaaaagcaacaactgtcttctctgatcacggatctgcagtcctccatctcgaacctgtcacaggctaaggaggagctggaacaagctagccaggctcatggagccaggctgaccgcccaggttgcctcattaacctccgagctgacaacgttgaacgcgactatccaacagcaggatcaggagctcgccggtttgaagcaacaagcgaaagagaaacaggcccagctagctcaaactctgcaacagcaggaacaggccagccaaggtctcagacaccaagtcgagcagttgagctccagtctgaagcaaaaggagcagcagttaaaggaagtcgctgagaagcaggaagcaacacgccaagaccatgcacagcagctggccaccgccgcagaagagcgagaagcctctcttagagagcgagatgcggctctgaagcagttggaagcactagagaaggagaaagctgctaagctagagatattgcagcagcagctccaggtggcgaacgaggcacgcgattctgctcaaacaagtgttacacaggcccagagagaaaaagctgagctgtctcgcaaagttgaagaactgcaggcttgcgtggagacagcacgccaggaacagcacgaagctcaggcacaagttgccgaacttgaactgcagctgaggtccgagcagcaaaaagccacagagaaggagtag

SEQ ID NO: 233056 - DNA, 480 bp, synthetic construct
  misc_feature 1..480: note = Description of Artificial Sequence: Synthetic coding sequence
  source 1..480: mol_type = other DNA
atgaccctgcacgctactcgcggagcggctctactgagctgggtaaatagcctgcacgtggctgatccggttgaagcagtcctccagcttcaggattgttctatctttatcaagattatcgatcggatccacggcaccgaagagggccagcagatcttgaagcagcctgtttcagagagactggacttcgtatgttccttcctacaaaagaacagaaaacaccctagcagtcctgaatgcttggtgtcagcccagaaagtgttagaggggtctgagctggagctggcaaagatgaccatgttgcttttatatcattctacaatgtcatccaaaagtcctcgggattgggagcagtttgagtacaaaatccaggccgaactggctgtgatcctaaaattcgttctagaccatgaggatggtctgaaccttaacgaagatttagaaaattttctccagaaggctcccgttccaagcacctag

SEQ ID NO: 233057 - DNA, 219 bp, synthetic construct
  misc_feature 1..219: note = Description of Artificial Sequence: Synthetic coding sequence
  source 1..219: mol_type = other DNA
atgaccctccatgcaactcggggtgcggctttgctgagctgggtgaattctcttcatgtggccgatccagtggaggccgtccttcagctacaagactgcagcatcttcataaaaatcatcgatcggatacacggcacagaggagggacagcaaatattgaaacagccagtgtctgagagattagactttgtctgcagttttcttcagaaaaataggtag

SEQ ID NO: 233058 - DNA, 252 bp, synthetic construct
  misc_feature 1..252: note = Description of Artificial Sequence: Synthetic coding sequence
  source 1..252: mol_type = other DNA
atgactctgcatgcgacccgaggagcagctcttctttcctgggtaaacagcttgcacgtggccgatcccgttgaggccgtcctgcagctgcaagattgttccatcttcattaagatcatcgacagaattcatggtactgaggaaggacagcagattctgaaacagcctgtgtctgaacggcttgattttgtgtgctccttcttgcagaagaaccgaaaacacccatcaagcccggaatgccttgtgtcatag

SEQ ID NO: 233059 - DNA, 2559 bp, synthetic construct
  misc_feature 1..2559: note = Description of Artificial Sequence: Synthetic coding sequence
  source 1..2559: mol_type = other DNA
atgaccctccacgctaccaggggggctgctcttctttcatgggttaacagcctgcacgtggcagaccccgtggaggctgttctgcaactgcaagattgtagcatcttcatcaagattatcgataggattcacggcaccgaggagggacagcaaattctcaaacagcccgttagcgaacgtctcgactttgtttgcagcttcctccagaaaaatagaaagcatccgtcatcccccgaatgtctggtcagcgcccagaaagtcctggaggggtccgaactagagctggcaaaaatgacaatgttgctcttataccattccactatgagttccaaatcccccagggactgggaacaatttgagtataaaatccaggcagagcttgccgttattctgaaattcgtcctcgatcacgaggacggtttgaacctgaacgaggatttggagaactttctccagaaagctcctgtgccgtctacttgctcatccacattcccagaggagctgagtcctccctcccatcaggccaaacgcgaaatcaggtttctggaacttcagaaagttgcaagcagttccagcggcaacaattttttgagtggctcccccgcttccccaatgggtgatattcttcagactcctcagttccagatgcgtagattaaagaagcagctggccgatgagcggtccaatagagacgagctggagctggagctcgctgaaaatcgaaaactgctgactgagaaggatgcgcagatcgctatgatgcaacagcgcattgacagactggcacttctgaacgagaaacaagcggcatcccctttggagcccaaagagttggaggagttacgggacaaaaatgagtcccttacgatgcggctccacgagactttaaagcaatgtcaggacttgaagacagaaaagagtcagatggaccggaaaataaatcagttgtcagaggaaaatggcgatttatccttcaagctcagagaattcgcttctcacctgcaacagttacaagacgctctcaacgagctgacggaggaacactcaaaggccacacaggagtggctcgaaaagcaggctcagctggaaaaagagctatcagccgcactccaagataaaaaatgcttggaagagaaaaacgaaattctgcaaggcaaactttcgcaactggaggagcatttgagccaactccaggataaccccccacaggaaaaaggagaggttttaggggatgtcctgcaactcgaaaccctgaagcaggaagctgctacactggccgcaaacaacacacagcttcaggcacgggtggagatgctggaaacagagcgcggacaacaggaggcgaagttgctggcagaacgcggtcactttgaggaggaaaagcagcagttatcctctcttatcactgatcttcagagtagcatttcaaacctctcccaggccaaggaggaactagaacaggcaagtcaggcccacggggcacggttaaccgctcaagtagctagcctcacctctgagctcacaacactgaacgccacaattcagcagcaagatcaggagctggccggacttaaacagcaggccaaagagaagcaggctcaacttgcacagaccctccaacaacaggagcaggcttcgcagggactgcgccaccaggttgagcagctctcttcctcactgaagcagaaggaacagcaacttaaagaagttgcagaaaaacaggaagctacacgccaggatcacgcacagcagttagctaccgcagcggaggagagggaagcctcattgagggagagggacgccgcactcaaacagctggaggcactcgaaaaagaaaaggccgctaaactagaaattcttcagcagcaattgcaggtggccaatgaagcgagagacagcgcccaaacgtcggtaacccaggcccagagagagaaggctgaactgtcaaggaaagttgaagagctgcaggcctgcgtcgaaacagcaagacaggagcaacacgaagcgcaggctcaggtggccgaattggagctgcagctgcggtctgagcagcaaaaagccactgagaaggaacgagttgcacaggaaaaagatcaactgcaggaacaactccaggctcttaaggagtcgctcaaagtgaccaaagggtcactggaagaagaaaaaagacgggcagctgacgcattggaggaacagcaacgctgcatttctgagcttaaggccgagacaaggtccctcgtcgagcaacataagcgggagcgcaaggaactcgaggaagaaagagctggccgaaaggggctggaggccagactgcagcagctgggcgaggctcaccaggccgaaactgaagtgcttagacgagaactggccgaagccatggcggctcagcacactgctgagtccgagtgcgaacagctggtcaaagaagtggcagcctggcgagaaaggtatgaggacagtcaacaggaggaggcacagtacggggctatgttccaggaacagctgatgacactcaaagaagagtgcgagaaggccagacaagaactgcaggaggcatag

SEQ ID NO: 233060 - DNA, 525 bp, synthetic construct
  misc_feature 1..525: note = Description of Artificial Sequence: Synthetic coding sequence
  source 1..525: mol_type = other DNA
atgactctacacgccactcggggagcagctctgctgagctgggtgaatagcctgcacgtggctgaccccgtcgaagccgtgctgcagttgcaggactgctctattttcataaaaatcattgaccggatacacgggaccgaggagggtcaacagattctgaaacaacctgtcagtgaacgattggacttcgtgtgctccttcctccagaagaacaggaagcatccatccagccccgaatgcctcgtaagtgcgcaaaaggtcctagagggctccgaactggagttggccaagatgactatgttacttctatatcactccaccatgtcctccaaaagcccaagggattgggagcagttcgaatataaaatccaggccgagctggccgtcatactgaagttcgtgctggatcatgaagatggcctgaatctcaatgaggatctcgagaatttcttgcagaaggcccctgtgccttcgacctgttcaagcacattcccagaagaactgtcgcccccttctcaccaatag

SEQ ID NO: 233061 - DNA, 606 bp, synthetic construct
  misc_feature 1..606: note = Description of Artificial Sequence: Synthetic coding sequence
  source 1..606: mol_type = other DNA
atgactcttcatgccactagaggagcagctttgttaagctgggtgaatagcttgcacgtcgctgatccggttgaggctgttctacaattacaggattgttcgatattcatcaagattattgatcgaatccacggtaccgaggaggggcaacaaatattgaagcaacccgtaagtgagagacttgactttgtctgttctttcctccaaaaaaacagaaagcatccgtcctcaccagagtgtttggtgagcgcacagaaggtgttggaaggatctgagttggagcttgccaaaatgaccatgctgctgctgtatcactctactatgagcagtaaatcccctcgggactgggaacagttcgaatacaagattcaggcagagctagccgtaatactgaagttcgtccttgatcatgaagatgggctgaacctgaacgaagacctggagaatttcctgcagaaggccccagtgccatctacctgttcttctacctttcccgaagaactctcaccacctagtcatcaagctaaaagggagatcagattcttggaactgcagaaagtcgcttcttcctcttcaggcaataatttcttgagcggctccccatag

SEQ ID NO: 233062 - DNA, 480 bp, synthetic construct
  misc_feature 1..480: note = Description of Artificial Sequence: Synthetic coding sequence
  source 1..480: mol_type = other DNA
atgaccctacacgctacacggggtgcagccctcctgagttgggttaactccctgcacgtagccgaccccgttgaggccgtgctgcagcttcaggactgctcaatttttattaagatcatcgaccggatccatggtaccgaggaggggcagcaaatcctcaagcagccggtgtcggagagactagattttgtgtgctcatttttgcagaaaaatagaaagcaccctagctctccggagtgtctggtgtccgcgcaaaaagtgctcgagggctcagagctcgaactagcaaagatgaccatgttgctgctttatcactctactatgagtagtaagtcccccagagattgggaacagtttgaatataagatccaagctgagctggcagtgatccttaaattcgtgcttgatcatgaggacggattgaacctcaatgaggaccttgaaaacttccttcagaaagcaccagttccctccacatag

SEQ ID NO: 233063 - DNA, 663 bp, synthetic construct
  misc_feature 1..663: note = Description of Artificial Sequence: Synthetic coding sequence
  source 1..663: mol_type = other DNA
atgaccttgcatgcaactcgcggtgccgcactgttgtcttgggtgaatagtctgcacgtggcggacccagtggaggccgtgctgcaactacaagactgttctatcttcattaagattatcgaccgcatccatgggacagaagagggtcagcagatactaaaacagcccgtaagcgaaagactggacttcgtgtgctcgttcttacaaaagaatagaaagcatcccagcagtcctgaatgtttagtgagcgcccagaaggtcctcgaggggtccgagcttgaattagctaagatgacaatgttgttgctgtatcacagcaccatgagctctaaatctccaagagattgggaacagttcgagtacaagattcaggccgaactggccgtgatactgaagtttgtgctggatcatgaagatggcctgaatctgaatgaagatcttgagaatttccttcagaaagccccagtcccctccacctgttcctccacctttcccgaagagctgagtccaccaagtcaccaggctaaacgggaaatcagatttcttgaattgcagaaggttgcctctagtagcagcggcaacaatttcctaagcgggtccccagctagccccatgggggatatactgcagactccccagtttcagatgagacggctgaagtag

SEQ ID NO: 233064 - DNA, 171 bp, synthetic construct
  misc_feature 1..171: note = Description of Artificial Sequence: Synthetic coding sequence
  source 1..171: mol_type = other DNA
atgacacttcacgcgacaagaggagcagctctcctgagctgggtgaactctctgcatgtcgcggatcctgtggaggcagtactacagttgcaggactgctctattttcatcaaaatcatcgaccgtatacatggaacagaagaggggcagcaaatcctgaagcagccttag

SEQ ID NO: 233065 - DNA, 1053 bp, synthetic construct
  misc_feature 1..1053: note = Description of Artificial Sequence: Synthetic coding sequence
  source 1..1053: mol_type = other DNA
atgttctgttgtcttggctacgaatggctgtctgggggatgcaagacatggcactctgcttgggtgattaatacactggccgaccaccgtcaccgtgggactgactttggtggttccccatggttgttgatcattaccgtgtttttgcggagctataagttcgcaatatctctttgcacaagctacttgtgcgtgtcctttctcaagacaattttcccatctcagaatggtcacgatgggagcaccgacgtccaacagcgggctcgccgttctaaccggagacgccaggaaggcataaaaattgtcctggaggatatcttcaccctttggcggcaagtggagaccaaagtgcgggcaaagatcagaaagatgaaagtaactacgaaggtgaatcgacacgacaagatcaatgggaagaggaagactgcgaaggagcacctgcgaaaactgtccatgaaggagcgcgaacacggcgaaaaggagcggcaagttagcgaggcagaagaaaatggtaagttagacatgaaggagatccacacatatatggagatgttccagagggcgcaggccctacgaaggagagccgaagactattatcggtgcaagatcactccatcagctcgaaagccgctgtgcaaccgggtgaggatggcagcagtcgaacaccgacactcatccggtctgccctactggccttacctgaccgccgagacactcaaaaaccgcatggggcatcagcctccaccacccacacaacagcacagcataatcgataatagccttagtctcaaaactccaagtgaatgcctcttaacacctctgcccccttccgctttgccctcagcggacgacaatttgaaaacaccggcagagtgcttgctataccccttgccgccttctgcagatgataacctcaagacacctccagagtgcctgctgacaccgctgccaccgagcgctcctccatctgtggatgataatctcaaaaccccccctgaatgtgtctgtagcttgcccttccatccacagagaatgataatctctcgaaattag

SEQ ID NO: 233066 - DNA, 1053 bp, synthetic construct
  misc_feature 1..1053: note = Description of Artificial Sequence: Synthetic coding sequence
  source 1..1053: mol_type = other DNA
atgttttgctgtttaggctacgagtggctcagcggcggttgcaaaacatggcatagtgcctgggttattaacacactcgctgatcaccgacatcgtggaactgatttcggcggaagcccctggctactgattatcaccgtgttcttacgcagctacaaattcgcaatctccctgtgcacttcttatctgtgtgttagcttcctcaagaccattttccccagtcaaaacggacacgacggatctaccgatgttcaacaaagagctcggaggtcaaaccgacgacggcaggagggcattaaaatcgtgttggaggacatcttcaccctttggcgccaagtggaaaccaaagtccgggcaaagatccgcaagatgaaggtcacaaccaaagtgaatcgccatgacaaaattaacggcaagcgaaaaactgctaaggagcatctgaggaagctttcaatgaaagagcgtgagcacggtgagaaggagcggcaggtgagcgaggccgaggaaaacggcaaacttgacatgaaagaaatccatacctatatggagatgttccagagggcgcaggcccttaggagaagagctgaggattactaccggtgtaaaataacccccagcgccaggaagcctctgtgtaatcgtgtacgtatggctgcggttgagcaccggcacagtagtgggctgccctattggccgtatctaacagccgagacactgaaaaaccgaatgggtcaccagcctccgcctccaacacaacaacattctatcatcgataacagcctgtctctgaaaactccatcagaatgtctgctgactccccttcccccatctgccctcccgtccgccgacgacaatctcaagacacctgctgagtgccttctgtatcctctgccgccaagtgccgatgataatctaaaaacaccgcctgaatgccttctgactccgctgcccccttctgcgccaccttccgttgacgacaacctgaagacaccgcctgaatgtgtttgttctctgccttttcatccccagcgtatgatcatttccagaaactag

SEQ ID NO: 233067 - DNA, 1431 bp, synthetic construct
  misc_feature 1..1431: note = Description of Artificial Sequence: Synthetic coding sequence
  source 1..1431: mol_type = other DNA
atggcctctccctttagtggcgctctgcagttgaccgacctggatgattttatcggccctagccaggaatgtattaaacctgtgaaggtggaaaagcgggcagggagcggtgtcgcaaagatacggatcgaggatgatggctcttacttccaaatcaaccaagatggaggcacaagacgcctggagaaggctaaagtttctctgaacgactgcctagcctgtagcggttgtatcacaagtgcagaaaccgtcctgatcacccaacagtcacacgaggaattgaaaaaagtcctcgatgcaaacaaaatggctgcaccctcccagcagcgcctagtcgtcgtgagcgtctcacctcagagtcgggcaagcctagctgctaggtttcagttgaatcctaccgacaccgccaggaagctgacctcattttttaaaaaaatcggagtgcactttgtattcgacacagctttcagccgtcacttctctttgctcgagtcccagagggaattcgtgagaaggttccggggtcaggctgactgcaggcaggccctgcctcttctcgcctccgcctgtcctgggtggatctgttacgctgaaaagacacacggtagcttcatcctgccgcacatatccactgctcggagcccccagcaggtcatgggcagcctggttaaggactttttcgcccagcagcagcacctaaccccagataagatttatcacgtaactgtcatgccatgttacgataaaaaactggaggcatctcgacccgactttttcaatcaggagcatcagacacgagacgtggactgcgtcttaacaactggtgaagtgttccgccttctggaggaagagggtgtgagccttccagatctcgaacctgccccacttgattcactttgttccggggctagcgccgaagagccgacctctcatagaggaggcggatctgggggttaccttgagcacgtttttcgacacgctgcccgagagttgtttgggatacacgtagctgaagtgacatataaacctctgcgcaataaagatttccaggaggtaacacttgagaaagagggccaggtgctgttacactttgctatggcatacgggtttagaaacatccaaaacctcgtacaacgactcaaacgcggtcgctgcccatatcactatgtggaagtcatggcctgcccatctgggtgcctgaatggagggggacagctacaggccccagaccgtccttcccgggagctcttgcagcacgtggaacgcttgtatggaatggttcgggctgaggcccctgaagatgcccctggtgtccaggaactatacacgcattggcttcagggcacggatagcgagtgtgcgggaagacttctccacacacagtaccacgccgtggaaaaggccagcactgggctaggtatccgctggtag

SEQ ID NO: 233068 - DNA, 567 bp, synthetic construct
  misc_feature 1..567: note = Description of Artificial Sequence: Synthetic coding sequence
  source 1..567: mol_type = other DNA
atggcgtctcccttctccggagctcttcagctaaccgacctcgatgacttcattgggccttctcaggagtgtataaagcctgtgaaggtagaaaagcgggcagggagcggggtggcaaagatccgcatcgaagacgatggcagctattttcagattaaccaagacggaggaactagaaggctcgaaaaggccaaggtgtccttaaacgactgcttggcctgttccgggtgtatcaccagtgccgagacagtgttaattacacagcagagtcacgaagagctcaagaaggtgctggacgcgaataagggttgtacgtcctcttcaacgcccccaagtcagggaacatcagcgagttggagagccagcgaaagtctttgtggcgacagcgaagaccggcctaccgccgatcggaggtgcccttgctggcccctccccgcacaggcaggatctgccatgccgcgtcgactaactgccgcatcctcgtcaccaacgtcagcccctcccggtccgcgttcccggtcatgggccccttggtcaagaacttcttctccctcgtctagcacctag

SEQ ID NO: 233069 - DNA, 1125 bp, synthetic construct
  misc_feature 1..1125: note = Description of Artificial Sequence: Synthetic coding sequence
  source 1..1125: mol_type = other DNA
atggccgcaccttcgcagcaacgcctagttgtcgtctccgtgtctccacaatcgcgcgcaagtcttgctgccaggtttcagttaaatcctactgatacagcaagaaaactgacttcattctttaaaaagatcggcgtgcacttcgtgtttgataccgctttctccagacactttagtcttctggagtcccagagggagttcgtgcggcgattcaggggccaggccgactgtaggcaggccctgcccctgcttgcgagtgcgtgcccaggatggatctgctatgccgaaaagacccacgggagcttcatcctcccacacatttctaccgcccgaagtcctcagcaggtgatgggcagcctggtgaaggacttcttcgctcagcagcagcatctgacaccagacaaaatctatcatgtcacagttatgccatgctacgataagaaactggaggccagccgccctgatttcttcaaccaggaacatcagactcgcgatgttgattgtgtcttaaccacaggggaggtcttcagacttttagaggaggagggggttagtctccccgacctggaaccggcaccgctggacagcttatgctccggagccagcgcggaggaacctaccagccaccggggagggggatccgggggttatctggagcacgtgtttagacacgccgctcgcgagttgttcggtatccatgtggcagaagtgacctataagcctctccgtaacaaggactttcaggaggtcaccctcgaaaaggagggccaggttctgctacacttcgccatggcttatggattccgcaacattcagaatctggttcagcgccttaagagagggcgatgcccctaccactacgtcgaagtcatggcatgtccctcagggtgtctgaacggaggagggcaactgcaggcgcctgatcgtccctccagggaactgctgcagcacgtcgagcgactttacggcatggtcagagctgaagccccagaggatgcccctggcgtgcaggagctttatacacactggctccaaggcacagattccgagtgtgctggcaggctgctgcacacccagtatcatgcagtcgaaaaagcatctaccggcctcggcatcagatggtag

SEQ ID NO: 233070 - DNA, 4284 bp, synthetic construct
  misc_feature 1..4284: note = Description of Artificial Sequence: Synthetic coding sequence
  source 1..4284: mol_type = other DNA
atgcttctacccagcgatgtggcccgacttgttctgggttaccttcagcaggagaaccttatctctacgtgccaaactttcattctggaatcctccgacctcaaggagtatgctgaacactgtacagatgagggtttcatacctgcctgcctcctctcacttttcggcaaaaatctgacaacaatcctgaatgaatacgtcgctatgaaaaccaaagagacgtcaaataacgttccagctataatgtcctcactctggaagaagctcgatcacactctctcccaaatcagatcaatgcaatcttccccgagattcgccggttcccaacgagccaggaccagaactggtattgctgagattaaacgccagcgcaaactggcctcccagaccgcaccagccagtgccgagctgctgacactgccgtatctaagcggccagttcacgacccccccttctactggaacacaggtcaccagaccgtccggacagatctctgaccctagccgcagctatttcgtggtcgtgaatcatagtcaaagtcaggacaccgtcacgacgggagaagctctaaacgttatccccggagcgcaggaaaagaaagcccacgccagtctcatgtcccctgggagaaggaagagcgaaagccagcgcaagagcaccactctctctggtccacacagtaccatccggaactttcaggaccctaacgcctttgcggtggagaagcaaatggtcatcgaaaatgctcgcgagaagatcctgtctaataaatcacttcaggagaagctggccgagaacatcaacaaatttctgacttctgataataacatcgctcaggtgcctaaacagactgacaacaatcctacagagcctgaaacatccattgatgagttcctgggccttccttccgaaattcacatgagtgaagaggcaatacaggatatcctggagcagacggaatctgatcccgcattccaggccctgtttgacctctttgactatggcaagacgaaaaataacaagaatatttcccaatctattagcagccagcccatggaaagtaatcccagtatagtgctagccgatgagacaaatcttgctgtgaaaggctccttcgaaacagaggagtcagatggtcagagtgggcaaccagccttctgcaccagctatcaaaatgacgacccactgaacgctctcaagaactctaacaatcatgatgtcttgagacaagaggaccaggagaatttttcccagatcagcacatctattcagaaaaaagcctttaaaacagcagttcctacagagcaaaaatgtgatattgacataacttttgaatctgtgccgaatctgaatgacttcaatcagaggggcaattccaatgctgagtgtaatcctcattgcgccgaactttacaccaaccagatgtccacagagaccgaaatggcaatcggaattgagaaaaattctcttagctccaacgtcccctccgagtcccaactgcagcctgaccagcctgatatcccaataacctcattcgtctccctcggctgcgaggctaataatgaaaatctaattctgagcggcaaatctagccagctgctttcacaagacacctcattgaccggcaaaccatccaaaaaatcgcaattctgcgaaaattctaacgataccgttaaactgaaaatcaacttccacggaagtaagtccagcgacagctctgaggtgcacaaaagcaaaatcgaaatcaatgtgctggagccagtaatgagtcagctaagtaattgccaggacaactcctgcctgcagagcgagattcttcccgtgagtgttgaaagtagtcacctgaatgtgagtggtcaggttgagatccaccttggtgattcactgagctcaaccaagcagccttccaatgactccgctagcgtggaactcaaccacactgaaaatgaagcccaggcctctaagagcgaaaactcccaggaaccttcctcttccgtgaaggaggaaaacactatcttcctaagcctcgggggtaacgcgaattgtgagaaggttgccctgacaccaccagaggggactccggtagagaacagtcactctcttccccctgaatcagtgtgctcatccgttggtgacagccacccagaaagccagaacacagacgacaagccgtccagtaataattctgccgagatcgatgcgtcaaatattgttagcttgaaggttattatctccgatgatcctttcgtttcctctgataccgagcttacgagcgccgtatctagcattaacggggagaacctgcctaccataatcctatcaagtcccacgaagtctccaactaaaaacgccgagctcgtgaaatgcctgagctctgaggagaccgtgggagccgtggtgtatgcagaagtgggcgattcggccagcatggagcagtctctacttacgtttaagtccgaggattcagctgtcaataacacccaaaacgaagatggaatcgcattcagcgccaacgtgaccccctgcgtgtccaaagacgggggatatatccaattgatgcccgctacctctaccgctttcgggaacagcaacaatatcttgatcgccacctgcgtgactgaccccaccgccttggggaccagcgtgtcccagtctaatgtggtcgttctcccaggcaacagcgctccaatgaccgcacagcccctacctccacagttgcaaactccaccccgatctaactccgttttcgctgtgaatcaagctgtgtctcctaatttcagccaggggtccgcaatcattatcgcgtccccagtgcaaccggttctccagggaatggtcggaatgatcccagtgtcggtagtaggccagaacggaaataacttctccacccctcctcgccaggtgctccacatgcctcttacggctccagtgtgcaacaggagcataccgcaattccctgtgcctcctaagtcacaaaaagctcaagggctgcgaaacaaaccctgcatcggaaagcaggtgaacaatttagttgatagctctggtcatagcgtcgggtgtcatgcccaaaagaccgaagtgtctgacaaaagcatcgctaccgatctgggcaaaaagagcgaggagacgactgtcccttttcctgaagagagcattgttcctgctgcaaagccttgtcataggagggttctctgctttgatagtaccacggcccctgtcgccaacactcagggacccaatcacaaaatggttagtcagaataaggagcgaaacgcagtgtccttccctaacctggactcaccaaatgtgtccagcacactgaagccaccgagtaacaatgctatcaaaagagaaaaggagaagccccctctccccaagatcttgagcaagagtgagtctgccatcagcaggcatactacaatccgggaaacgcagtccgagaagaaggtctcccccacagagatcgtgttggaaagctttcacaaggccaccgcgaacaaagaaaacgaactttgctcggacgtggagcgccaaaaaaacccagaaaactcgaagttgtcgataggtcaacagaatggcggattacggtctgagaagtcaatagcatctcttcaagagatgacgaagaagcagggaacaagttcaaacaataagaacgtgctgtccgtggggacggcagtcaaggacctaaagcaagagcaaactaaatcggcttcttccctgattaccacagaaatgttacaggatatccaaagacattctagtgtgtctcggctggccgacagttccgacttgccagttcccaggacgcctggaagcggggctggcgaaaagcacaaagaagagccaattgacatcataaaagcgcctagttctcgtcgcttcagcgaggactcatcaacctccaaggtgatggtgccacctgtaacccctgacctgcccgcttgctcgccagcgtcggaaactggaagtgaaaatagcgtgaatatggctgctcatacacttatgattttgtcacgcgcagccatctccagaaccaccagcgccaccccattgaaagacaatacacagcagtttagggccagcagccgctccaccactaaaaagagaaagatagaggaactcgacgaaagagaaagaaattctcggccatcctcaaagaatctgaccaatagcagcataccaatgaaaaagaagaaaattaaaaaaaagaagctcccgtccagcttcccggcagggatggacgtggataagttcttgctgagcctgcattacgacgaatag

SEQ ID NO: 233071 - DNA, 7283 bp, synthetic construct
  misc_feature 1..7283: note = Description of Artificial Sequence: Synthetic coding sequence
  source 1..7283: mol_type = other DNA
atgcctttaaagaccagaaccgctctttcggatgaccctgatagcagtaccagtacattgggcaacatgctggagctccctgggacatcatcatctagtaccagccaggagctgcccttttgccagcctaaaaagaagtctacacccctgaagtacgaagtcggagacctcatctgggccaagtttaagcgcagaccttggtggccctgcagaatttgcagtgatcccttaatcaacacccacagtaaaatgaaggtttctaatagaagaccatacagacagtattatgtcgaggcctttggggatcctagcgaaagggcctgggtggcagggaaggccatcgtcatgttcgagggacgccaccagttcgaggagctgccagtgcttcgaagacggggtaagcagaaggaaaagggatatcgccacaaggtgccacaaaaaattctttcaaagtgggaggcatccgtgggactggcagaacagtatgatgtcccaaagggtagcaaaaaccggaagtgtattcccggtagtatcaagcttgactctgaggaagacatgcccttcgaagactgtactaatgaccccgagtccgaacatgatttgctgctgaacggctgcttgaagagcctagcctttgactctgagcattctgccgatgagaaagaaaaaccatgcgctaagtcccgggctcggaagtcaagcgacaaccccaaaagaacttctgttaagaagggacacatccagtttgaggcccacaaggatgagcggaggggtaaaatacctgaaaacctgggtctgaattttatctctggtgatattagcgacacacaggcaagtaatgagttgagtaggatcgcgaatagtctcactgggtccaacactgccccaggctcctttttgttctcgagctgtggcaagaacaccgctaaaaaagagttcgagactagcaatggcgattctttacttggcctccctgaaggggctctcatttccaagtgcagcagggagaaaaataaaccacaaagatcattggtgtgcggctcaaaggttaagctatgctacattggcgcaggtgatgaagaaaagagatcggatagcataagcatttgtactactagcgacgacggctccagcgatctggaccccatcgagcactccagcgaatctgataatagcgtgctcgagatcccagatgccttcgaccggacagaaaacatgttgtctatgcagaagaacgaaaaaattaaatatagccgctttgccgctaccaatacaagggtgaaggctaaacagaaacccctcatctctaatagtcatacagatcacctaatgggttgcactaagtcggccgagcccggaaccgaaacgtcccaggtcaacctgtctgatttgaaggcatcgacattggtgcacaaaccccagagcgattttactaatgatgccctttcacccaagttcaacctcagcagcagcatctcgagcgaaaatagcctaatcaaagggggtgcagcaaaccaggccctgttgcactccaagagtaaacaaccaaaatttaggagcattaaatgtaaacataaagaaaatcctgtgatggctgagcccccagtcattaatgaggagtgctccctcaagtgttgcagcagcgacacaaagggtagcccactggcctcgatctctaaaagcggcaaggtagacggcctaaagctcctcaataatatgcacgagaagacaagagactcctcggacatagagaccgctgtggtgaagcatgtgttgtccgagttaaaagaactgtcatacagatctctgggggaggatgtgtccgacagtgggaccagtaaaccgtccaaacctctgctattcagtagcgctagttcccagaaccacatacctattgagcctgactacaaattcagtacattactcatgatgttgaaagacatgcacgacagcaaaacgaaggagcagcggctcatgaccgctcaaaacctggtaagttatcgttctcctggcaggggtgactgttctacgaattctcccgtcggcgtatcaaaagtgctggtctccggtggcagtacccataactccgagaagaagggcgacgggactcaaaattccgcaaatccgtccccctcaggcggagactcagcactgtcaggcgaactgtccgccagcctgcccggtctgctgtccgacaagagagatttaccagcaagcggtaagtctcgaagtgattgcgtgacaagaagaaactgtgggagatctaagccttcttccaagcttcgtgacgccttttctgcccagatggttaagaataccgttaaccggaaagcgctgaaaacagagaggaaacgtaagttaaatcagctcccctccgttactctggatgcagtcctccagggcgatagagagagaggcggatctttgcggggaggcgctgaggacccgtcaaaagaggaccccctgcagattatgggccacctcactagcgaggatggtgatcacttcagcgacgtacacttcgattcgaaggtgaagcagtcagaccccggaaaaatttccgaaaagggcctaagtttcgagaatggcaaggggcctgagttagactccgtcatgaacagcgagaacgacgaactgaatggagttaatcaggtggtcccaaagaagaggtggcagagactgaatcagcggaggaccaaaccgagaaaacgaatgaatcgattcaaggagaaggagaacagtgagtgcgctttccgtgttctgctccccagcgatccagttcaagagggacgtgatgagttccctgagcataggaccccgagcgcctcaattcttgaagagcctctgacagaacaaaatcatgcggactgtttagacagtgccggtcctcgcctaaatgtgtgcgataagtccagtgcttctatcggcgacatggagaaggaacccggtatcccttcactgaccccccaggccgaactgccagagcctgcagttcggtctgaaaagaagcggctccgtaaaccaagcaagtggctgctcgaatataccgaggagtatgatcagattttcgcacctaaaaagaaacaaaagaaggtgcaggaacaggttcataaggtttcttcgcgatgtgaagaggaatcattgctcgctcggggtcggagcagtgcacagaacaagcaggtggacgaaaattctcttatcagcacaaaagaagaaccccctgttctagaacgtgaggctccatttttggagggacctttagcacagtcagaactcggaggcggacatgctgagttgccgcagctgacactgagtgtgcctgttgccccagaggtgtcaccaagaccagctctagagtccgaggaactgctagtcaagacaccaggcaattatgagagcaagcgacaaagaaaacccacgaaaaagctgcttgagagcaacgacttggatccgggttttatgcccaaaaaaggcgacctgggcctctccaagaaatgctacgaagcgggtcatctggagaacggaatcactgagtcatgtgccacgtcatacagcaaggacttcgggggaggaaccaccaagattttcgataaaccacgtaagagaaagagacagcgccatgcagccgctaaaatgcagtgcaaaaaggttaagaacgatgatagttctaaggaaatcccaggctcagagggcgaactaatgcctcatagaaccgccacaagcccaaaagagactgttgaggaaggcgtcgagcatgatcccggaatgcccgctagtaaaaaaatgcagggagaaaggggcggaggggcagcgctgaaggaaaatgtgtgtcagaattgcgagaagctcggcgaattgttactgtgtgaggcccagtgttgtggggctttccatctcgagtgcctggggctgacagaaatgcccagaggcaaatttatctgtaatgagtgccgcactggcattcacacatgtttcgtctgtaaacaatcgggagaggatgtgaagaggtgtctactaccactctgcgggaaattttaccacgaagagtgcgtgcaaaaatatccacccacagtgatgcagaataagggtttcaggtgttcccttcacatctgtattacatgccacgctgcaaaccccgctaacgtctccgcctcaaaaggcaggctcatgcggtgcgttcgatgccccgttgcttaccatgctaacgacttttgcctggctgctgggagtaaaatacttgccagcaactcaattatttgtcctaaccatttcacaccccgaagaggatgccgcaatcacgagcacgtaaacgtgagctggtgtttcgtttgcagcgagggcggatcactcttgtgttgtgacagctgccccgctgcattccatcgagaatgcttgaacatcgatattccggaaggcaattggtattgcaatgactgcaaagcagggaaaaagccgcattatcgagagatcgtttgggtgaaagttggccgatatagatggtggcccgctgaaatttgtcaccccagggctgtcccctctaatatcgacaaaatgagacacgacgtgggcgaattcccagtgctatttttcgggagcaatgattatttgtggactcaccaggcaagagtgttcccgtacatggagggcgacgtcagctccaaggacaagatgggaaagggcgtcgatggcacgtacaaaaaggctttacaggaggccgcagcccgattcgaggaacttaaagcacaaaaggaactgaggcaactgcaagaagatagaaagaatgacaagaaaccaccgccatacaaacacattaaggttaaccggccaatcgggagggtccaaatcttcacggctgacctgagcgaaattccaagatgcaattgtaaggctactgatgagaacccatgcggcatagatagtgaatgtatcaataggatgcttctttacgagtgtcatcctaccgtgtgtcccgcaggcggacgttgccaaaaccagtgcttttcgaaaaggcagtatcctgaagtggagatctttaggactctgcagaggggatggggcttgcggacaaagacagatatcaagaaaggggaattcgtgaatgaatatgttggtgaactgatagatgaagaggagtgtcgggctaggatcagatacgcacaggaacacgatataactaacttttatatgttaacactggacaaagacagaattatcgatgctgggccaaaggggaattacgcaagattcatgaaccactgttgtcagcccaactgcgaaactcaaaaatggtctgtcaatggtgataccagggtcggcctgtttgctctaagcgatattaaagccggaacagagctgacatttaactacaatctggaatgcctcggcaacgggaagacggtctgcaaatgtggcgcacccaactgcagtggcttccttggcgttcgcccaaagaatcaaccaatcgctaccgaagagaagtctaaaaaattcaagaagaagcagcaggggaagaggcggacccaaggggaaatcacgaaagagcgcgaggacgaatgttttagctgcggggatgccggtcaactcgtgtcatgtaagaaaccgggatgtccaaaagtgtatcacgccgattgtttaaaccttaccaagcgcccagccggaaagtgggaatgtccttggcaccaatgcgatatctgcggtaaagaagccgctagtttctgtgaaatgtgccccagcagtttctgtaaacaacatagggaaggcatgctgttcatcagtaagttggacgggagactcagctgcactgagcatgatccttgcggacccaacccgcttgaacctggtgaaattcgcgaatatgttccaccaccggttcctttaccccctggcccttctacgcatctggctgaacaaagtacagggatggcggctcaagctcccaagatgtcagataagccccctgcggacacaaatcagatgctcagcctcagcaagaaggcacttgcaggcacctgccagcgccctctactccctgaacgtccattggagagaaccgactctcggccacaaccactcgacaaggtgagagacctcgcaggctccgggaccaaaagccaaagcctcgtgtcatcacagcgacccctggatagacctccagctgtggctggtcctcgaccccagttgtcggacaaaccttctcctgtgactagcccatcttcctccccatccgtgcgcagccaacctcttgagcggccacttggcactgcagacccccgactagacaagtccataggggctgccagtccccgacctcagtcactcgaaaagacttctgtgccaaccgggctgcgattgcctccccctgatagattactgatcacgtcgtcgcctaaaccacagaccagtgatcgacccaccgacaagccccacgccagtctgtcccaacgcttgccccctccagagaaggtgctaagcgctgtcgtccaaacacttgtagctaaagagaaagccctgcgcccagtcgaccagaacacccaatccaaaaaccgggctgcactggtcatggatttgatagacctgacccctagacaaaaagaacgcgcagcatctcctcaccaagtcaccccacaggcagacgaaaagatgccagtcttggaaagcagttcctggccagcctcaaaggggctcggacatatgcctcgagccgtcgagaagggttgcgtctcagaccctctgcagacatcaggaaaagccgctgcccctagtgaagatccctggcaggctgtgaaaagcctgactcaggctaggctgctgagtcagccacccgctaaagccttcttgtatgagcccaccacgcaggcaagcggccgagcgtcagcaggcgcagagcagacaccaggacctctttctcaaagccccggactcgtcaagcaggctaagcagatggtcggaggacagcagctgccagccctggccgctaaaagcggccagagctttcgcagtctcggcaaggcacctgcgagtctcccgaccgaggaaaagaaacttgtgaccactgaacagtctccttgggcgctggggaaggcatcatcgagagctggtttgtggccaatcgtggccggacagacattggcacagtcttgttggagcgccggttcaacccagaccctcgcacagacttgctggagtctgggtcggggtcaggacccaaagcccgagcagaataccctgccagctcttaatcaggcaccatcctcccacaagtgtgccgaaagtgagcagaaata

SEQ ID NO: 233072 - DNA, 7283 bp, synthetic construct
  misc_feature 1..7283: note = Description of Artificial Sequence: Synthetic coding sequence
  source 1..7283: mol_type = other DNA
atgccactgaagacacggaccgcgctgtctgacgatcccgatagcagcactagcacgctaggtaacatgctggagctccctggaactagcagtagtagtacgtctcaagaactacccttttgccagcctaaaaaaaagagcacaccactgaagtatgaggtcggggatctgatctgggcaaagtttaagaggcgaccttggtggccttgccgcatctgtagtgatcctctgatcaacacccactccaagatgaaggtatctaatcgcagaccctaccgccagtactacgtagaggcctttggggacccatcagagcgagcttgggtcgccggaaaggccatcgtgatgttcgagggacggcatcagtttgaggagctgccagtgctgcgcagacgcggaaagcagaaggaaaagggatacagacacaaggtgccccaaaagatactatcaaaatgggaggccagcgtgggcctggcagagcaatatgacgtcccaaaaggatccaaaaatcgcaagtgtatacctggcagtatcaaactggatagtgaagaggacatgccatttgaagactgtacaaacgaccccgagtcagagcatgatctcctcctgaacggttgtctgaagtcgctcgccttcgacagcgagcactcagccgacgagaaagaaaaaccctgcgcaaaatctcgagctaggaaatcctccgacaatcccaaacggacctccgtgaaaaaaggtcacattcagtttgaggcacataaggatgaacgtcggggtaagatacctgagaacctcggactgaacttcatttctggggatataagcgatacacaggccagtaacgaactctctagaattgccaactctctcacaggctcaaataccgctccaggcagtttcttattctcatcttgtggtaaaaacaccgccaaaaaagaattcgaaacctctaatggcgacagtcttcttggattacctgagggcgcactgatctccaaatgctctagagaaaagaacaagccacagcgcagcctcgtctgcggatcgaaggttaagctgtgttatattggagcaggtgatgaagagaaacggtcagacagtatcagcatctgtacgacatcagacgatggaagtagtgacctcgacccaattgagcacagtagcgagtccgataactctgtgttggagatccctgacgcgttcgatcgaacagaaaacatgttgagcatgcagaagaatgagaaaatcaaatattctcgattcgctgcaactaacacacgggtaaaggcgaaacagaagcctcttatatccaatagtcacaccgatcatttgatgggatgcacaaagagcgctgagccgggaaccgagaccagccaggttaacctcagcgacctgaaagctagcaccctcgtgcataagccgcaatcagactttacaaacgacgccctgtcgccaaagtttaacctgtcttcaagcatttcaagcgaaaattccctgatcaagggtggtgccgcaaatcaggccctgctgcattcgaagtccaagcagccgaagttcagatcaatcaaatgcaagcataaggagaatcctgtcatggccgagccaccggtgattaacgaagaatgttcactgaagtgctgctcttctgacaccaagggttcaccactggcctccatcagcaagagtggaaaggtggacggactgaaattgctgaataacatgcatgagaagacaagggacagttcagacattgagaccgcagtggtgaaacatgtgctctccgagctgaaagaactctcctatcgctcgctgggcgaggacgtttccgatagcggcactagtaaaccttcgaagccattactgttctcctctgcctcaagccagaaccacatacctatcgaacctgactacaagttctcaactcttctcatgatgctgaaagatatgcatgactccaagaccaaggagcagcgattgatgacagcacaaaacctggtgagctacaggtctccaggtcgaggcgattgtagtactaacagtcccgtgggcgtttctaaagtgctcgtgtctggcggatctacccataacagtgagaagaagggggatggcacacaaaacagtgccaatccaagtccctctgggggagactctgcactgagcggagagctgtcagccagtctgccagggctactgtccgataaaagagatctgccggctagtggtaagtcccgatccgattgcgtcacacgccgtaactgcggtcggtctaaaccttcaagcaaactgagagatgctttcagcgcacagatggttaaaaacactgtgaaccgtaaggccctgaagaccgagaggaaacgaaagctcaaccagttgcctagcgtgacactggacgctgtcctgcagggtgacagagagaggggagggtcccttaggggcggagccgaggaccctagcaaagaggatcccctgcaaatcatgggccacttaacttcagaggacggagaccattttagcgatgtccacttcgactccaaagtaaagcagagtgatcctggcaaaatcagcgaaaagggcctgagcttcgagaatggaaagggccctgagctggactcagtgatgaattctgagaatgatgagctgaacggcgtgaatcaggtcgttccaaagaaaaggtggcagagacttaaccagcgccgtactaaaccacgaaagcgcatgaacagatttaaggagaaagagaacagtgagtgcgcctttcgcgtgctcctcccaagcgaccccgtgcaggagggtcgagatgaattcccagaacataggacccctagtgcttccatcttagaagaacccttgactgaacagaatcacgccgactgtctggactctgcaggccctcggctgaatgtgtgtgacaaatccagcgcgagcattggagatatggaaaaggagcccggaatcccctccctgactccacaggcagagctgcctgagcccgcagtgagatcggaaaaaaaacggttgagaaaaccttcaaaatggctccttgagtacaccgaagaatatgatcagatcttcgctcccaaaaagaagcagaaaaaagtccaagaacaggtccacaaggtatccagccgatgcgaggaggaaagccttttggcgagaggacgctctagcgcacaaaacaagcaggttgacgagaactcactgatctccaccaaagaagaaccacctgtattggagagggaagctccgttcctggagggacccctggcacaatccgagttgggcggaggtcacgcagagctcccccagcttaccctgtcagtccctgtcgcacccgaagtgtctccacgcccagcgctggaatcagaggaactcttagtgaagacgccaggaaactacgagtcaaaacggcagcgtaaaccaactaaaaaactcttggagtctaacgatctggacccaggattcatgccgaagaagggcgatttggggttgtccaagaagtgctatgaggcgggacacctcgagaacgggattactgaatcttgcgccacttcatatagcaaggattttggcggtgggactactaagatattcgacaagcctaggaagcgtaagagacagcggcacgccgcagcaaagatgcagtgcaagaaggtgaagaacgatgacagctcaaaagagattcccggaagcgagggcgaactgatgccccaccggaccgcaacctcaccaaaggaaacggtagaagagggtgtggagcacgatcccggtatgccagctagtaagaaaatgcagggcgaacggggaggcggtgccgctctgaaagagaatgtttgtcagaactgtgagaagttgggtgagctcctgttgtgtgaagctcagtgctgcggcgcatttcatctcgaatgcctaggtctcacggaaatgccgagaggaaaatttatttgcaatgagtgtaggaccggtatacatacgtgctttgtctgtaagcagtctggcgaagatgtgaagaggtgcttattacccctctgtgggaagttctaccacgaagaatgcgtccagaagtatcccccaaccgtcatgcagaacaaaggcttccgttgttccctgcatatctgtattacctgccacgctgccaatccagcaaacgtcagtgctagcaaggggcgtctgatgcgctgcgtgagatgcccggttgcttatcatgccaacgatttttgcctggccgctgggtccaagattctggcctccaacagcatcatctgcccaaaccacttcacaccaagaagaggttgtcggaaccatgaacacgtgaacgtttcctggtgctttgtttgtagtgaaggtggcagtctgctatgctgcgacagctgtcccgctgcattccaccgcgaatgcctaaacatcgacatcccggagggtaactggtattgcaatgactgtaaggccggtaagaagcctcactaccgcgagatcgtgtgggtcaaggtgggtcgataccgctggtggccggctgaaatatgccacccaagggcagttccatccaacatagacaaaatgagacatgatgttggggagttccccgtcctgttttttggatctaacgattacctttggacccatcaagctcgagtgtttccatacatggagggcgatgtgtcctccaaagataaaatgggcaaaggagtagacggcacttataaaaaagccctccaagaagctgcagccagattcgaggagctcaaggcccagaaggaactccggcagctgcaagaggacaggaaaaacgacaaaaaacctcccccatacaagcacattaaggtgaaccgtccaattggacgggtgcagatctttacagcggacctgagcgagataccccgatgcaactgtaaggcaaccgatgagaacccctgtggcatagatagtgagtgcataaacagaatgcttctctacgaatgccatcctactgtctgtccagctggcggaaggtgccagaaccagtgtttcagcaagcgacagtaccccgaagtggaaatcttccgcactctgcagagaggatgggggctccggacgaagactgacatcaaaaagggcgagtttgtaaatgaatacgttggagaactgattgacgaagaagagtgtcgcgctagaatacgctatgcccaggagcacgacatcactaatttctacatgttgacactggataaagatcgcatcattgatgcaggacccaaaggcaattacgccaggtttatgaatcactgttgccaacccaattgtgagacacaaaaatggtcagtaaatggcgatacccgagttggattatttgccctcagcgacatcaaggctggaacagagcttacctttaattataacctggaatgcctaggaaatggcaaaaccgtttgtaagtgcggcgctcccaattgcagcggcttcttgggcgttagacctaaaaatcagccgatcgcaactgaagagaagtccaaaaagttcaagaagaagcagcaggggaagcgacgcacccagggcgagattactaaagagcgcgaggatgaatgtttctcatgtggagacgccggtcaactcgtctcctgcaagaaacccggatgcccaaaagtttatcacgccgactgccttaacctgacgaagagacccgcagggaagtgggaatgcccttggcaccagtgtgacatctgcggcaaggaggcggcaagcttctgcgagatgtgccctagttcattctgtaagcaacatcgagagggtatgctttttatctccaaactggatggtaggttgtcttgcacagagcatgatccttgtgggccaaaccccctcgagccaggggaaatacgagagtacgttccccctcctgtgccacttcctccaggaccaagtacccatttggcggaacagtcaacgggtatggccgctcaggctcccaaaatgagcgacaagccgcctgccgacacaaaccaaatgctctctctgagcaaaaaggccctagcgggaacttgccagcggccactgctccccgagagaccgctggagagaacagactcccggccacagccactggataaggtcagagacctggctgggtcagggaccaagtcccagtcgctcgtgtccagtcagcgccctctcgatcgcccaccggcagtagctggaccaaggccgcagttgtccgacaagccttctcctgttaccagtcctagctctagcccctctgtgcggagccagccacttgagagaccattgggaacggctgatcccaggctggacaaaagcatcggtgccgcttcaccgagacctcaatctttggaaaagacctctgtgcccacgggactccgcctgcccccaccagataggctactcattacatcgtcccccaaacctcagacttctgaccggcctactgacaagccacatgcttccctctcgcagaggttacccccaccagagaaagtactgtccgccgtcgtacagacgttggtggcgaaagaaaaggcactccgaccggtggaccaaaacacacaaagcaaaaatcgagccgcattggtcatggatctgatagatctaacccctagacagaaggagcgtgccgcttccccccaccaagtgacacctcaggccgacgaaaaaatgccagtcttggaaagttcaagttggccagcctccaaaggtctgggacacatgcctcgggcagttgaaaagggctgtgtcagtgaccctctccagaccagcggaaaggccgcagccccaagcgaagacccttggcaggctgtcaaatccctcacacaagccaggctcctgtcgcagccacccgctaaagccttcctgtatgagcctactacgcaggcaagcggtcgtgcctctgcaggggcagagcagactcccggtcccctcagccagtcccccggattggtgaagcaagcgaagcaaatggtgggtgggcagcaacttccggctctggctgccaaaagcggacagtcatttaggtcccttggcaaggcgccagcctctttgccgaccgaggagaagaaactggtgacaacggaacagtctccgtgggctctggggaaagcttcaagccgcgctggcttgtggcctatcgtagccggacaaacccttgcacagagttgctggtctgcaggctcaactcagaccctagcccagacttgctggagtctgggaagaggtcaggatcccaagcccgaacaaaacaccctgccggcactgaaccaagccccatcctcccataagtgtgcagaatccgagcaaaagta

SEQ ID NO: 233073 - DNA, 1692 bp, synthetic construct
  misc_feature 1..1692: note = Description of Artificial Sequence: Synthetic coding sequence
  source 1..1692: mol_type = other DNA
atgcctttgaagaccagaacagccttgagcgatgatccggacagctccacctctacgttggggaatatgctggagctgcctggtacaagctcaagttcgacttcccaagagctgcccttctgtcagcctaaaaagaaatccaccccgctgaaatatgaggtgggggacttaatctgggccaaatttaagcggaggccttggtggccttgccgcatatgttctgaccccctgatcaacacacactcaaagatgaaggtgtcaaatagacggccttatagacagtattacgtggaggcatttggggatccctctgagagggcttgggttgctggaaaagcaattgtgatgtttgaaggcagacaccagtttgaggaactgccggtcctgagaagaagaggcaagcagaaggagaagggttaccgacacaaggtacctcagaaaattctgagcaagtgggaggcctcagtgggcctagcggaacagtacgatgtgccgaagggctccaagaatcgcaaatgcattccaggtagcattaagctggacagtgaggaagacatgccatttgaagactgcacaaacgaccctgaatcggagcacgatctgttgctcaacggatgtcttaaaagccttgccttcgactccgagcactcggcagacgagaaggaaaagccctgtgctaaaagccgagccagaaaatcatcagacaacccaaaacggacttctgttaagaagggacacatacaatttgaggcacacaaagatgaaaggaggggcaaaatccctgaaaacctaggtctgaactttatttcgggtgatattagtgacacccaagcaagtaatgaactcagtcgtatcgccaattcactaacaggctcaaacacagcacctgggtcatttttattttcttcctgcgggaagaacaccgctaaaaaagaattcgagacctccaatggagatagcttgctgggcctccctgaaggcgcactaatctcaaagtgcagtagagagaaaaacaaaccgcaacggagcctagtgtgcggttcgaaagtgaagttatgctatatcggcgctggtgacgaggagaaacggtcagattctattagcatctgcacgacttcagatgacggctcctctgacctggaccctatcgagcactcatctgaatcggacaatagcgtgctcgaaatccccgatgcattcgatcggactgagaacatgctgtcaatgcagaagaacgagaaaatcaagtattcgaggttcgccgcaaccaatacgcgcgtgaaggcaaagcaaaagccgctgataagcaactcacatacagaccatttgatgggctgtactaaatcagccgagcccggtactgagaccagtcaggtgaaccttagtgatctcaaggccagcactctcgtacataaaccacagtcggattttacgaatgatgcccttagtcctaaatttaatctgagttcctctatctcttcagagaacagcttgattaagggaggtgccgctaatcaggcactgctgcactccaaatccaagcagcctaagttccgctccattaaatgcaagcacaaggagaatcctgtcatggcagaaccacccgtaatcaatgaggagtgttctctgaaatgctgctctagtgatacaaaggggagccccctggcttcgattagcaaaacacctccctag

SEQ ID NO: 233074 - DNA, 7781 bp, synthetic construct
  misc_feature 1..7781: note = Description of Artificial Sequence: Synthetic coding sequence
  source 1..7781: mol_type = other DNA
atggatcagacatgcgaactgccgagacggaactgcctcctcccatttagtaacccagtaaatctcgatgccccagaggataaggactcccccttcggcaacggccagtcaaacttctctgagccactgaacggatgtacgatgcaactctcaactgtgtccggtacatcacaaaacgcctatggtcaagactccccctcttgctacatccctctgaggcgcctgcaagacctggccagcatgatcaatgtcgaatacctaaatggcagtgccgatggatccgaatcctttcaggacccagaaaaaagtgattctcgcgctcagacccccatagtctgcacctcattgtcaccaggcggtccgaccgccctcgccatgaagcaggaaccaagctgtaataattctcccgagctgcaagtcaaggttacgaagaccatcaagaatgggttcctccatttcgagaattttacctgcgtcgatgacgctgacgtggattccgaaatggatcccgaacaaccagtaacagaggatgaaagtatcgaggaaatctttgaggagacacaaaccaacgccacatgcaattatgagaccaaatccgagaacggagtcaaggtcgctatgggaagcgaacaagacagcacccccgaatcacggcacggggctgtcaaatccccattcttacctctggcaccccagacagaaactcagaagaataagcaacgtaacgaggtcgatggtagcaacgagaaggctgcactgctgcctgccccattctctctcggggacaccaacattacgatagaagaacagctgaacagcattaatttgtcttttcaggatgaccctgacagttcgacatccaccctgggaaacatgctggagctgccaggaaccagctcaagctcaaccagtcaggaactgccatttgttccacagaagatccttagcaagtgggaagcatctgttggactggccgagcaatatgacgtccccaaggggagcaaaaatagaaagtgtattcctggatcaataaaactggacagcgaggaagacatgcccttcgaggattgtactaatgacccagagtccgagcacgatctcctgcttaatggatgcctgaagtctctcgcatttgactccgaacactcagccgatgagaaggagaaaccctgtgccaagagccgcgcacgaaaaagctccgataatccaaagcgaacctccgtgaaaaagggacacattcagttcgaggcccacaaagatgagagacgcggtaagattccagaaaatctgggcctgaattttatcagcggagatattagtgacacgcaggctagtaatgagttgtccagaatcgctaacagcttaaccggcagcaacacagcaccaggctctttcttgtttagtagttgtggaaaaaacaccgccaaaaaagaatttgagacatctaacggggatagcttgctgggtctcccagagggtgctctgatcagcaagtgctctagggaaaaaaacaaacctcaacgatcattggtgtgcggcagcaaagtgaaactctgctacatcggagccggtgacgaggagaaaaggtctgactctatctctatctgtactacctcggatgatggatcctcagacttagaccccattgaacattcctcagagtctgataatagcgttttagagatcccagatgccttcgatagaactgagaacatgctgtccatgcagaaaaatgagaagataaagtatagccgatttgcagctacaaacactcgcgtgaaagcaaaacagaagccactcatctccaatagccatacagatcacttgatgggctgcacaaaatccgccgagcctggcacagaaacctctcaggtgaatctgtcagatctcaaagcaagcactctggtgcataagccacaatcagattttacgaatgacgcgctgtccccaaaattcaatttgtcgtcatcaatttcatctgagaactcattgatcaaggggggtgcagctaaccaggcgctgctgcattccaagagcaaacaacctaagttccgcagtataaaatgtaaacacaaggaaaatcccgtcatggccgagcctccggtcatcaacgaagaatgttcgttaaagtgttgttcttccgatacaaagggatctccgctggctagtatcagcaagtctggaaaggtcgacggcctgaagctcctgaataatatgcacgaaaagacaagggactcgagcgatatcgaaaccgctgtcgttaaacatgtgctgtccgaactgaaagagcttagctacagaagccttggcgaggatgtgagcgacagcggcacatccaagccctccaagccattgctcttctccagcgccagcagccagaatcatatccccatagagccagactataagtttagtactctgttgatgatgctcaaagatatgcacgacagcaagactaaagaacaacggctcatgaccgcacagaacctggtgtcatatcgatctcccggacgcggagactgctcaaccaattctcccgttggagtttcaaaggtattggtgagtggaggatctacgcacaacagcgagaagaagggggatggcacccaaaattccgctaacccatcgccatccgggggagatagcgctctgtctggtgagctctccgcaagcctccctgggttgttgagcgacaagagagatctgcccgcatcaggaaaatctcgctccgactgcgtcaccaggaggaactgtggcagatctaagccgagctctaaactgcgcgatgctttttctgctcagatggtgaaaaacacagtaaacagaaaggctctcaaaacagaacgtaaacgcaaactgaaccagttaccatctgttacacttgacgcggtcttgcagggcgatagagagcgcggtggttccttacgagggggagctgaggatccttccaaggaagaccccctgcagatcatggggcatcttacatccgaagatggggatcacttctctgacgtgcattttgacagcaaagtaaagcagtcagatccaggaaaaatctccgaaaaaggtctctcgtttgaaaatggtaagggtccagaactcgactcagtgatgaatagcgaaaatgatgaacttaacggagtgaatcaggtggtccccaaaaaaagatggcagaggttaaatcaacgtagaaccaaacccaggaagcggatgaaccgtttcaaggagaaggaaaactctgagtgtgcgtttagggtgttgctccccagcgaccccgtgcaagagggacgggacgagttccctgaacaccgcaccccctccgcctctatactggaagagcccctgactgagcagaatcatgcagactgccttgacagcgccggtcctaggcttaacgtgtgtgacaaaagctcggcatcaatcggtgacatggaaaaagaacctggcattcctagcttgaccccccaggccgagctgcctgagccagctgtgaggtctgaaaaaaagaggctgcgtaaaccgtcgaagtggctcttggagtacaccgaagagtacgaccagatcttcgcacccaaaaagaaacaaaagaaggtgcaggaacaggtacacaaggtgagctcaaggtgcgaggaagagagcctcctagccagaggacgttcgagtgcccagaacaaacaggtggatgaaaactcattaatcagcacgaaggaggagccaccagtgctggaacgtgaggcccctttcctcgaaggcccactggctcagtcagagttaggcggaggacacgcagagctcccacagctaacattatccgttcctgtagctccggaggtgtcaccccgaccagcgttagaatccgaagagcttttggttaagacacctggcaactatgagtccaagcggcaaagaaagcccactaaaaaactacttgaatcaaatgatctggacccaggattcatgcctaaaaagggggacctggggttatctaaaaagtgttatgaggccggtcacttggaaaacggcataactgaatcttgcgccaccagttactcaaaagattttggcggaggcaccaccaagattttcgacaaaccccgtaaaagaaaaagacagcgacacgctgccgcaaaaatgcaatgtaaaaaggtcaagaatgatgactcaagtaaggaaatcccaggatctgagggcgagttaatgcctcaccggaccgctaccagccctaaagaaaccgttgaggaaggggttgaacacgatccaggaatgcccgcatctaaaaagatgcagggagaaagaggaggaggggctgcactgaaagagaacgtctgtcagaactgcgaaaagctgggggagcttctgctctgcgaggcccagtgctgcggggcattccatttggaatgtctcgggctgactgagatgccacggggaaagtttatctgtaatgagtgtcgtacagggatccatacatgcttcgtttgcaagcaatccggagaggacgtcaaacgctgcctactacccctgtgcggtaaattctaccatgaggagtgcgtgcaaaagtacccccctacagtgatgcaaaacaaaggctttcgctgcagcctccatatttgcattacctgccatgcagccaacccggctaatgtgagcgctagcaaaggtagactcatgcgttgcgtcagatgcccggtggcttatcatgccaatgacttctgcctggccgctgggtctaagatcctcgccagcaatagcatcatctgccctaaccactttacacccagaagaggctgtagaaaccatgagcatgtgaatgtgagctggtgtttcgtttgctctgaaggcggtagtcttctttgctgtgactcgtgtccagccgctttccacagagagtgccttaatattgacattccggagggcaattggtactgcaacgattgcaaggccggaaagaagccccactatagggagatcgtctgggtcaaggtgggaaggtatagatggtggccggcagaaatctgtcatcctcgcgctgtcccaagcaatatcgataaaatgcggcatgacgtgggggaattcccagtgctctttttcggatcaaacgactacctgtggacacatcaggcccgagtttttccatacatggaaggcgatgtgagtagtaaggataaaatgggcaaaggcgtggacgggacttacaagaaggccctgcaggaagcggcagcacggtttgaggaattaaaggctcaaaaggaactcaggcagctgcaggaagatcgcaagaatgacaagaaacccccaccatacaaacatatcaaagtaaacagaccaatcggccgtgttcaaattttcacagcggatctgtccgagatacctcggtgtaactgtaaggctactgacgaaaacccctgcggaatcgatagcgagtgcataaaccggatgctgctgtacgagtgccacccaaccgtgtgccctgctggaggtcggtgccaaaatcaatgtttttctaagcgacaataccctgaggttgagatctttcggactctgcaacggggttggggcctgcgcactaagaccgatatcaaaaaaggagagttcgtgaacgagtatgtgggcgaactgatcgatgaagaggagtgtagagctagaatccgctacgcacaagagcacgatatcaccaacttttatatgctgacgttagacaaagaccgcataatcgacgcaggccctaagggaaactatgctagattcatgaaccattgttgccagcccaactgcgagacccagaagtggtcagtcaatggggacacccgggttgggctctttgcattgagtgatattaaggccggaaccgagctgacttttaattacaatctcgagtgtcttggaaacgggaagaccgtctgtaagtgcggagcgccaaactgcagtggctttttgggtgtcagacccaagaaccagcccatcgcgaccgaggagaaaagtaaaaaattcaagaagaagcagcagggcaaacgacggacacagggagaaatcacaaaggagagagaggatgagtgcttctcatgcggcgacgcagggcagctggttagttgtaagaaacccggatgtccaaaggtgtatcatgccgattgtctgaacctcacaaaaagacccgcaggcaaatgggaatgcccctggcaccaatgcgatatatgtggtaaggaggcagccagtttttgtgaaatgtgtcccagcagtttctgcaagcagcatcgggagggaatgttgttcataagtaaactcgatggacggcttagctgtactgagcacgacccctgtggccctaatcctttggagcccggagaaatccgggagtatgtcccaccaccggtcccacttcctcctggaccaagtacccacctggccgagcagtctaccggaatggcggctcaagcccctaagatgagcgacaaacctcccgctgatacaaaccaaatgttatccctgagcaagaaagctctagccggaacctgccagagaccactgctccccgagaggccacttgaaagaacagactcaaggccgcagcccctagataaagtcagggacctggctggatcgggcacaaagtctcagtccctggtcagcagtcagcggcctctggaccggcctccagccgttgccggaccgaggccccaacttagtgataagccatcacccgttacctcaccgtcaagtagcccttctgtccgctcccagccactggagcgtcccctgggcaccgccgaccctcgactcgataagtctatcggggctgcttctccgagacctcagagcctggagaaaacatccgttcccactgggctgcgtctgccaccacctgacagattactcataacatccagcccaaagccccagacaagtgaccgcccaacggataagccgcacgcatccctgagccagagactccccccaccagagaaggttctgtcggctgtcgtgcagactctcgtcgcaaaggagaaggcactgcgcccagttgaccagaacacccaaagtaaaaatagggccgctcttgtgatggatctgatagacctgacccctagacagaaagagcgcgctgctagtcctcaccaggtgactccacaggcagacgagaaaatgcctgtcttggagtccagcagttggccagcttcaaaaggactaggtcacatgcccagagcggtggaaaaaggctgcgtgagcgaccccctccagacttcagggaaagccgctgcgcctagcgaagatccatggcaggctgtcaaaagcctgacccaagctaggcttctgagccagccccctgctaaggccttcctgtatgagccaactacgcaggcctcggggcgtgcaagcgcaggcgctgagcaaacacccggtccgctctcacaaagcccaggcttggttaaacaagcaaaacagatggtgggaggccagcagttacccgctctcgccgcaaaatccgggcagagtttccgaagtctaggcaaggctcctgcatcattgccaacagaggagaaaaagctcgtaacaaccgagcaaagcccgtgggcgctggggaaagcatcatcccgggcaggcctgtggccaatcgtggccggtcaaaccctggctcaatcatgttggtcagcaggatccacccagacccttgctcagacatgctggtccctcgggagaggccaggacccaaagcctgagcagaacactctccccgctctgaatcaggctccttcctcacataagtgtgccgagtccgaacagaagta

SEQ ID NO: 233075 - DNA, 8090 bp, synthetic construct
  misc_feature 1..8090: note = Description of Artificial Sequence: Synthetic coding sequence
  source 1..8090: mol_type = other DNA
atggaccagacgtgtgagctgcccagacggaactgcctcttgcccttttccaatcctgtgaacctcgatgcacctgaggacaaagacagtccatttgggaatggtcaatccaactttagcgagccgttgaatgggtgcacaatgcagctaagcaccgttagcgggactagtcagaacgcctatggacaggacagtccatcctgttacatccctctgagaagactccaggacctggcgtcaatgattaacgtggaatacttgaatgggtccgcagacgggtcggagtcatttcaggacccagagaaatccgactcccgggctcaaactcctatcgtctgtacttccttgagccccggtggcccaactgcccttgccatgaagcaggagcctagctgtaacaacagtccagaactacaagtgaaagtgacaaagactatcaagaacggctttctacactttgagaattttacctgcgtcgacgatgcagacgtggatagcgaaatggaccccgaacagccagtgaccgaggatgaaagcattgaggagatcttcgaggagactcagaccaatgcgacttgtaattacgagacgaagtccgaaaatggcgttaaggtggccatggggagcgagcaggactcgactccagagagtcgccacggtgccgtgaaatccccgttcctcccacttgcaccacagacggaaacgcaaaagaataagcagcggaatgaagtggacggatccaacgagaaagccgctcttctgcccgcaccattcagccttggggacaccaacattacaattgaagagcagctcaattccatcaacctgagttttcaggacgaccccgactcctcaacgtctacgctaggcaacatgctggaattgcctggcacgtcctcctcctctacaagtcaggaacttcccttttgtcagcccaaaaagaagtccacacctctgaaatacgaggttggcgacctgatttgggccaaattcaagcgccgtccctggtggccttgtcgcatctgttctgatccacttataaatacccacagcaaaatgaaggtgagtaacagaagaccatatcggcagtactacgtagaggcctttggtgatccctccgagagagcatgggtcgcgggtaaggccatagtgatgttcgagggcagacaccagtttgaagagcttccggtcctgaggcgaagaggcaagcagaaggaaaagggctaccggcataaggtccctcagaagatactgtctaaatgggaagcctctgtgggcttagccgaacaatatgatgtgccgaaagggagcaagaatcgcaagtgtattccaggatctattaagctggacagcgaggaggatatgccctttgaagactgcactaatgatcccgagagtgaacacgatctcctgcttaatgggtgcctgaagagcctggcattcgactctgagcattctgccgacgagaaggaaaagccttgcgctaagtccagggctcgcaaaagtagtgataacccaaagcggacatctgtgaagaagggccacatacaattcgaggcacataaggatgaacgcagaggaaagatccccgagaatctaggactcaactttatttctggagatatttcagatactcaggcctctaatgagctcagtagaattgctaacagcctcaccggtagcaatactgcacccggatcctttttgttttcatcttgtggtaagaacaccgctaagaaggagttcgagacatccaacggtgatagtctgcttggcttgcccgagggggctcttatcagtaagtgtagtcgcgagaaaaataaaccacagagatcccttgtatgcgggtcaaaggtgaaattgtgttacataggggcaggcgacgaagaaaaacgaagcgattctatcagcatctgcactacttcagacgacggatcgtccgatttagatcccatagagcactccagcgaaagcgataacagtgtcctagaaatccctgatgcgttcgacagaactgaaaacatgcttagcatgcagaagaacgagaaaatcaaatactctcggtttgcagccaccaatacaagggtgaaggctaagcagaaaccccttatctctaattctcatactgatcatttaatgggatgcaccaagtccgcggaacctggtacggagaccagccaggtgaacctgtctgatctgaaagcatccaccttggtccataaaccacagtcggactttacgaacgacgctctttctccgaaattcaatctgtcctcctccatctcctccgaaaatagtcttattaaaggaggtgcagctaatcaggccctcctgcacagcaagtcaaagcaacctaaatttaggtccatcaaatgtaaacacaaagaaaatccggttatggcagagcccccagtgattaatgaagagtgtagcctgaagtgctgttcttctgacaccaagggaagccccctggcgagtattagtaagtccggaaaagttgacggtcttaagctactgaataacatgcacgaaaagactcgcgattcgagcgacatagagacggccgtggtgaagcacgttctgtctgaattgaaggagttatcataccggtcattaggagaagatgtgtctgactccggcacctctaagcctagcaaaccattgttgttctccagcgctagtagccagaaccatatacccattgaaccagactataaattcagtactttgctgatgatgcttaaagatatgcacgactctaaaactaaagagcagagattaatgacagcacagaaccttgtatcctatagatcaccagggcgtggcgactgcagcaccaattcacctgtgggcgtctctaaggttctggtgtccgggggtagtacacacaattcagagaaaaagggcgacggtacccagaattcagccaatccatcacccagtggcggagacagtgcactgtctggggaactgagtgcgtcccttcccggactgctctccgacaaacgggacttgcccgctagtggaaaatctaggagtgattgcgttacgagacggaactgcggacgctcgaaaccgtccagcaaactgcgcgacgcattctctgcccagatggtcaagaatacagtgaaccgcaaggccctaaagacagagcgcaaacggaagctgaatcagcttccgtccgtaacactggacgcagtcctgcagggagatcgggagcgagggggaagcctgaggggaggggcagaagatcccagcaaggaagacccgttgcaaattatggggcacttgaccagcgaggatggagaccacttctccgatgttcatttcgatagcaaagttaaacaatccgaccctggcaagattagcgaaaaagggctatctttcgagaatggcaaaggccctgaactcgatagtgttatgaatagtgaaaatgatgaacttaatggggtgaatcaggtagtgccaaaaaagcggtggcagagactgaatcagaggagaacaaagccaagaaagcggatgaatcgtttcaaagagaaggaaaatagcgagtgcgcctttcgcgttttgctaccaagtgatcccgtacaggaggggcgagacgagtttcccgagcaccggactccgtcagcctccatcctcgaagagccacttactgagcagaatcacgctgactgtctcgattctgctggtcctagactcaatgtctgtgacaagagctccgcctccattggagatatggagaaagagcctggcatcccctccctgaccccccaggcggaactgccggaaccggctgtgaggagtgaaaaaaagcgactgagaaagccctccaagtggttgctcgaatacaccgaggaatacgatcagatttttgctcccaagaagaaacagaaaaaggtgcaggagcaagtccacaaagtgtcttcaagatgtgaggaggaatccctgctcgccagaggaagatctagcgctcagaataagcaagtggacgagaactctcttatttccaccaaagaggagcccccagtgctcgaacgggaggctcccttcctagaaggacccttagcccaatctgagctcgggggaggccatgcagaattgccgcagttgacactaagcgtgcctgttgcccctgaggtgagccctcggcctgcgctggagtccgaggaactactggttaagacccccggtaattatgagtccaagaggcagcggaagcccaccaaaaagctcttggaatcgaacgatctagaccctggattcatgccaaagaaaggcgacctagggctttcaaagaagtgctacgaagccggacatttggagaacgggataaccgagagttgcgctaccagctattccaaagatttcggcggaggtactaccaagattttcgacaaaccacgaaagaggaagagacagaggcacgccgctgctaagatgcaatgtaagaaggtgaagaacgacgattcttcaaaagaaattccaggctctgagggagagctcatgccacacaggacagcgacctccccgaaggagaccgtggaagaaggagtggagcacgatcctggcatgccagcgagcaaaaagatgcagggggagaggggaggcggagctgcacttaaggaaaatgtgtgccagaattgtgagaaactgggcgagttactgttatgcgaggcacagtgctgtggtgcctttcaccttgagtgtcttgggctcactgagatgcctcggggtaaattcatctgcaatgagtgtcgcactgggatacacacatgcttcgtttgtaaacagtccggcgaggacgttaaaagatgtctcctgcccttatgcggtaaattttatcacgaggagtgtgtgcagaagtatccacccacagtaatgcaaaacaagggattccgctgctccctgcacatctgtatcacatgccatgccgctaacccagccaacgtgagcgccagcaagggcaggttgatgaggtgtgtgagatgtcctgtcgcttaccatgctaacgacttttgcttagcggcaggatctaaaattcttgctagtaacagtatcatctgccccaaccattttacgcctcgaaggggctgtcggaatcacgagcacgtcaacgttagttggtgtttcgtgtgctccgaaggagggtcgctcctgtgctgcgacagctgtcccgcagcctttcacagggagtgtcttaatatcgatattcctgaggggaactggtactgcaacgactgcaaagctggaaagaagccccactaccgggagatcgtgtgggtgaaggtcgggagataccggtggtggcccgctgaaatctgccacccaagagctgtcccttctaatatcgataagatgagacatgatgtgggcgagttccctgtgctcttcttcgggtccaatgattatctgtggacccatcaggccagggtttttccgtacatggagggcgatgtgagttctaaggacaagatggggaagggagtggatggcacctacaagaaggctctgcaggaagctgcagctcgatttgaggagcttaaggcccagaaagagctgcgccagttacaagaagatagaaagaacgataaaaaacctcctccctacaaacatattaaggtcaaccggccaatagggagagtccagatctttactgcagatctctctgaaatcccacggtgcaactgtaaggccaccgatgagaacccgtgcggtatagatagtgagtgtattaaccggatgctcctgtatgagtgtcatccaactgtgtgtcccgctggtggcagatgccagaatcagtgcttcagtaaaaggcagtatcccgaggtggaaatttttaggacccttcaacgcggttggggactgcgcaccaaaacggacattaaaaaaggcgaattcgtgaacgaatatgtcggcgaactgatcgatgaggaggagtgtcgagccagaatcaggtatgcacaggaacacgacataaccaacttctatatgctgaccttggataaagatagaatcatcgacgccggtccaaaaggtaactatgctagatttatgaatcactgttgccaaccgaactgtgaaacccagaagtggagtgtgaacggggacactagggtcggtttgtttgccctgtccgatataaaagccggaacggagctcacatttaattacaacttggagtgtctcggtaatggaaagaccgtatgcaaatgcggtgcgcctaattgctctggctttctgggcgtacggccaaaaaatcagcctatcgccaccgaagaaaagtccaagaaattcaaaaaaaaacaacagggaaagagacggacacagggggaaatcacaaaggagcgagaagacgagtgcttcagctgcggtgatgccggtcagcttgtcagctgtaaaaaacccggatgcccaaaagtgtaccatgccgactgcctgaatctcacaaagagacctgcgggtaaatgggaatgcccttggcatcaatgcgatatctgtggcaaggaagcggcttccttttgtgagatgtgcccgtcctcattctgtaaacagcatcgggaaggtatgctctttatcagcaagctggatggaagactctcctgcactgagcacgatccgtgcggcccaaatcctttggaacctggcgagatccgcgagtacgtccccccacccgtgcccttgcctccaggcccttccacacatctggctgagcagtcaaccggaatggccgctcaggcacccaagatgtcagataaaccacccgcagacactaaccagatgctaagtctcagcaagaaagctctggccggtacctgccagaggccacttctcccagagcgaccattagaacgcacggatagtcgaccccaaccactcgataaggtcagggacctggccggtagtgggacgaaaagccagtcactggtttcctcccagcgccctttggatagacccccagctgtggcaggacctcgcccacagctgtccgacaaaccttcgcccgtaacatctccttctagctcccccagtgtccggtcccaacctttagaaaggccactgggaactgccgacccaaggttggacaagtccattggggcagcctcacctcggccacagtcccttgagaagacgtcagtcccaactggtcttcgcttgccacctcccgatcggcttttaatcacctcatcccctaagcctcagacctccgatcgtccaacagataaaccacacgcatccctgagtcaacggctgccaccgccagaaaaggttttgagcgctgttgtgcagacactggtggccaaggaaaaagccctgcgccctgtagatcagaatacccaatctaaaaaccgggcagccctggtgatggacctaatcgatttgactccaaggcagaaggagcgggctgccagcccacaccaggtgacacctcaagcagatgaaaagatgccagttcttgaatcttcgagctggccagcatcgaaaggccttggccatatgcccagagcggtcgaaaaaggatgcgtctcagacccactccaaaccagcggtaaggcagccgctccttcagaagatccatggcaggcggttaagagtctgacccaggcccgattgctaagtcagcctccagccaaagcattcctttacgaacctactactcaggcaagcggaagggcatccgccggagccgaacagacaccagggcctctgtcccagtcccccggtctggttaagcaggctaagcagatggtggggggacagcaattacccgcactggccgctaaaagtggacagtccttccgaagcttggggaaggctccagcctcgctcccaaccgaggaaaaaaagcttgtgactactgagcagagtccttgggccttagggaaagccagttcccgtgcgggtctctggcctatcgtggcaggacagactctcgcccaatcctgttggagcgctggctccacgcagacactggcacaaacttgttggagtcttggccgtgggcaagacccaaagccagaacagaacactctgcctgcactgaaccaggccccatccagccacaagtgcgcagagtccgaacagaagta

SEQ ID NO: 233076 - DNA, 468 bp, synthetic construct
  misc_feature 1..468: note = Description of Artificial Sequence: Synthetic coding sequence
  source 1..468: mol_type = other DNA
atgcccctcaagactagaacggccttgagcgacgatcccgacagctctaccagtacattaggaaatatgcttgagctgcctggaacaagctcatcttccaccagtcaggagctacccttttgccagcctaaaaagaaatctacacccctgaagtatgaagtcggagacctgatttgggctaagtttaagagacgcccttggtggccctgtaggatttgcagtgatccccttatcaacacacactccaagatgaaggtgtcaaatcggagaccttaccgacaatactacgttgaggccttcggcgacccttcagaaagagcctgggttgccggaaaggccatcgttatgtttgaaggcaggcatcagttcgaggaactacctgtactacgtcggcgaggaaaacagaaggaaaaaggataccgtcataaggtccctcaaaaaatattatctaagtgggaggcatcctag

SEQ ID NO: 233077 - DNA, 375 bp, synthetic construct
  misc_feature 1..375: note = Description of Artificial Sequence: Synthetic coding sequence
  source 1..375: mol_type = other DNA
atgcctctcaaaacacgaacagctctgtccgacgatcccgattctagtacctcaacacttggcaacatgctggagctgcctgggacaagctccagtagtacaagccaggaactgccgttctgccagcctaagaagaaatccacacctctgaaatatgaggttggcgatctgatctgggcaaaatttaagcgtcgcccttggtggccctgtagaatatgcagtgatcctctgattaacactcactccaaaatgaaggtcagcaatcggagaccatacaggcagtactacgttgaggcattcggtgacccttccgaacgcgcttgggtcgctggcaaggctatcgtcatgttcgagggacggcatcagttcgagtag

SEQ ID NO: 233078 - DNA, 4200 bp, synthetic construct
  misc_feature 1..4200: note = Description of Artificial Sequence: Synthetic coding sequence
  source 1..4200: mol_type = other DNA
atgtccgggctgggggatagctccagcgaccctgcgaacccagatagccacaaacgaaaagggtcaccatgcgacaccctcgcttccagcaccgaaaagcggcgtcgagaacaggaaaacaagtacctggaagaactggccgagcttctttccgcaaacataagcgatatcgactctttgtctgtgaaaccagacaagtgcaaaatcctgaagaagactgtggatcagatccagctgatgaaaagaatggaacaggagaagtccactactgacgatgacgtgcagaaatccgacatctctagttctagtcagggtgtgatcgagaaagaaagcctcggaccactcctgctcgaagcactggacgggtttttcttcgtagtgaactgcgagggtcggattgtgtttgtgtccgaaaatgtgacttcctatctggggtacaaccaggaagagttaatgaataccagtgtgtatagtatcctgcacgtcggggaccatgctgagttcgttaagaacctgctccctaagtcactcgtcaacggcgtaccctggcctcaggaagccactaggcgaaactcacataccttcaactgtcgcatgcttatccatccacccgatgaacccggtactgagaatcaggaggcatgccagcgctatgaggtgatgcaatgttttacggtgagccagccaaagtccatacaggaggatggtgaagatttccagagttgcttaatttgcatcgccagacggctgccacggccacctgccatcactggggtggagagttttatgacaaagcaggatactacgggcaaaatcatcagtatcgatactagttcattgagagcagctggtcggacagggtgggaggatctggtcaggaagtgtatctatgctttcttccagccacaaggcagagagccatcttacgctcgccagctgttccaggaagttatgacccgcggtacagccagctccccttcatatagattcatcttgaacgacggaaccatgctctccgctcacacaaaatgtaaattgtgttacccccagtctccagacatgcagccctttatcatggggatccacattatcgacagagaacactctggcctgtccccgcaggatgacaccaactctggcatgagcataccgagggtgaacccatccgtgaacccttccatctctcccgctcatggtgtggcccgatctagtacactgcctccatccaactcgaacatggtgtccacaaggatcaataggcagcagtcaagcgacttgcattcgtcctcccactccaacagttcaaactcccagggatcatttggttgtagccccggttcacagattgtggcaaacgtggccctgaatcagggccaagccagctcccagagctccaacccgagcctgaacctgaataatagcccaatggagggcacgggtatttcactggcacaattcatgagtcctaggaggcaggtaactagcggcctcgccactcggcctcggatgccgaataactcctttcctccaaacattagtactctctctagccctgtcgggatgacatcatccgcctgtaacaataataacaggtcttatagcaatattcccgtgaccagcctccagggcatgaacgaagggccaaacaactctgtcgggttttcagccagttctcccgtcctccggcagatgtcttcacagaattcaccgagcagacttaacatccaacctgctaaggccgaaagcaaagataacaaagagattgcatccatcctcaacgaaatgattcagtctgataacagctcctcggacggaaaaccgctcgactccggcctgctccataacaatgatcggttaagcgatggtgattctaaatattcccagacgagccacaaacttgtgcaactgctgaccaccactgccgaacagcagcttcgccatgcagatatcgacacctcttgcaaagatgtgttatcttgcacaggcacctcaaactcagcttcagccaactcctctggtggatcctgtccatcttcccattcaagtttaaccgagaggcataaaattctccatcgcctgctgcaggagggatccccttctgatatcacgactctgtccgtggagccggataaaaaagactcagcttctacgtccgtttcggtaacaggccaagtgcaagggaattcatctatcaagctagagctggacgcgagtaagaagaaagagagcaaggaccaccagttgttacgttatttgctcgacaaagatgagaaggatttgcggtctaccccgaacttgtcccttgacgatgttaaggtgaaagttgagaaaaaagagcaaatggacccttgcaacacaaatcccaccccaatgaccaaaccaaccccggaggaaattaaactggaagcgcagagccaattcaccgctgacctcgaccagttcgatcagctgcttcccacacttgagaaagctgctcagctgccaggtctgtgtgagaccgaccgcatggacggagcagtaacatctgtgaccataaaatccgagattttgcccgcatctctccagagcgcgacggctcgccctacatctcgtcttaaccggctgcctgagctcgagctggaggctatcgacaaccaatttggacagccaggaaccggtgaccagataccttggacaaataataccgtcaccgctatcaaccaaagcaagagcgaggatcaatgtattagcagccagctggacgaacttctctgcccccctaccacagtggaaggcaggaacgacgagaaggcccttctggagcagctagtctcattcctatccggaaaggacgagaccgaactggccgagctcgaccgggcacttggtatcgataagctcgtccagggtggcggactggacgtgctcagcgaaagattcccccctcagcaggccaccccccctctaataatggaagagaggcccaacctttattctcagccctatagcagtccctctcctacagccaatctgccttcccccttccaggggatggtccggcagaaacccagcctgggcactatgcccgtgcaggtgactccacctcgtggcgcattcagtcctggcatgggaatgcagcctagacagactttaaacaggccaccagccgcaccaaatcagctgaggctgcagctccagcagagactgcaaggacagcaacagttgattcaccagaatcgccaggctatactgaatcagttcgcggcaacggcacctgtaggaatcaatatgcgatctggcatgcaacagcagattaccccccaaccacctcttaatgcacagatgctggcccagcggcagcgcgagctctactcgcagcaacacaggcaaaggcagctaattcagcagcaaagagctatgttgatgaggcagcaaagtttcggcaataacttgcctcccagttctggtctacccgtccaaatgggtaacccaaggttgccccagggagccccacagcagttcccatacccgccaaattatgggactaatccaggaactcccccagccagtacatccccattttcccaactggccgctaaccctgaagccagcctcgccaataggaattcaatggtaagcaggggcatgactggcaatataggagggcagttcgggaccggaatcaatccccagatgcagcagaatgtctttcagtatccaggggcaggaatggtgccccaaggcgaagcgaatttcgccccaagcctgtcacctgggtcctccatggtcccaatgccaatcccccctcctcagtcctcactcctgcaacaaaccccacccgcttcaggttatcagagccctgatatgaaggcctggcaacagggagctatcggaaacaataacgtgtttagtcaggccgtgcagaatcaacccacgccagcccagccaggcgtgtacaacaatatgtctatcaccgtgtccatggccggaggaaatactaacgtgcagaatatgaacccaatgatggctcaaatgcagatgtcttccctgcagatgccaggcatgaacactgtatgccccgagcagattaacgacccggcattgagacacactggattgtactgcaaccagctgtctagcacggacctcctcaaaacagaggcggatggcactcaggataagaagaccgaggagttctttagcgtggtgaccaccgactag

SEQ ID NO: 233079 - DNA, 4326 bp, synthetic construct
  misc_feature 1..4326: note = Description of Artificial Sequence: Synthetic coding sequence
  source 1..4326: mol_type = other DNA
atgagtgggctcggcgactcttcctcagaccccgcaaacccagactcgcataaacgaaagggatccccctgtgacaccctggcatcatctacggagaaacgtcgcagagaacaggagaacaagtatctggaagaactggctgaactgttgagtgccaacatttccgatattgatagcctgtccgtgaagccggataagtgtaagatcctgaaaaaaactgtagatcagattcaacttatgaaacgaatggagcaggagaaaagcactacagacgacgacgtgcagaagagtgacatttcatcctcgtcccagggagttattgaaaaggaatcactgggcccactacttctggaagccttggacgggttttttttcgtagtcaactgtgaggggaggatcgtcttcgtgtctgagaatgtaactagctacctgggctacaatcaggaggaactcatgaatacatccgtttactcgatcttgcatgtaggagatcatgctgagtttgtgaaaaatctgttgccaaagagcctcgttaatggagtcccatggccacaggaggctacacgtcgtaactcacacacatttaattgtcgaatgctgattcaccctcctgatgaaccaggcaccgaaaatcaagaggcttgtcaacgatacgaggttatgcaatgtttcaccgtttcacaaccgaaatctattcaggaggacggcgaagacttccagtcctgtctgatctgtatcgcacggaggctgccgagacccccagctataaccggcgtggaaagcttcatgacaaagcaggatactaccggcaagatcattagtatcgacacctccagcctgagagccgctggacgaactgggtgggaggatctggtgagaaaatgtatctacgcattctttcagccccaggggcgagaaccatcctatgccaggcagctgttccaggaagtcatgacacggggaacggcttcctcaccaagttaccgttttatcctcaatgacggaactatgctgtccgcacatactaagtgcaaactctgctatcctcagagccctgatatgcagccgtttattatgggaattcacatcattgatcgagaacactccggattgtcgccacaggatgacaccaattccgggatgagtatccctcgcgttaacccttccgtgaatccaagtataagtccagcccatggggtggccaggagctcaactttacctccaagcaattcaaatatggtgagcactcgtatcaatcgccagcagtccagtgacctgcactcaagttcccatagtaatagctccaatagccagggcagcttcggatgcagcccaggcagtcagattgttgctaacgtggcgctcaaccagggccaggcttccagccaatcatccaatccttccctgaatttaaacaattcccccatggagggcactggcattagcttggcacagtttatgtcaccacgacgtcaggtcacatcaggcctggctacacgccctcgcatgcccaataactcattccctcccaacatctctacactcagttctccggtcggcatgacgagcagtgcttgtaacaataacaaccgctcttatagcaacatacccgtcaccagccttcaaggcatgaacgagggtcctaacaacagcgtgggttttagtgccagttcccctgtgctaaggcaaatgtccagtcagaatagcccaagtcgtctgaacatccagcccgcaaaggccgagtctaaagataacaaggagatcgccagcatcttgaacgagatgatacagagcgataacagtagctcagacggaaagccccttgattccggactgttacataacaacgaccgcctatccgacggtgacagcaaatacagtcaaacaagccataagctggttcagttgttaacaaccactgccgaacagcaactgaggcacgcagacatagatacatcttgtaaggacgtgcttagctgtaccggcactagtaactccgccagtgccaatagcagcggcggaagctgtccctcatcccactcaagcttaacagaacgtcacaagatcctgcaccggttgctgcaggaaggcagcccctccgacattacaacgctgagtgtggagcccgacaagaaggatagtgcctctacctccgttagtgtgacagggcaggtgcagggaaatagttcaatcaagcttgagctagacgcttctaagaaaaaggagtccaaggaccaccagttacttcggtacctgttggacaaagatgaaaaagacttgcgttccacaccaaatctctctctagacgatgtcaaggtaaaggttgagaagaaagagcaaatggatccctgcaacacaaaccccactccaatgacaaagcctactcccgaggagataaagctggaggcgcagagtcagttcactgcagacttggatcagtttgaccaactactgccgactcttgagaaggctgcacagctccctggcctctgcgaaactgatagaatggatggagcagtgacctctgttactatcaagtcagaaatcctgccagcatccttacagagtgcaactgctcggccaaccagccggctgaaccgattgcccgagcttgagcttgaggccattgacaaccagttcggccagccgggtacgggtgaccaaattccctggaccaataataccgtcactgctattaatcaatctaaatctgaagatcaatgcatttcctctcagctggacgaactgctgtgcccgccaacaacagtggaggggagaaatgacgaaaaggctttgttagaacaactggtttcattcctgagtgggaaagacgagacagagctggcagaattagatcgagcgttgggtattgataagctggtgcagggtggcggattggacgttctgagtgagcgcttccccccacaacaggccactccgcctctgattatggaagaacgacctaatctatattcgcagccgtacagctctccatctcctacagccaatctcccaagtccatttcaaggcatggttcggcaaaagccttctctcggtacaatgcctgtccaagtgaccccacccaggggcgcattctctccaggaatgggtatgcaacccagacagaccctgaataggcctcccgctgcacccaatcagctgaggctccagttgcagcagcgcctccaagggcagcagcagctcatccaccagaatcgtcaggccatcttgaatcagtttgccgctaccgctcctgttgggataaacatgaggagcggcatgcagcagcaaatcacacctcagccgccactcaatgcacagatgctagctcagcgacagagagagttgtattctcagcaacatcgccagagacaactgatacagcagcagagagcaatgctgatgcgtcagcagagcttcggaaacaatcttccgcctagcagtggcctacctgtgcagatgggaaatcctagacttccccagggggctcctcagcagtttccctacccccctaattatgggacgaatcccggaactccaccagccagtacaagccctttcagccagctcgcagctaatccagaggcttccctcgcaaatcgaaactccatggtatccaggggtatgaccggtaatatcgggggacagttcggcaccggaattaacccccagatgcaacagaacgtcttccaatacccgggtgccggaatggtccctcagggggaggcaaacttcgccccttccctctcacctggctcttccatggtccccatgcccatccccccaccacagtctagtctgctacagcagacccccccagcctctggatatcagtctcccgacatgaaggcatggcagcagggcgcaataggcaacaacaatgtattctcacaggccgtgcaaaaccagcccacgccagcccagccaggcgtttataataatatgtctatcacggtttccatggctggaggaaacacaaacgtgcagaatatgaacccaatgatggcccaaatgcagatgtcttccctgcaaatgccagggatgaacactgtgtgtcctgagcagatcaacgatccggctctcagacataccggattatactgtaatcagctgtcttcgaccgatctgttaaaaacagaagccgacggaacacagcaagtgcagcaggtccaggtctttgctgacgtgcagtgtacggtaaacctcgttggtggtgacccctatctaaaccagccgggaccccttgggacgcaaaaacctacctctgggcctcagacgccacaggctcagcaaaaaagcctgctccagcagctcttaaccgagtag

SEQ ID NO: 233080 - DNA, 4323 bp, synthetic construct
  misc_feature 1..4323: note = Description of Artificial Sequence: Synthetic coding sequence
  source 1..4323: mol_type = other DNA
atgtcggggctcggagactcatctagcgatccagcgaaccctgattcacacaagagaaaagggtccccatgcgatactcttgcatcaagtacagagaaacgacgtcgcgaacaggaaaataagtacctggaggaattagcggagttacttagtgcaaatatctccgacatagactcgctttctgttaaaccagacaagtgtaagatcttaaaaaaaacggtggatcaaattcaactcatgaagcgaatggagcaggagaaatcaacaacggatgacgacgttcagaagtcagacatcagcagcagtagtcaaggtgtcatcgagaaggagtctctgggcccactgctgcttgaggccctcgatggcttcttcttcgttgttaattgtgaaggacgtatagtgttcgtctctgaaaacgtaacttcgtatcttggctacaaccaggaggaactgatgaatacgagcgtgtacagtatactacacgtcggcgatcacgccgagtttgtaaagaatctgcttccaaagtccctcgttaacggtgtgccatggccccaggaggccacaagaagaaatagtcacacttttaattgccgaatgctgatccacccccctgacgagccaggaactgagaaccaagaggcttgtcagaggtacgaagtgatgcagtgcttcaccgtcagtcagccaaagtcaatccaagaggacggcgaggattttcagtcttgcctgatttgtatcgcaagacggctgccaaggccacccgcaataaccggagtggaaagctttatgaccaagcaggataccacagggaagatcatcagtatcgataccagcagccttagagccgcaggaagaactgggtgggaagacttagtgcggaagtgcatctacgcatttttccagcctcaagggcgagagcccagctatgcccgacagcttttccaagaggtgatgaccagaggaactgcatcttctccttcttatcggttcatcctcaatgacgggactatgctgagtgcccacacaaaatgcaaactgtgttatcctcagagcccagatatgcaaccctttatcatgggcattcacatcatcgatagggaacactctggcctgtcgccacaggatgacactaactctggaatgagcatccccagggtgaacccgtctgtgaacccctcgatttctcccgctcatggggtggctcgctcttcaaccttaccgcctagcaacagtaatatggtgagtacacggatcaatcggcaacaaagttcggacctgcactcgtcttcccactccaatagcagcaactctcaagggtcctttggttgctctcccggatcccagattgttgccaacgtggctctcaaccagggacaggcgagtagccaatcctctaacccatcattgaatttgaataactctcccatggaggggacgggcatctccctcgctcagttcatgtcgcctagacgccaggtgacgtcgggcctggccacccgcccaaggatgcccaataactcatttcctcccaatatcagtactttgtccagccccgttgggatgacctcatctgcatgcaataataacaaccgttcgtactctaatataccagtgacttcactgcagggcatgaatgaaggacccaataactccgtgggattcagcgccagttcacccgtattgcgtcaaatgagctcgcagaacagcccatctcgcctgaacattcagcccgcaaaggcagaatctaaggacaataaagaaatcgcaagtatattgaatgaaatgatccaatcggataactccagctccgacggtaagccgctggacagcggtctgcttcacaacaacgatagactttctgacggtgatagcaagtatagtcagacatcacacaaactcgtccagttactgactacaactgcagagcagcagctgagacacgccgacattgatacctcctgcaaagacgttctgagctgcactgggactagcaatagtgcatccgctaactccagtggaggatcttgtcctagcagtcattccagcctgaccgaaagacataagatcctgcataggttacttcaggagggtagcccttctgatattacaactctcagcgtcgaacccgacaaaaaggatagtgcatctacaagtgtgtccgtcaccggacaggttcagggcaattcttccatcaaactggagcttgatgcttctaaaaagaaagaatcaaaagaccatcaattactgagatatctgctggataaggatgagaaggaccttcggtcgacacctaacctctccttagacgacgtcaaggtcaaagtggaaaaaaaagagcagatggacccctgtaacacaaatcccacaccgatgactaagcctaccccggaggagattaaactggaggcccagtcccagtttactgccgacctggaccagtttgaccagcttctcccaaccctagaaaaggccgcacagctgccagggctttgtgagactgacaggatggacggagccgtcactagtgtaactattaaatccgaaatactgcccgcttctcttcagtctgctaccgccaggcccacgtctaggctaaataggctgcccgagctggagctggaggccattgacaatcagttcggtcagcctgggacgggagaccagattccatggaccaacaacaccgtgacagcaattaatcaaagtaagagcgaagatcagtgtataagttcacagttagatgagcttctgtgccctcctacaaccgtagagggacggaacgacgaaaaagcactgttagagcagttggtgagttttttaagtggcaaagacgagaccgaattggcagaattggaccgcgcactcgggatcgataaacttgtgcagggtgggggactcgacgtcctgagcgagcgctttcctccgcagcaagccaccccccctctgattatggaagaacgcccaaacttgtactctcagccatacagctccccatctccgaccgccaacctccccagcccctttcaaggcatggtgcgccagaaaccaagcctggggactatgcctgtccaggtgacccctccacgaggtgctttttcccccggtatgggtatgcaacccaggcaaacactgaaccggcctcccgctgctccaaaccagcttaggctacaattacagcagaggctccagggccagcaacaactgattcaccaaaataggcaggccatattaaatcagttcgccgcaacagccccagttgggattaacatgcgttcaggaatgcagcagcaaatcactccccagcccccacttaacgcacagatgttggctcagaggcagagagagctctattcacagcagcacaggcagcggcagctgattcagcagcagcgtgcaatgctaatgagacagcaaagttttggaaataacctgcctcccagtagtggtctgccagttcagatggggaaccctaggctaccccagggcgcaccccagcagtttccctaccctccaaactacggaactaacccaggaaccccacccgctagcacatcaccattttctcagctcgccgcaaaccccgaggcctccttagctaacaggaacagcatggtgtcacgtggcatgaccggcaacattggtggccaatttggtaccgggattaatccccagatgcaacagaacgtgtttcaatacccgggagccggtatggtgccacagggggaagccaatttcgcaccatcactgagccccggaagttccatggtaccaatgcccattcctcccccacagagcagcctcttgcaacagacacctcccgcatccggttaccagtcccccgatatgaaggcatggcaacagggtgccattggcaacaataatgtattctcacaggcggtgcaaaatcaaccaactccagcccagccaggtgtgtataacaacatgtctattactgtgtccatggctgggggaaatactaatgtgcaaaacatgaatcccatgatggctcagatgcagatgtccagtctacagatgcccggaatgaatactgtatgcccggagcaaattaacgatccagccttaagacacacggggctgtactgtaatcagttatcatcaacagatctgctgaagacggaagctgatggtacgcaggtacagcaggtacaagtgtttgctgacgtccaatgcacagtgaatctggtgggcggtgacccttatctgaaccaacctgggcctctcgggacccagaagcctaccagcgggccacagaccccccaagcgcagcaaaagagcctgcttcagcagttgctgactgagtag

SEQ ID NO: 233081 - DNA, 4200 bp, synthetic construct
  misc_feature 1..4200: note = Description of Artificial Sequence: Synthetic coding sequence
  source 1..4200: mol_type = other DNA
atgtctggcctcggagactcatcttccgaccccgcaaatcccgattcacataaaaggaaaggatcaccttgtgataccctggccagcagcactgaaaagcgccgaagggaacaggagaacaagtacttggaagagcttgcagaactcctcagcgctaacatctctgatatcgactccctttccgtgaagccagataaatgtaagattctgaagaaaactgtagaccagatccaattaatgaagcggatggagcaggagaagagcactacagatgatgacgttcaaaagtcagacatctcatcctccagccaaggggtaattgagaaagaatcgctaggccctctgctcctggaagcacttgacggattctttttcgtcgttaattgcgagggcagaatcgtattcgtttcagagaacgttacctcctacctggggtacaaccaagaggagttaatgaacacatcagtgtactcaatactgcacgttggagatcacgccgagttcgtaaagaatctgcttcctaaaagcctcgtgaatggagtcccatggccccaggaagccacacgtagaaattctcatacattcaattgccgcatgctgatccatccaccggatgaacccggaacggagaaccaggaggcctgccagcggtacgaggtgatgcagtgtttcaccgttagccagcccaagagtatccaagaggacggggaggattttcagagctgcctgatctgtatagccaggaggctgcccaggccgcctgccatcacaggggttgaaagttttatgactaaacaggacaccaccggaaagataatctcaatagataccagtagcttgcgagctgccggacgtaccggatgggaggacctcgtgagaaagtgcatctatgctttcttccaaccccaggggcgagagcccagctatgcgcgacagctgtttcaggaggtcatgacacgcggaactgcttccagcccaagctacaggtttatcttgaatgatgggacaatgttaagtgcgcacacaaagtgtaagttgtgctatccccagtcgcctgacatgcaaccgttcattatggggatccacatcatcgaccgagagcatagcggcctctccccccaggatgacactaatagtggcatgtcaatcccacgggtaaacccttcagtgaacccatccatctcccccgcacatggcgttgctaggtcctcgacactccctccctcaaactccaatatggtgtccaccaggatcaacagacagcaatcgagcgatctgcacagtagctctcatagtaatagctctaatagccaggggagtttcggctgctcaccagggagccagatcgtagccaacgtggcactaaatcagggtcaggcttcctcccaatctagcaacccgtctctcaacctgaataattctcccatggagggaaccggtatctcattagcacagtttatgtcacccagaaggcaggttacgtcagggttggcaacccgccctcgtatgcccaataactcattcccacccaatatctccaccctgtcaagtcctgtcggcatgacctctagcgcttgcaacaacaacaaccggtcttactcaaatatcccagtaaccagcctgcagggaatgaatgaaggacccaataactcagtcgggttctctgcctccagcccagtgcttcgccaaatgtccagccaaaacagcccttctcgcctcaatatccagcctgcaaaggccgagtctaaggataacaaagaaatagcaagtattctgaacgagatgatccagtccgataatagctctagcgatgggaagccactggacagtgggttattgcataacaacgataggctttcagacggtgacagcaaatacagccagacttctcacaaattagttcaactccttaccacaacagctgagcagcaactgcgccacgcggacattgataccagttgcaaagacgtcctgagctgtacaggtactagcaattctgctagcgccaacagctccgggggttcctgccctagcagtcacagttctctaactgagcggcacaaaattctccatagactgttgcaggagggaagcccgtcggacattactacccttagcgtggaaccggacaaaaaggatagtgcttctacttctgtgtccgtcaccggtcaggtccaaggaaactcttctatcaaactggagctggatgcttcaaaaaagaaagaaagcaaagaccaccaactgttgcgatatctactggataaggatgagaaggacctacgatctacgccgaacctgtccctcgatgacgtgaaggttaaggtggaaaagaaagagcagatggacccctgtaacaccaatcccaccccaatgactaagccaacacccgaagaaattaagctggaggcccagtcacaattcaccgccgacctggatcaatttgaccagttgctcccgactctggagaaggcagcccagctccccggtctgtgcgagacagaccgtatggatggagctgtcacctctgtgaccatcaagtcagaaatcctgcccgctagtttgcagagtgctactgctcgacctacaagccgcttgaatcggcttcctgagctggagctggaggccattgacaaccagtttggccagcccggaaccggagatcagataccatggaccaataacaccgtcacagctatcaatcagtcaaagtcagaagaccagtgtatcagcagccagctggatgaactgctttgcccgcctactaccgtagaggggagaaatgacgagaaagctctgctggaacagctagtcagttttctcagcggaaaggatgaaacggaactagcggagctcgatagagctctgggtatcgacaagctagtgcagggcggaggacttgacgtactatccgaacgattccctcctcaacaagctaccccgccactgatcatggaagaaagacccaacctttattcccagccctactcttcaccgagtcccacggctaatctcccatccccatttcagggcatggtgagacagaaaccctccttgggaaccatgcccgtgcaggttactcctccaaggggcgcattttccccaggaatgggcatgcagcccagacagaccctcaacagacctccagcggctcccaaccagctgcggctgcaactgcaacagcggctgcagggacaacaacagctgatacatcagaatcgccaagctatcctgaatcaatttgcagcgacggcacctgtaggcataaatatgcgctcagggatgcagcagcagatcactcctcagccacctttgaacgcacaaatgctcgcacagcgacaacgggaactgtattcgcagcagcacagacagagacagctcattcagcagcagagagccatgcttatgcgccaacaatctttcggcaataacctgccccctagttccggcctgccagtccagatggggaatcctcgattaccacagggggctcctcagcagttcccatatccacccaactatgggactaatccagggacccccccagcatccacctcccccttttctcagctggccgcaaatccagaggctagcttggctaacaggaacagcatggtttctcgtggtatgacgggcaatatagggggtcaattcggaaccgggataaacccccagatgcaacagaacgtgttccagtaccccggtgcaggcatggtgccccagggagaggccaattttgccccatcactgagcccagggagctcaatggtgcctatgcccattccaccgccacagtcctccttgctgcagcaaacacccccagcctctgggtatcagtcgccagatatgaaagcctggcagcagggcgctataggcaacaacaatgtgtttagccaggcagtacagaatcagccaacccctgctcagcccggtgtgtataataatatgagcatcacagtgagcatggccggagggaacacaaacgtgcaaaatatgaaccccatgatggcacagatgcagatgagctcgctgcagatgcccggaatgaacactgtctgtccagaacaaattaacgatccggctctacgccatactggactgtactgcaaccagttgtcctctacagacctgttgaagaccgaggctgacgggacacaagataaaaagacggaagagttcttttccgttgtcacaaccgactag

SEQ ID NO: 233082 - DNA, 4326 bp, synthetic construct
  misc_feature 1..4326: note = Description of Artificial Sequence: Synthetic coding sequence
  source 1..4326: mol_type = other DNA
atgagtggcctaggtgatagctctagcgaccccgcaaatccagactcacacaaaaggaaagggtccccatgcgataccctcgcatcctcgaccgagaagagacggagagagcaggagaataagtacctggaggagctggccgaactgctgagtgctaatatcagcgatatcgacagtctaagtgtgaagccggataagtgcaagatcctaaagaaaactgtcgaccagatccagctgatgaaacgtatggagcaggaaaagagcaccacagacgacgacgtacagaaatctgacatatcgtctagttcacagggagttattgagaaagaaagcctggggccattgctgcttgaagccctcgatgggttcttctttgttgtgaattgtgagggaaggattgtgtttgtctctgagaacgtaaccagttatttgggatacaaccaagaagagctgatgaatacaagcgtctattcaatcctccatgtgggggaccatgccgagtttgtaaagaacctcctccccaaaagtttggtgaatggagttccttggccacaggaggcgacccggaggaatagccatacattcaattgcaggatgctcatccatccccctgatgaacccggaactgaaaaccaggaggcctgtcagcgctatgaagtcatgcagtgctttaccgtgtcgcagccgaaatctattcaggaggacggcgaagatttccagagttgtttaatctgtattgcacggaggctcccccgtcccccagcaattacaggcgtagagtctttcatgaccaagcaagacactactggtaagatcatcagcattgatacatccagcttgagagccgctggtaggactggttgggaggatttagtgcgcaagtgtatctatgcgtttttccagcctcagggtagagagcctagctacgcaaggcagctgttccaggaggtgatgacccgcggaactgcctctagcccatcctaccgattcatactgaatgacggcaccatgctgagtgcccatacaaagtgtaagttatgttacccacagtcccctgacatgcaaccattcataatgggaatccacattattgaccgtgagcactcaggcctttccccgcaagacgataccaattcgggaatgtccatccctcgcgtcaaccctagtgtcaacccaagtatttcacccgcacatggcgttgcacggagctccaccctgccacccagcaatagtaatatggttagcacacgcattaatcgccagcagtcatcggatctgcactctagcagtcattccaattcttccaactcacaaggcagcttcggatgctcccctggctcacagatcgttgctaacgtggcactgaaccaggggcaggcttcatcccaatcctcaaatccgtccctgaaccttaataactccccaatggaaggcactgggatttctctagcccaattcatgtccccaagaaggcaggtgaccagcgggttggctaccaggcccaggatgccgaataattcctttcccccaaacatttccaccctgagtagcccagttggaatgacctcatcagcgtgcaacaataataataggtcgtactccaacattcctgtcacctcactgcaaggcatgaacgagggccctaacaatagcgtaggatttagtgcaagttcccctgtgctgcgccaaatgagtagccagaattccccatcccgattaaatatacagccggcaaaagctgaatcgaaagataacaaagaaatcgccagtatactgaacgagatgatccagtccgataactccagctccgacggaaagccgctggatagtgggttgctccataacaatgatagactgtcggatggagattcaaaatattcgcagacctctcacaaactcgtgcagctcctgaccactacggccgagcagcagctgcggcacgccgatattgacacatcttgtaaggatgtactttcttgcactggaacctctaacagtgcctcagcaaatagcagcggcggttcatgccccagctcccattcctccctaacggagcgccacaagatccttcaccgactgctgcaggaaggatccccaagtgacatcaccacattgtccgtggagcccgacaagaaggactcagcctcaacaagcgtgagcgtcaccggacaggttcaggggaacagctctatcaagctggaactggatgcatcaaaaaagaaggagagcaaggaccatcagctcctccggtatctgcttgacaaagacgagaaagatctgcggtcaacgccgaacctttccctggatgacgtgaaggtgaaggtggaaaagaaggagcagatggacccttgcaacactaacccaactcctatgacaaagcctacgcctgaagagattaagctggaggcccagagtcaattcactgcagacttagaccagtttgaccagctattgccaacgctagagaaggcagctcagctgcctggcctgtgcgaaacagaccgcatggacggagccgttacatcagttacaatcaagtctgagatcctccctgcgagcctgcagtccgccacggctaggcccacctcccgcttgaatcgcctcccagagctcgagttggaggcaatagataaccagtttggtcaaccaggcacgggcgaccagatcccatggaccaacaatacggtgacagctatcaatcagtctaagagtgaggatcagtgcatatctagccaattggacgagcttttatgcccacctaccaccgtagaggggagaaacgacgagaaagccctgctagagcaactagtgagcttcctttctgggaaggacgagaccgaactagcggagttggatcgggctcttggaatcgacaagctcgtccagggcggaggcctcgatgtgctgtccgagcgctttcctccacagcaggcaacaccccctctcattatggaagaaaggccaaacctttacagtcaaccttattcctcccctagccctaccgcaaatctgccttctccattccaggggatggtgagacagaagccgtccctgggaaccatgcccgtgcaagtcacacctccacgaggagcttttagcccaggcatgggcatgcagccgaggcagaccctgaatagaccgcctgcggctccaaaccaactgcggcttcagctgcaacagcgcctgcaggggcagcagcagctgattcaccagaaccgtcaggccatcttaaatcaattcgcagctacagccccagtgggaatcaacatgcggtcaggaatgcaacagcagataacccctcaaccgccacttaatgctcagatgcttgcccagcgacagcgcgaactctacagccagcaacaccgccagaggcagttaatacaacagcagcgagccatgctaatgcggcagcagtctttcggcaataacctcccgccatcaagtggcctgcctgtgcagatggggaacccgaggcttccacagggagctccacagcagttcccttatcccccaaattacgggactaatccaggcacacctcctgccagcacatcccctttcagtcagctcgccgcaaatcccgaggcaagcctggcaaacagaaattccatggtctctaggggtatgacaggtaacataggcggacagttcggaacggggatcaacccccaaatgcaacaaaacgtgtttcagtatcccggagcgggaatggtgcctcagggcgaggctaactttgctccctcccttagtcccggttcctctatggtcccaatgcccatccccccacctcaatcctcactgctgcagcagacacccccagcttccggctaccagtcacccgatatgaaggcctggcaacagggcgctataggaaacaataacgtctttagccaggcggtgcaaaaccagcccaccccagcccaacccggagtatataacaacatgtctatcacagtgagtatggccggtggcaacaccaatgtccagaatatgaatcccatgatggctcagatgcagatgtcttccttgcaaatgcccggaatgaacactgtgtgtccagaacagattaacgatcctgcactaaggcacactggtctgtactgcaatcagctgagcagcactgatctccttaagacggaggccgacggtactcaacaggtgcagcaggtccaggttttcgcagacgtccagtgcacagttaatctcgtagggggagatccttatttgaaccagcccggacctttgggtactcagaagcccacttctggccctcaaacccctcaagctcagcagaaatcgcttttgcaacaactgctgacagaatag

SEQ ID NO: 233083 - DNA, 4200 bp, synthetic construct
  misc_feature 1..4200: note = Description of Artificial Sequence: Synthetic coding sequence
  source 1..4200: mol_type = other DNA
atgagcggattaggagactcaagttccgatccagcaaaccctgactcccacaagcgcaaaggctcaccatgtgatactctggcctcctctacagaaaagagaaggagggagcaagagaacaaataccttgaagagttagccgaattgctctccgcgaatatctctgatatcgacagcctctccgtgaagcctgacaagtgcaagatcctcaaaaaaaccgtggatcaaatacagttaatgaagagaatggagcaggaaaagagcaccacagacgatgacgtgcagaagtccgacattagctcctcttcccaaggggtgatcgagaaagaatccctggggcctcttctgctcgaggccttagacggattcttctttgttgttaattgtgaaggacggattgtgtttgtcagtgagaatgtgaccagttaccttggctataatcaggaagaattaatgaatacctccgtgtatagcattcttcacgtcggagatcatgccgagtttgtcaagaatctgttaccgaagagcctggtgaatggggtgccatggccccaggaagccactagacggaactcccacacattcaactgcagaatgcttattcatcctcctgatgaacccggaactgagaaccaagaagcctgccagcggtacgaagtgatgcagtgcttcactgtctctcagccaaagtctatccaggaggacggcgaggacttccaatcctgcttaatctgcatcgccagacgattgccacggccaccagccataaccggagttgagtccttcatgacaaagcaagataccacaggcaaaatcatctcaattgacaccagctccttgagggccgcaggtaggacgggatgggaggatttagtgcgaaaatgcatttacgctttttttcagccgcaaggccgtgaaccatcatatgcacgccagctgttccaggaagttatgacacgcggaactgctagctccccatcttacagattcattttaaatgacggaactatgctttccgctcataccaagtgcaaactgtgttacccacagagccccgacatgcaacccttcataatggggatccatataattgatcgtgagcacagcggacttagcccccaggatgacaccaatagcggaatgtccattccgagagttaacccctccgttaacccttcaatttccccagcacacggcgtggcgagatcatcgactctgcctcctagcaatagtaacatggtgagcacgcgtatcaacaggcaacagagctcagacttgcatagcagcagtcactctaattcaagcaactcacagggttctttcggctgcagtccaggctcccagatcgtagcaaacgtggccctaaaccaggggcaggccagttctcagagctcaaatccgagcctcaatttaaataactcgcccatggaggggactggcatcagcctggcacagtttatgtcccctagacgtcaggtcaccagcggactggctacgcgccctaggatgcccaataattcctttcccccaaacatctcaacccttagctcacctgtcggaatgacatcatctgcctgcaacaacaataacagatcatattccaacatccctgtgacatcattgcagggaatgaacgaaggtccaaacaactcagtcggatttagcgccagctcacccgttctgaggcagatgtcgtcgcagaactcgccttctaggctgaatatccaacccgctaaagctgaatccaaggacaataaggagattgctagcatccttaatgagatgatccagagtgacaattcaagttccgatgggaagccccttgactctgggctgcttcataacaacgatcggctaagcgatggagattcaaaatactcccagactagccacaagttagtgcagctgctgacgactacagccgaacagcagttacgacatgcagatatcgacacgagttgtaaggatgtgctatcctgcacaggaacctcaaattccgcaagcgccaactcttcgggcggtagttgtcccagttcccattcgtcccttactgaaaggcataagatcctccaccggctgctgcaagagggatcccctagtgacatcacaacattgagcgtcgagcctgacaaaaaggacagcgcgtccacatctgtgagcgtgacaggtcaggtccagggtaactcatccattaagctggagctcgacgccagtaaaaagaaggagtctaaagatcaccaactgcttcgataccttctcgataaagacgaaaaagatctccggtctacacccaatctgagtctggacgacgtgaaagtgaaggtcgaaaaaaaggaacagatggatccgtgcaataccaatcccacccctatgacgaagccgacgcccgaggagatcaagttggaagcccagagccaattcactgccgacctcgaccaatttgatcaattgctgcctacgctggaaaaggccgctcaacttcctggtctatgtgaaacagatagaatggatggtgcagtaacaagtgtcacaatcaaatccgagatactgcctgctagcctgcagtctgcaaccgccaggcctactagtcggctgaatagactgccggaactagagttggaagccatcgataatcagttcggccaacctggtacaggcgaccaaatcccttggacaaacaacaccgtgaccgcaatcaaccagagcaaatccgaggatcagtgcatctcctcccagcttgacgagctgctctgtcccccaaccactgttgagggccgtaacgatgagaaagcactccttgagcagctggtcagcttcctctcgggtaaagacgagacagagctggctgagttggacagggcacttggcatcgataagctcgtgcaaggcggaggattagacgtgctgtcagagcggtttcctccgcagcaggctacgcctccactgataatggaggagcgcccaaacctatactcacagccgtattcttccccaagtcctactgccaatctcccgagccctttccagggtatggtgaggcaaaagccatccctgggcaccatgccagtccaagtaactcctcccaggggggctttcagcccaggaatgggcatgcagcctaggcagacattgaatcgcccacctgccgctcccaatcagctacgtcttcagctgcagcagagactgcagggtcagcagcagctcattcaccagaaccggcaggccatcctcaaccagtttgctgccactgcacccgtaggcatcaacatgaggagcggaatgcaacagcagataaccccccagcctccacttaacgcccaaatgctggctcagaggcagagagagctatactcacagcagcatcgacagcgccagctgattcagcagcaacgagccatgctcatgcggcagcaatcattcggcaataacttgcctccaagtagtggcttgcctgtgcaaatggggaaccctaggctccctcagggtgccccacagcagttcccgtatccaccaaactacggaaccaatcctggcacacccccagcctcaacatctccatttagtcagttagcggcaaaccctgaagcatctctggccaataggaattcgatggtatccaggggcatgacaggaaacataggagggcaatttggcaccggtatcaaccctcagatgcagcagaatgtgttccagtacccgggagcagggatggttccacagggggaagcgaatttcgccccttcgctaagccccggatctagcatggtgcctatgccgattcctcccccacaaagctctctgttgcagcagacgccccctgcctccggatatcaatccccagacatgaaagcctggcaacagggtgctattggcaacaacaacgtcttcagccaggccgtgcaaaaccagcccactcccgcacagccaggtgtctacaacaacatgagtattaccgtgtctatggccggaggcaacaccaatgtccagaatatgaatcctatgatggcacagatgcagatgtccagtttgcaaatgcctggcatgaatactgtgtgtcccgagcagattaacgatccagctcttcggcatactggcctgtactgcaaccagctgtcatccactgacctgctcaagacagaagccgatggtacccaagacaaaaagacggaggaattttttagcgtggtgacgaccgattag

SEQ ID NO: 233084 - DNA, 1659 bp, synthetic construct
  misc_feature 1..1659: note = Description of Artificial Sequence: Synthetic coding sequence
  source 1..1659: mol_type = other DNA
atgcagctcacagctgagaacagccctgttacccctgtgggtgcccagaagaccgccttgaggatttcccagtcaaggatgatcggcaattctgcctcccgaccaacaatgcccagcggcgagtgggcccctcaaagctcagcggttagagtgacctgtgcagcaaccacttccgcaatgaaccgcccagtgcagggtggaatgattagaaatcccgcagcctcaatcccaatgcgaccttcaagccagcccggacagaggcaaaccctccaatcacaagtaatgaatattggtccttccgagttggaaatgaatatgggcggtccccaatatagtcagcagcaggcccctcccaatcaaacggcaccctggcccgagtctatcctcccaatcgaccaggcctccttcgcaagtcaaaaccggcagcccttcggaagctcgcctgacgaccttctttgtccccacccagccgctgaatcaccctcagacgaaggggcactcctggatcaactgtatctggccctgcgcaatttcgatgggttggaggagatcgatagagcccttgggattcccgaattggttagtcagagccaagctgtggatcctgaacagttttcttctcaggatagtaatattatgctggaacagaaggccccagtttttcctcagcaatatgcctcacaagcgcagatggcgcaagggtcctactcgcctatgcaagatccaaattttcataccatgggccagagaccaagctatgccactctgcggatgcaacctcggccaggactccgtcccaccggccttgttcagaaccaaccaaatcagctgaggctccagctgcaacacaggcttcaggcacagcagaaccggcagccccttatgaaccagattagtaacgtaagcaacgtgaacttgaccctgcgaccaggcgtccccacgcaggcacccatcaacgctcaaatgttggcccagcgccaacgtgaaatcctaaaccagcacttgaggcagcgccaaatgcaccagcagcagcaggttcagcagcgcacactgatgatgcggggtcaaggcctgaatatgacgccttccatggtcgcgcctagtggtatgccagcgactatgtctaaccccaggatccctcaggccaatgctcaacagttcccttttccccctaattacgggatttctcagcagccagaccccggatttactggggctacaacacctcagagcccactgatgtcccctcggatggcccatacccagagccctatgatgcagcagtcccaggcgaatcccgcttatcaagctccatccgacataaatgggtgggcacagggaaacatgggtggaaactcaatgttcagccagcagtctcctcctcactttggccagcaggccaatacttccatgtacagtaataacatgaatataaatgtaagtatggctactaatacaggaggtatgagttccatgaatcagatgacggggcagatctccatgactagtgtgacatccgttccaaccagcgggctgtcgtccatggggccagaacaggttaatgaccccgctcttagaggcggtaacctgtttccaaatcagctgcccggaatggacatgattaagcaggagggcgacaccacaaggaagtattgttag

SEQ ID NO: 233085 - DNA, 4395 bp, synthetic construct
  misc_feature 1..4395: note = Description of Artificial Sequence: Synthetic coding sequence
  source 1..4395: mol_type = other DNA
atgtctggcatgggggaaaacacttcagatccgagtcgggcagaaacacgcaagcggaaggagtgtcccgaccagcttggtccatcccccaaaagaaacacagagaaacgcaatagagagcaggagaataaatacattgaggagctcgccgaactgatttttgcgaatttcaacgacatcgacaattttaatttcaaacccgacaagtgcgccatcctaaaggaaaccgtgaagcaaatccgtcaaattaaggaacaggagaaagcagccgctgcaaacatcgacgaagtacagaagtcagatgtctcctccaccggccagggtgtcatagacaaggatgcactggggccaatgatgcttgaggcgctcgacggttttttcttcgtggtcaacctggaaggtaacgtagtatttgtttctgaaaacgtcacccagtacctgaggtacaaccaagaagaactgatgaacaaatcagtgtactcaatccttcacgtgggggaccacaccgagtttgtgaagaatcttctgcctaaatcaattgtgaacggcggaagttggtctggagaaccacctcggaggaactcccacaccttcaactgccggatgctggtcaagcctctccctgattctgaagaggaaggtcacgacaatcaggaagctcatcaaaagtacgagacaatgcagtgcttcgcagtttcccagccgaaatcaattaaggaggagggagaggatctgcagagttgtctcatctgtgtagccaggcgagtgcccatgaaggaacggccagtactgcccagctccgagagtttcacaactcgccaggatctccagggcaagattacaagcctggacacctctactatgagagcagccatgaagcccggatgggaggatcttgtgaggaggtgtattcagaaatttcacgcacagcacgaaggcgagagcgtgagctatgcgaagagacatcaccatgaggtgctacggcaaggattagctttcagccagatttacaggttttccttgtcagacggcaccttagtggctgcccagacaaaaagcaagctgatcaggtctcaaaccaccaacgagcctcagctcgtgatctccctgcatatgctacaccgggaacagaatgtgtgtgtaatgaatccagatctgacaggccagactatgggaaagccattaaacccaatctcatcaaattctcctgcacatcaggctctgtgctcggggaatcccggtcaggatatgactctctcctctaatatcaacttccctatcaacggccctaaggaacagatgggaatgcccatgggcaggttcggcggttccggaggaatgaatcatgtcagcggaatgcaagccactactccccaagggagcaattatgctctgaagatgaattcaccatcccagtcctctcctgggatgaacccgggtcaaccaaccagtatgttatcgccgcgacatagaatgtcaccaggagtagccggatctcccagaattccaccgtctcagttcagccccgctgggtctctgcactcacctgtgggcgtgtgttcctcaaccgggaactctcactcatacacaaactctagtttgaacgctctacaagccctgtcggagggccatggagtgagtctcgggtcttccctcgcttctccagatctgaagatggggaatctccagaactcgcccgtgaacatgaatcccccaccactctcaaagatgggaagcttggatagcaaggactgtttcgggctctatggggaacctagcgagggcacaaccggacaggccgaatcatcctgccatcctggggagcagaaagagaccaacgaccccaacctgcccccagcagtttccagtgagcgggcagatgggcagtcaaggttgcatgattcaaagggacagaccaagctgcttcagctcctcactactaaatccgaccagatggagcctagtccactcgcctccagtctctcagacaccaataaagactccaccgggtcactgccaggaagtggatctacccacggaacctctcttaaggagaaacacaaaatcctacataggctccttcaggacagcagtagccctgtagacctggctaagcttaccgctgaggcgaccgggaaggacttaagccaagagtcctcaagtaccgcaccagggtccgaagttactattaaacaggagcctgttagcccgaagaagaaggaaaacgctctgttgaggtatctccttgacaaggacgacacaaaggatatcggcttacctgagatcacgccaaaactggaacggctcgatagcaagactgacccagcatctaataccaagctcatcgctatgaagacggagaaggaagaaatgagtttcgaacccggagatcagccaggctcagaattggacaatctcgaggagattctggacgatctgcagaacagccagctacctcagctcttcccagacacaaggcccggagcccctgccggttccgtggacaagcaggcgatcataaatgacttaatgcaactgaccgctgaaaattcccctgtaacccccgtgggagcgcagaagactgctttaagaatttcacagtcaacctttaacaaccccaggcccggacaactcggacgtctcctgccaaaccagaatctgcccttagacatcacccttcagtcacctactggcgctgggcctttccctccaattcgaaactcgtccccatacagcgtgatcccacagcctggcatgatgggaaatcaggggatgattggcaatcaggggaatcttgggaacagctcaactggcatgatcgggaactccgcatcgaggccaactatgccatccggtgagtgggcaccgcagtcaagcgcagtgagggtcacttgcgccgctaccactagcgcaatgaaccgcccagtgcagggtggaatgatccgcaacccggcagcatctatacctatgagaccttccagtcagccgggacagcggcagacgctgcagtcccaggtgatgaacatcggaccctccgaattggaaatgaacatggggggacctcagtactcgcagcagcaggcccctccaaatcaaactgcgccatggccagagagtatcttaccgattgatcaggcaagttttgcatctcagaaccgtcagccctttggatcctctcctgatgacctactgtgccctcacccagcagccgaaagcccctcggatgaaggggcactgctggaccagttgtacctggctctgcgaaacttcgacgggctggaagaaattgatcgtgccctggggataccggagttggtctcacagtcccaggctgtggatccagaacagttttccagccaggatagcaatattatgctcgaacagaaagctccagtgttcccacagcagtatgcctctcaggcacaaatggctcagggatcctattctccaatgcaggatcccaacttccatacaatggggcaacgcccatcatatgctacgcttaggatgcagccgcgtcccggacttcggcctaccgggctggttcagaaccagccaaatcagttacgacttcaactgcagcaccgattgcaggcccaacagaataggcagcctcttatgaatcaaatttccaacgtgagcaatgtaaacctgaccctgcgacctggagttccaacccaagctcctataaatgcgcaaatgctggcccagaggcaacgagaaatcctcaatcagcacctgcgtcagcgtcaaatgcatcagcagcagcaagtgcagcaacgcacgttaatgatgaggggccagggactcaacatgactcctagtatggtggccccaagcggcatgccagcaacaatgtcaaacccgagaatcccacaggctaacgcccagcaatttccttttcccccaaattacggcatcagtcagcagcctgaccccggatttaccggcgcaaccacgccacaatctcctctcatgtcaccgagaatggcacacactcaatcccccatgatgcagcagtcacaagcaaacccggcttaccaagcgcctagtgatatcaatggttgggcccagggaaacatggggggaaacagcatgtttagccaacaatcaccccctcactttggacagcaggcaaatactagtatgtattctaataatatgaacatcaatgtatccatggccaccaacactggcggaatgtctagcatgaaccaaatgacaggacaaatcagcatgactagcgtaaccagtgttcccaccagtgggcttagcagcatgggccctgaacaggtgaatgatcctgccctgaggggcggaaacctattcccaaatcagctgccaggtatggatatgataaagcaggaaggtgacactacaagaaagtactgttag

SEQ ID NO: 233086 - DNA, 51 bp, synthetic construct
  misc_feature 1..51: note = Description of Artificial Sequence: Synthetic coding sequence
  source 1..51: mol_type = other DNA
atgagtggcatgggcgaaaatacatctgatccaagtagggcggagacatag

SEQ ID NO: 233087 - DNA, 27 bp, synthetic construct
  misc_feature 1..27: note = Description of Artificial Sequence: Synthetic coding sequence
  source 1..27: mol_type = other DNA
atgagtggcatgggagagaatacctag

SEQ ID NO: 233088 - DNA, 4263 bp, synthetic construct
  misc_feature 1..4263: note = Description of Artificial Sequence: Synthetic coding sequence
  source 1..4263: mol_type = other DNA
atgtcaggattgggagagaatctcgacccccttgctagtgattctcggaagcggaagctaccgtgcgatacccctggacaaggcctgacctgcagcggagaaaaaaggaggagggaacaggaaagcaaatatattgaggagcttgccgaacttatatccgccaacctgtctgatatcgacaactttaacgtcaagccggacaaatgcgccatcctgaaggagaccgtacgccaaattcggcagatcaaggagcagggaaagacaatatctaacgacgacgatgttcagaaagccgatgtgtcttctaccgggcagggcgtaatcgataaagactccctcggaccgttacttctccaagccctcgacggctttctcttcgtggtgaatcgtgacgggaatattgtcttcgtgtctgagaacgtgacccagtacctccaatacaagcaggaagatctcgtgaacacctctgtttacaacatcctgcacgaagaggaccgaaaagactttctgaaaaatctccccaagagcaccgtgaacggagtctcctggactaacgaaacacagaggcagaaatcccacacgtttaactgcaggatgttgatgaaaaccccccatgacatcctcgaagacattaatgcaagtcccgagatgcggcagcggtatgaaaccatgcagtgttttgcgttgagtcagccacgagccatgatggaagaaggggaggacctccaaagttgcatgatctgcgttgcccgtcgaattactaccggggagcgcacatttcctagcaatcccgaatcttttattacgcgccacgacctgagtgggaaggtcgtgaatatcgatacaaactcactcagatcctctatgcgacccggatttgaagatattattcgcagatgtatccagcgttttttctcattgaacgatggccagtcctggtcacaaaagcgccattatcaagaagcctatctcaacggccatgcagagacccctgtgtacagattttccctcgccgacggcacaatagttaccgctcagactaagtccaaactgtttcgcaatcccgtgaccaatgatcggcacggattcgtgagcacccacttcctccagagagagcagaatggctacaggccaaatcccaacccagtggggcaaggtatccggcctcccatggccggttgcaacagcagtgtaggcggaatgtccatgtcccccaatcaagggttacagatgccatcgagccgggcttatggtcttgctgacccatctacaacaggccagatgagtggagccaggtatggaggctcgtccaacatcgcttctcttacccccggtccgggtatgcaaagccccagcagctaccagaataataactacggactaaatatgagtagcccgccacacggcagcccaggtctggccccaaaccagcagaatataatgatttcccctcgtaaccggggttctcctaagattgcttcacatcagtttagccccgtggcaggtgtgcactctcccatggcgtcttctgggaacaccggaaatcactcttttagctccagcagtctttccgccctccaggcgatttcagagggcgtcggcacatctttgctgagcacattgtccagccctggccctaagctcgacaacagtcccaatatgaacattactcagccttccaaagtaagcaaccaggactctaaatctccactgggtttttactgtgaccagaatccagttgagtcatccatgtgccagtcaaactcgagggatcacctgagcgacaaagaatctaaggagtcctctgtagaaggcgcagagaatcaacgtggacccctcgaatcaaagggacacaaaaagctcctccagttactgacatgctccagcgacgatcggggacatagctctttaacaaattcccccttggactccagttgcaaagaaagtagcgtttcagtgacgagcccatccggggtgagctcatcgaccagcgggggagtctcttcgacctcaaacatgcatggatcactgcttcaggagaaacataggatccttcacaaactattacagaacgggaatagcccggcagaagtagctaaaattactgctgaggctacaggcaaggatacctcttctatcacttcatgcggcgatggaaatgtggtgaagcaagaacagctgagcccaaaaaaaaaagagaacaatgccctgctacggtatttgctcgatcgtgatgatccttctgatgccctgtctaaagagcttcaacctcaggtagagggcgtcgataacaaaatgagtcagtgcacttcctccacaatcccctcttcatctcaagagaaggatcccaagatcaagactgagacttccgaggagggaagtggcgacctggataacttggatgctattcttggagacttgacctcctcggatttctacaataacagcattagctcaaatggctcccatttaggcaccaagcagcaagtgttccagggcacaaacagcctaggtctcaagtcctcccagtctgtccagtctattaggcctccatataatagggcagtgtcgttagattctccagttagtgtcggctcctcgccccctgtaaagaacatcagcgcttttcctatgctccccaaacaacctatgttgggcggtaatcccagaatgatggattctcaggagaactatggaagcagcatggggggacctaatcgcaatgtgacagtaacccagactccaagctcaggcgattgggggctgcctaatagcaaggcgggacggatggagcccatgaactcaaatagcatgggcagaccaggaggggattacaacactagtctgccccgtcccgctttgggaggctcaatcccaacactgcctctgcgcagtaacagcatcccgggagcgcgacccgttttacagcaacagcagcagatgctgcagatgagacctggagagattcccatggggatgggggcaaacccctacggccaggcagcggcttcaaaccagctgggcagctggcctgacggtatgctctctatggaacaagtgtcccacggaacccagaacagaccacttctgcggaattctctggacgacctggtgggccctccttccaacctggaaggacagtcagatgaaagggccctcttggaccagctccacaccctgctgtcgaacaccgatgccactggtctggaagagatagatcgtgcccttggcatccccgagctcgttaaccagggacaggctctggaacctaaacaagatgcatttcagggtcaggaagctgctgtcatgatggatcaaaaggccggactgtatggccagacatatcccgctcaaggacctccaatgcagggaggatttcacctccagggtcagtctccctcatttaacagcatgatgaaccagatgaaccaacaggggaactttcccttacagggtatgcacccaagggctaacattatgaggcctaggacaaatacacccaagcagctgcgcatgcagctccagcaacggctccaaggccagcagttcctgaatcaatctagacaggctctggaactgaagatggaaaaccccactgcgggaggcgctgccgttatgagacccatgatgcagccccagcaagggtttctaaacgctcagatggtcgcccagagaagcagggaattgcttagccaccactttcgacagcagcgcgtggcaatgatgatgcaacagcaacaacagcaacaacaacagcagcagcagcagcagcagcaacagcagcagcagcaacagcaacaacaacagcaacagcaaacgcaggcattctctccaccccctaacgttaccgcgagcccgtccatggatggactgctggctggacctaccatgcctcaggctcccccacaacagtttccctatcagcccaattacggaatgggccagcagcccgatcccgctttcggaagagtgagttctccccctaatgcaatgatgtcgtccagaatgggaccaagccagaatccaatgatgcagcatccacaagcagcctcgatctaccagtcaagcgagatgaaaggctggcccagtggcaacctggcccgaaatagctccttcagccagcagcagtttgctcatcaagggaaccccgctgtttactcaatggtgcacatgaatggcagctccggccatatgggtcaaatgaacatgaaccctatgccaatgtccggcatgcccatgggaccagaccaaaagtattgttag

SEQ ID NO: 233089 - DNA, 4053 bp, synthetic construct
  misc_feature 1..4053: note = Description of Artificial Sequence: Synthetic coding sequence
  source 1..4053: mol_type = other DNA
atgtccgggctgggagaaaatctagatcctctcgctagcgactcacggaagagaaaactcccttgcgacactccaggacagggcctcacttgttctggggaaaaaagacggagagagcaggagagcaaatatatcgaggagcttgcagaattgatctccgctaacctgagtgacatagacaacttcaacgttaaacctgataagtgcgcaattctcaaggaaactgtgcgacagatcaggcagattaaggaacaggggaagaccatctccaacgacgatgacgtccagaaggcagacgtgtctagcaccggccagggagtaattgacaaggattcgctgggccctctgctactgcaggccctggacggtttcttatttgtggtgaaccgggatggaaacattgtgtttgtcagcgaaaacgttactcaatatctccaatacaagcaagaggatttggtgaacacttccgtctataacatcctgcacgaggaggatagaaaggactttctaaaaaatctcccaaaatctactgttaatggggtcagctggactaatgaaacacagagacagaaaagtcacacattcaactgccgtatgctaatgaagactccacacgacattctcgaggacataaacgcatcccctgaaatgcggcagcgatacgaaacaatgcagtgttttgccctgagccagccgagggccatgatggaggagggggaagacctgcagtcatgcatgatttgcgtggcgcgtcgaattacgacaggggagcgaacattcccatccaatcccgagtcttttatcacgaggcacgacctctcgggcaaggtcgtgaacattgatacgaactctttgcggtccagtatgaggcccggattcgaagatatcatacgacgttgcattcagcgatttttttccctaaacgatggccaatcctggtcccagaagcggcattatcaggaggtcacaagtgacggtattttcagtccgactgcatatcttaacgggcatgccgagacccctgtctatcggttctctttggccgacggcacaattgttaccgcacagaccaagtcaaagctgttccggaatcccgtgacaaatgaccgacacggcttcgtgagtacccacttcctccagagggagcaaaacgggtatagacccaatcctaaccccgtggggcaaggcatccggccaccaatggccggttgtaactcctccgttgggggtatgtccatgagccctaatcaaggcttgcagatgcctagtagtagggcgtatggcctggctgacccctcaaccaccggacagatgtcaggtgctcgctacggtggcagttccaatattgcctctctgactcccggtccaggcatgcagagcccgagcagttatcaaaacaataactacggcctaaatatgtccagtcctcctcacggctcgcccggtttggcaccaaatcagcagaacatcatgattagccctaggaataggggctcacctaagatcgcgtcccatcagttctctcccgtggctggagtgcattcccccatggcctcctccgggaatacaggcaatcactctttttccagttcttctttatcagcactgcaggcaattagcgaaggggttggaacctctcttttgtccaccctaagcagccctggtcctaaactggataatagccccaatatgaacattacacagccgagcaaagtgtctaatcaggactcaaaatcccctctcggattctattgcgatcagaatcctgtagaaagtagtatgtgtcagagtaattctcgggatcatctgagtgataaggagagcaaagagtctagtgtcgaaggggctgaaaaccaacggggtcccctggaaagcaaaggccataagaaacttctccagttgttaacttgctctagtgacgaccgaggacattcttctctcaccaatagcccgcttgactccagctgcaaggaaagctctgtttcagtgacctctcccagcggagtgagctctagcacttccgggggtgtttcatctacctctaacatgcatggcagcctcttacaggagaagcatagaattctacataagcttctccaaaacgggaactcacctgctgaagtggctaaaattaccgctgaggccaccgggaaggacaccagttccattaccagttgcggagatggtaacgtggtgaagcaggagcagcttagccctaagaaaaaggagaataacgcactgcttagatacctgctcgaccgggacgatcctagcgacgccctgtctaaagagttacagccacaggttgaaggtgtagataacaagatgagtcagtgtacttcctctacaatccccagcagctcacaagagaaggaccccaagattaagacagaaacctccgaggaaggctcgggggaccttgataacctggatgccatcctgggagatcttactagttccgatttctacaataacagtatctcaagcaacggaagccatttgggaaccaagcagcaggtattccagggaactaacagcctgggagattggggcctgccaaacagtaaggctgggcgtatggagccaatgaacagcaattcaatgggaagacccggaggggactataacacaagtctgccacgaccagctctggggggatctatcccaacactgccactgcggtccaactccatccctggtgcgagaccagtactccagcagcagcaacagatgctccagatgaggcccggtgaaatccctatgggaatgggcgctaatccctatggtcaggctgctgcctcaaatcagctaggatcgtggcctgacggaatgctgtcaatggaacaagtttcgcacggaactcaaaaccggccactgctgcgaaatagcctcgacgatctcgttggacccccatctaacctcgagggacaaagtgacgagcgtgctctgctcgatcaattacacacattgctctccaacaccgatgctacaggcttagaggagattgatagggcgctgggtattcccgagttggtgaaccaggggcaggctcttgaaccaaaacaagatgcatttcagggacaggaagccgctgttatgatggatcagaaggccggtttgtacgggcagacataccctgcccagggaccacctatgcaagggggtttccatcttcagggacaatccccctcctttaacagtatgatgaatcaaatgaaccaacaagggaattttccgttacaagggatgcatccacgtgcaaacattatgcgaccgagaaccaacactcctaagcaactgcggatgcagctgcaacagcggctgcagggccagcagttcctcaatcaaagccgccaagctctggagctgaagatggaaaatcctacagccggtggagctgccgtgatgcggccaatgatgcaacctcaacagggcttcctcaacgcccagatggttgcccagagaagccgtgagctgctaagccaccactttagacagcaaagggtcgccatgatgatgcagcaacagcagcagcagcagcagcaacaacagcaacagcagcaacaacagcagcaacagcagcagcaacagcagcaacagcagcagactcaagcgttctcgccaccccctaacgtcaccgcgtctccatcaatggacggtctgctggccggaccaactatgcctcaagcaccaccacagcagttcccctaccaacccaactacggaatgggacagcagccagaccccgctttcggcagggtcagttcccctcctaatgccatgatgagcagccggatgggcccttcccagaaccccatgatgcagcacccacaggcggcttctatctaccagtcaagcgaaatgaagggatggccaagcggaaacctcgccaggaacagttctttttcgcagcaacagttcgcacaccagggcaatcccgcagtttattccatggtccacatgaatggctcctctggccacatgggccagatgaatatgaatccaatgccaatgtccgggatgcctatgggacctgatcagaaatactgttag

SEQ ID NO: 233090 - DNA, 4248 bp, synthetic construct
  misc_feature 1..4248: note = Description of Artificial Sequence: Synthetic coding sequence
  source 1..4248: mol_type = other DNA
atgtcaggtctgggagaaaacctcgatccattggcgtccgactcccggaagaggaaactgccctgcgacactccagggcagggcctgacgtgtagcggagagaagcggcgtcgcgaacaggagtcaaagtacattgaggaactggcggagttgatctccgccaacctgtctgatatcgacaacttcaatgttaagcctgataagtgtgccattcttaaagagaccgtacgccagattagacagataaaggaacagggcaagactatcagcaacgatgatgacgttcagaaggccgatgtttcgtccactgggcaaggggtcatagacaaagacagcctgggacccctgctgctccaggccttagatggtttcctctttgtggtgaaccgggatggcaacattgtctttgttagcgaaaatgtgacgcagtatctgcaatataagcaggaggaccttgtgaacactagtgtgtacaacattctgcatgaggaagatcgtaaagacttcttgaagaatttgcccaaaagcacagtgaacggtgtgagctggaccaatgagactcagcggcaaaagtctcacacatttaactgccgcatgctgatgaagactccacatgatatcctcgaggatattaatgcttccccggagatgcgccaaagatacgaaactatgcagtgctttgcgctctcccagcctcgggctatgatggaggagggagaggacctgcagagctgtatgatctgcgtggctcggcgtatcactaccggagaaagaacatttccctcgaaccctgagagcttcatcactcggcatgacctgtccggcaaagtagtgaacatagacaccaactctctccggtcaagcatgcggccaggcttcgaagatattattcgccgttgtatccaacgatttttcagccttaacgacggccaatcctggtcacagaaaagacattaccaggaggtgaccagtgatggtattttttccccaactgcgtatctaaacggccacgctgagacccctgtctacagattctctctagcagacggaaccattgtgacagcgcaaacaaagagtaagctttttcggaatccagtaaccaatgaccggcacggcttcgtttcgacccactttctgcaacgggagcagaatggataccggcctaatcctaatccggttggtcagggcatcaggcctcccatggctggctgtaattccagcgtcggtgggatgagcatgtctcccaatcaaggcttgcagatgccctcatctcgagcctatggcctagctgacccatccactactggccagatgtctggggctcggtatggagggtcaagcaacattgcaagcttaaccccgggacctgggatgcagtcaccaagtagctaccaaaataacaactatggattgaatatgtcttctcctccccacgggtcccccggtctggcacctaatcagcaaaatatcatgatatcacccaggaaccggggaagtccgaaaatcgcttcccaccagttttcccctgttgccggagttcattctcccatggcctcttccgggaacacagggaaccatagctttagctccagttcactttctgccctacaggccattagcgaaggggtcggcacgtctttactatctaccttatccagccctgggccaaagctcgataacagccctaatatgaacatcacacagccctcaaaagtgtccaaccaggatagtaagagccctctgggcttctattgtgatcagaaccctgtggagtcctccatgtgccagagcaatagtcgtgaccaccttagtgataaagaaagcaaggagagctcagtcgaaggcgcagagaaccagcgcggacctctggagagtaaggggcataagaagctgcttcagctgctgacttgtagcagcgacgatagaggccactctagtctgaccaattcccctctggactctagctgtaaggaatcttcagtatccgtcacatctcccagcggcgtgtcgtcctcaaccagtggaggggttagttcaaccagcaacatgcacgggtccctgctacaagaaaagcatcggattttacacaaactgctccaaaacggcaacagccctgccgaggttgcgaagataacggctgaggccactggtaaggacaccagttctattacatcttgtggggatggaaacgtggtgaagcaggagcaactcagtcccaagaaaaaggaaaacaatgctctgcttagatatttgctggatagagacgatccaagtgatgctctgtcaaaagagctacaaccgcaggtcgaaggcgtggataacaagatgagccagtgtacctcttccactattccttcatcttcacaggagaaagatcccaagatcaagactgaaacttcagaggaaggctcaggggacctggacaacctggacgcaattcttggagatctgacaagcagtgatttttataataactcaatatcctccaacggatcccatttgggcactaagcagcaagtattccagggcaccaactctctcggcctgaagagtagtcagagcgttcagtccattcgtccaccttacaaccgcgctgtgagtctcgactctcccgtctccgttggcagcagcccacctgtgaagaacatcagtgctttcccaatgctccctaagcagccaatgctcggcggaaatcctcggatgatggatagccaggagaattacggctctagtatgggagactgggggctgcctaactctaaggctggccgaatggagcctatgaactccaattctatggggagacccggtggcgattacaatacttcccttcccagacctgctctgggaggatctatccctacccttccacttcggagtaacagcatccctggcgcacgccctgtgctccagcagcagcagcagatgttacagatgaggcccggagaaatcccaatggggatgggggcaaatccctatggccaggcagcagcatcaaaccaactgggcagctggcctgacgggatgctgtcaatggagcaagtgtctcatgggacacagaataggcctctgcttagaaactctctggatgaccttgttggaccgcctagcaacctcgagggacaatcagacgagcgagccttgcttgaccaactgcacactctattgtccaacacggatgcaactggccttgaagagatcgaccgcgcactgggcatacccgaactggttaaccaagggcaggctttagaaccaaaacaggacgccttccaaggacaagaggctgccgtgatgatggaccagaaggccggactctatggccaaacttaccccgctcagggcccaccaatgcagggagggttccatttgcaggggcagtcccctagcttcaactcaatgatgaatcagatgaatcaacagggaaattttcccctgcaaggcatgcatcctcgcgcaaacattatgaggccacgcaccaatacacccaaacagcttcgcatgcagctacagcagcgcctgcaagggcagcaatttctgaatcaatcccgtcaggccctcgagctgaaaatggaaaatccaaccgccggtggcgctgccgttatgcgccctatgatgcaacctcagcaaggcttcttgaatgcccagatggtggctcagcggtccagggaactcctgtcccaccacttcaggcagcaacgagtggccatgatgatgcaacagcaacaacaacagcagcagcagcaacagcaacagcaacagcagcagcagcaacagcagcaacagcagcagcagcaacagcaaacacaggctttttcaccaccccctaacgtgaccgcctcgccttccatggacggactcctagcaggcccaactatgccccaggcaccacctcagcagtttccttaccaacctaactacgggatgggacaacagcctgacccagcattcggcagagttagctctccacctaacgctatgatgagctccaggatgggcccatcccaaaatccaatgatgcaacatccacaggctgcaagcatctaccaatcctccgagatgaaaggctggccctccggcaacctggcccgaaatagctccttcagccaacaacagtttgctcaccaagggaatcctgctgtgtatagtatggtccatatgaacggcagcagcggtcatatgggccagatgaacatgaatcctatgcctatgtctgggatgcctatgggaccagaccaaaagtattgctag

SEQ ID NO: 233091 - DNA, 4275 bp, synthetic construct
  misc_feature 1..4275: note = Description of Artificial Sequence: Synthetic coding sequence
  source 1..4275: mol_type = other DNA
atgtcagggttgggggaaaacctggaccctctcgctagcgatagtagaaaaagaaaactgccctgcgacacaccgggtcagggtcttacctgtagcggagagaaaaggaggcgggagcaggaatcaaaatacatcgaggaactggctgagttgatcagcgctaatttgtctgacatcgacaacttcaatgtcaagcctgataagtgtgccatccttaaggagactgtcagacagattagacagatcaaagagcaaggcaagacgattagcaatgacgatgatgtgcaaaaggcagatgtttcgtccacaggccaaggggtcatcgataaagattccctgggaccgctactgctgcaggccttggatggctttctgtttgtagtgaaccgggacggtaatatagtatttgtgtccgagaatgtaactcaatacctgcagtataagcaggaggatctcgtgaatacttctgtgtacaatattttgcacgaggaggatcgaaaggactttctgaagaaccttcctaagagcacagtgaacggcgtctcctggactaatgagacccagagacagaaatcacacacattcaactgtcggatgctgatgaagacaccgcacgatatcctcgaggatattaacgctagccccgagatgaggcagcgctatgaaacgatgcagtgctttgctttgtcacagccgagagcaatgatggaagagggagaggatctccagtcttgtatgatttgtgtggcacgtagaataacaacaggtgagagaaccttcccctccaatcccgaaagttttattaccaggcacgatctcagtggtaaagttgtgaacatcgataccaattccttacggagttcaatgagaccgggttttgaggatatcatcaggcgatgcatccagcgcttctttagtctgaacgacgggcagtcttggtctcagaaaagacactaccaagaagcttatctaaacgggcacgccgagaccccagtctatcgtttctcccttgctgacgggacaatcgtcaccgcccaaacgaaaagcaagctctttcggaatcccgtcaccaatgacaggcatgggtttgtcagcacgcacttcctgcagcgcgagcaaaatgggtaccggcctaacccgaacccagtaggccagggcattcggccaccaatggcagggtgtaattcttcggtgggtggaatgagcatgtcgcccaatcaggggttgcagatgccatcaagccgagcctacgggctagccgacccatcaacaaccggccagatgagcggcgctcggtatggcggaagttctaacatcgcatctttgacacctggcccaggcatgcagagcccctcaagctatcagaacaacaactacggtctgaacatgtcctctcccccacacggctccccgggactggctcccaaccagcagaacatcatgatctcacctaggaataggggatctcccaaaattgcctcccaccagttttcacccgtcgcaggggtgcattccccaatggcatcttctggcaataccggcaaccactctttcagcagcagttcactatcagcactgcaagctatttcagagggcgtcgggaccagcctgttgtctaccctttctagccctggcccaaaactagataattcccccaatatgaacataacccagccatccaaagtgagtaaccaagacagcaagtctcctctgggattttactgcgatcaaaaccccgtcgagagctcgatgtgtcagagcaatagccgggaccatctcagtgataaagagtctaaggaatcgtcagtggaaggtgccgagaatcagaggggtccactcgagtccaaggggcataagaagctgttgcagctccttacctgcagctccgatgaccggggacacagctcgcttactaacagtccccttgacagcagctgtaaagagagctcagtttcggtaaccagtcctagtggtgtttcctccagcacctccggtggcgtcagtagcactagcaacatgcatggctctctgctccaggagaagcataggattctgcataagctgctccagaatggcaactctcctgctgaggtcgctaaaataacggcggaggctacagggaaagacacctcaagcattacctcatgtggtgacggtaatgttgttaaacaggaacaactgagcccgaaaaagaaagaaaataacgcattgctccgctatctgctggatcgggacgacccttcagatgctttgagtaaggaactgcagccccaggtagagggtgtggacaataagatgtcacagtgcacttcctctacgattccaagctcttcacaggaaaaagaccctaaaatcaagaccgaaacaagcgaagaaggcagtggggatctggataatctggatgctatcctaggggatctcacgagctccgacttttataataactcgataagctcgaacggctcccacttgggcactaagcagcaggtcttccaggggaccaatagccttgggctcaaatcatcacagtccgtgcagtccattaggccgccatataatcgggcagtatcattagactctcctgtatcggtcggcagttccccaccagtaaaaaatatctcagctttcccaatgttacccaaacaacccatgcttggcggaaacccacgtatgatggacagtcaagaaaactatgggtcttccatgggtggccctaatcgcaacgtaactgtgacccagacccccagttcaggcgactggggtttgcccaattctaaagcagggaggatggagcccatgaactccaattcaatggggaggcctggcggtgattataatactagccttcctcgccctgccctgggcggttcgatccctactctcccgttgcggtcgaactctattccaggagccagacctgttctgcagcagcagcagcagatgcttcagatgagaccaggggaaatacccatgggcatgggtgcgaatccatatggccaagccgctgctagtaatcaactgggcagctggcccgacggcatgctgagcatggaacaagtgagtcacgggacacagaatcggccactgcttaggaattcattggatgatctcgtaggccctccctcgaatctggagggacaatcagacgaacgggcactgctcgaccaactccacactttattatcgaacacggacgcaaccggcctcgaggagattgacagggctctcgggatccctgagctagtgaatcagggccaggctcttgagcccaaacaggatgccttccagggacaggaagccgctgtcatgatggaccagaaggcagggctgtacggccagacttatcccgcacaagggcctccgatgcagggaggctttcacctgcaaggacagagtccctctttcaatagcatgatgaaccagatgaatcagcaggggaactttccactgcaggggatgcacccgagggccaatattatgaggccgcgtactaacactcctaaacagctacggatgcagctgcaacagaggctccaagggcagcagtttctcaatcaaagtcgtcaagctcttgagcttaagatggaaaatccaactgcagggggagcagcagtgatgcgccctatgatgcaaccccaggtatcgtcccaacagggattcctaaatgctcaaatggtcgctcagcgcagccgcgaacttctctcccaccatttccgacagcagcgggttgctatgatgatgcagcagcagcagcagcaacagcaacagcagcagcagcagcagcagcaacagcaacagcagcagcagcaacagcaacagcagcagcagacacaggccttttctcctcccccaaacgtcaccgcctccccttctatggatggactactagcagggcctacaatgccacaggctcccccacaacagtttccttaccagcctaattacggcatgggtcaacagcccgatccggcttttggtagagtgagcagccccccaaacgctatgatgtccagtcgcatgggaccttcccaaaacccaatgatgcagcatcctcaagccgcttcgatctaccagagcagcgagatgaaagggtggccttctgggaaccttgctcggaactcttcgttctcacagcagcagttcgctcatcaagggaatcccgcagtgtactctatggtgcacatgaacggatcatccggccacatggggcagatgaatatgaatcccatgcctatgagcgggatgcccatgggccctgaccagaaatactgttag

SEQ ID NO: 233092 - DNA, 4263 bp, synthetic construct
  misc_feature 1..4263: note = Description of Artificial Sequence: Synthetic coding sequence
  source 1..4263: mol_type = other DNA
atgtcagggctgggtgagaatctggatccactggcctctgactcccgaaaacgcaagcttccttgtgatacgccaggtcagggtcttacatgcagcggagagaagcgaagacgcgagcaggagagcaaatacattgaagagttggcggagctgatctccgctaacttgtcagacattgacaacttcaatgtcaaaccagataaatgtgccattctgaaggagaccgtcagacagatacgccagattaaagagcagggcaagaccatttcaaatgacgacgacgtccaaaaggctgatgtttcctcaaccggacagggtgtcatcgataaggactccctgggcccactcttacttcaggcgcttgacggcttcttgtttgttgtcaaccgggatggtaacatcgtttttgtgagtgagaatgtgacgcagtatctgcagtataagcaggaggaccttgtgaatacaagcgtgtacaatattctgcacgaggaggacaggaaagattttctgaagaaccttcccaaatctactgtgaatggggtgagttggactaacgagacacagagacaaaagtcacacacctttaactgtaggatgctgatgaagacccctcacgatatcctggaggacatcaatgcttcgcccgagatgaggcagcgctatgagaccatgcaatgtttcgccctttcgcagccaagggcaatgatggaggagggcgaagatctgcagagttgtatgatctgtgtagcccgaagaataaccacaggggagagaacgttcccctccaatcccgagtcttttatcacccggcatgaccttagcggaaaagttgtcaacattgacacaaattcactacgatcgtcgatgcggcctggctttgaagacatcattcgcaggtgtatacagcgattcttcagtctgaacgacggacagtcctggtcccagaagcgtcactaccaagaggcttatctgaatggccatgccgagacaccagtgtataggttttcccttgctgacgggaccattgtcacggcccagaccaaatccaagcttttcagaaatcccgtgacaaatgatcggcatggatttgtttctacccatttcctgcagagggaacagaacggctacagacccaatcccaatccagtaggccaaggcatacggcctcccatggctgggtgtaacagtagcgtcggtggcatgagcatgagtccaaatcaaggtctccagatgcctagctctcgagcttacgggttggctgatccaagtacgacaggtcagatgtccggggctcggtacggagggagctccaacatcgcaagtctgactcccggacccggtatgcagtcaccatccagctaccagaataacaactacgggctgaatatgagttctcctccccacggttctccaggtcttgccccaaatcagcagaatatcatgattagccctaggaaccggggtagccccaaaatcgcatcgcaccagttctctcccgtagcaggggtgcattctccaatggcatcgagtggcaacacagggaaccacagtttcagcagttcttccctttccgcactccaggccatttcagagggcgttggaacctctctactcagtacactctcttctccaggccctaagcttgacaattcccctaacatgaacatcacccaaccatctaaggtgtctaaccaggactctaagagtcccctcgggttttactgtgatcagaaccccgttgagagcagcatgtgtcaaagcaactctagagatcacctgtccgacaaagagtctaaagagtcttccgttgagggagccgaaaaccaaaggggacctctggagtctaagggtcacaagaagctgttgcagctcttgacatgctcctcagatgacaggggccactcctctctgacgaattcccccctggattcttcctgcaaagaaagcagtgtatcggtgacgagtccaagcggggtgagctcaagtaccagtgggggtgtgtccagcaccagtaatatgcacgggtcactgctccaagagaagcaccgcattcttcataagttactgcagaacggaaactctcccgcagaggtggctaagataaccgccgaggcgaccggcaaagatacttcttccataacatcttgtggggacggaaatgtggtgaagcaggaacagctgtcgcccaagaaaaaggaaaacaacgctctcctcaggtatctcctggacagggatgacccctctgatgcactttccaaagaattgcagccacaggttgagggcgtggataacaagatgtcacagtgtacctccagcacaataccttcctctagtcaggaaaaagatcccaaaattaaaactgagacctccgaagagggttctggggacctggacaaccttgacgcgattcttggagacctgaccagtagcgacttctacaataatagcatctcctcaaatggtagtcatttgggcacgaaacagcaggtctttcagggcactaattcgctgggccttaagtcgtctcagtcagtgcagagcatacgtcctccctacaaccgcgcagtgtctctggactcaccggtgtcagtggggtctagcccaccggtcaaaaatatcagtgcctttccgatgctgccgaaacagcccatgcttggtggcaaccctcgcatgatggacagtcaagagaactatggctcaagcatggggggacccaaccgcaacgtgaccgtgactcagacgcctagtagtggagactggggattgcctaactctaaagcgggacgcatggagcccatgaactcaaatagcatgggacgccctggtggggattataacacgtccctcccaagaccagccttgggaggctccatccctactctgcctctgcgctccaacagtatccccggagccaggccggtgctgcagcagcaacagcagatgctccagatgcggccaggtgagattccgatgggtatgggcgcaaatccgtatggccaggccgctgcgagtaatcagctcggttcctggcctgatggcatgttgtctatggaacaggtttctcatggcacccagaatcgaccgctcctgcggaactcactggacgacctggttggcccaccttcgaaccttgaagggcagtccgatgaacgggctctcctggatcagctacacacactgttatctaataccgatgccactggattagaggagatcgacagagcactcggcatccctgaactcgtcaaccagggccaagccctcgaacctaaacaggacgcctttcagggtcaggaagccgctgtgatgatggaccagaaggccggtctgtatggacagacctatccagcccaggggccaccaatgcaggggggtttccaccttcaggggcagagcccatcattcaattctatgatgaatcagatgaaccagcaggggaactttcccctgcaagggatgcaccccagagccaatatcatgcggcctaggaccaacactcctaaacagctgcgaatgcaactccagcagaggctgcagggacaacagtttctgaatcagtcacgccaggcgcttgagcttaagatggaaaacccaacagctggaggcgcagctgtaatgcggcctatgatgcagccacagcagggctttttaaatgcccagatggtggcgcagcggagcagggagcttttaagtcaccactttagacagcagcgcgttgcaatgatgatgcaacagcaacagcagcaacaacagcagcaacagcaacaacagcaacaacagcagcagcagcaacagcagcagcaacagcagcagcagacccaggcattctcacctcccccaaatgtcacagccagcccctccatggacggcctcctcgccggtcctaccatgccccaagcaccccctcagcagttcccgtaccaaccgaactatgggatgggacagcaacccgatcctgctttcggtcgcgtgagttccccgccaaatgccatgatgtcttcgaggatggggccatcccagaatcccatgatgcagcatccccaagccgcaagcatctaccagtcttctgaaatgaagggctggcccagcgggaacttggcacgaaactccagcttttcacagcaacaattcgctcatcagggtaacccagcagtgtattccatggtgcacatgaatggatcttcaggtcacatgggacagatgaatatgaatccaatgcccatgagtggcatgccgatgggcccagaccaaaagtactgttag

SEQ ID NO: 233093 - DNA, 774 bp, synthetic construct
  misc_feature 1..774: note = Description of Artificial Sequence: Synthetic coding sequence
  source 1..774: mol_type = other DNA
atgatggaagagggcgaggatcttcaatcttgcatgatctgcgtggcgagacgaattacaacaggggagcgcacttttccttctaaccctgagagtttcataactagacacgacctctccggcaaggtggtcaacattgacaccaattctctcagaagttcaatgcgaccgggattcgaagacatcatccgcaggtgcatccagcgattttttagccttaatgatggtcaatcatggtctcagaaaagacactatcaggaggcctatctgaatggccacgccgaaacccccgtttaccgatttagcctggctgatggcacaatagttacggcccagaccaagagcaaacttttccgaaatcccgtgactaacgatcgccacggatttgtaagcacccattttcttcagagagaacagaatggctacagaccaaatcctaacccagtgggccagggcatcaggcccccaatggcgggttgtaattcttccgtgggcggaatgtcgatgagccccaatcaaggtctgcaaatgccaagtagcagagcctatgggctcgcagaccctagcactacagggcagatgtccggcgctaggtacgggggaagttcaaacattgcaagcctgacccctggacccggtatgcagagtccaagttcctatcagaacaataattacggcctcaatatgtcatccccccctcacggcagtccgggattggcccctaatcagcaaaacattatgatcctccttgtaatcgtcggcgtacagcgttag

SEQ ID NO: 233094 - DNA, 864 bp, synthetic construct
  misc_feature 1..864: note = Description of Artificial Sequence: Synthetic coding sequence
  source 1..864: mol_type = other DNA
atgaacacattccaggatcagtctggtagtagcagcaaccgcgaaccgctgctgcgatgcagtgatgctagacgtgacctggagctggccattgggggtgttcttagggctgaacagcaaatcaaggataacctgcgagaagtgaaagcccaaattcactcctgcatatccaggcatttggaatgcctgagatcacgcgaggtgtggttgtatgaacaggtcgatctgatctatcaactgaaagaagaaaccttgcagcaacaggcccagcagctttattcactcctcggtcagttcaactgcttgacccatcaactagaatgtacacagaacaaggacctcgctaaccaggtttcagtctgcctagagcgcctcgggtctctgactttaaagcctgaagattccaccgtgctccttttcgaagctgataccatcaccttacgacagacaatcaccactttcggatccctgaaaacgattcaaatccctgagcacctcatggcgcacgctagcagcgcaaacatcgggccatttcttgagaaacgtggctgtatctccatgcccgagcagaaaagcgcctccggtattgttgcggtcccattttccgaatggctgcttgggtcaaagccagcctcaggataccaggctccctatattccttctacggatccgcaggattggctgacgcagaagcagaccctggagaattctcagcaggaagtcctgctgaactctcccctgcaggaggaacataattttccaccggaccattacgggttgcctgccgtgtgcgatctgttcgcctgtatgcagctgaaggtagacaaggagaagtggctatacaggacccctctccaggtgtag

SEQ ID NO: 233095 - DNA, 1845 bp, synthetic construct
  misc_feature 1..1845: note = Description of Artificial Sequence: Synthetic coding sequence
  source 1..1845: mol_type = other DNA
atgaacacttttcaagaccagagcggctccagttctaaccgggagcctctgctccgttgttcggatgcaaggagggacctcgaacttgcaatcggcggagtgctgcgcgctgagcagcaaatcaaagacaatctaagagaggttaaggcccaaattcactcttgtattagtcggcatctcgagtgcctgcgtagccgtgaagtgtggctttatgagcaagtggatctgatataccagcttaaggaagagacccttcagcaacaggcgcagcaactttattctctgctggggcagttcaactgtctgacccaccagctcgaatgcacccagaacaaggacttagctaatcaggtgtccgtgtgtctggaaagattgggatctctgacactgaagccagaagattcaaccgttctcctttttgaagccgataccattactcttcgccagacaattacgacattcggctccctcaagactatccagattccggaacacctgatggcccacgcctcttcggcaaacatcggtcccttccttgagaagaggggttgcatctctatgccagaacagaaatccgccagtggaatcgttgccgtgccttttagtgaatggctgctggggagcaagccagcatctgggtaccaggcaccttacataccgagtactgacccccaggattggctgacacaaaaacagaccctcgaaaattcccagacttctagtcgggcatgcaactttttcaacaatgtcggaggcaacctgaaagggctcgagaactggctgctgaagtccgaaaaaagcagctatcagaaatgcaattctcacagtactacctcgtcatttagtatagaaatggagaaagtcggggaccaggagctccccgaccaggatgagatggatctctccgattggcttgttacgccacaggagtcacataagctgaggaaacctgagaatggcagtagagagacctcagagaaattcaagctgctgtttcaaagctacaacgtcaatgactggctggttaagacggacagctgcaccaactgtcagggaaaccagccaaaaggggtggaaatagagaacttagggaatctgaaatgtcttaacgaccacttggaggctaagaaacctctttcgactccctctatggtcacagaagattggctcgtgcaaaaccaccaggacccatgcaaggtggaagaggtgtgccgggctaacgagccctgcaccagcttcgcagaatgcgtttgtgacgagaattgtgagaaggaagctctgtataaatggctgctgaaaaaagagggtaaagataaaaatggcatgcctgtcgagcccaaaccagagcctgagaaacacaaagactctctgaatatgtggctgtgccctagaaaagaggttatagagcagacaaaagcgcctaaggcgatgacaccatctaggatagcagattcatttcaggtcataaagaactcccctctctcagaatggctgatcaggcctccttataaggaaggttctcctaaagaagtgcccggaactgaggatcgcgctgggaagcaaaagttcaaatctccaatgaacacttcatggtgttcgtttaatactgccgactgggtccttcccggaaagaagatgggcaatctctcccaactaagttcaggagaagataaatggctcctgcgaaagaaagcccaggaggtcctcctaaattcacccctccaggaagagcacaacttcccacccgatcattatggactgccagctgtgtgtgacctgttcgcctgtatgcaattgaaagtggacaaagagaagtggctttacaggacacctcttcagatgtag

SEQ ID NO: 233096 - DNA, 1728 bp, synthetic construct
  misc_feature 1..1728: note = Description of Artificial Sequence: Synthetic coding sequence
  source 1..1728: mol_type = other DNA
atgaacacattccaggaccaatccggatcttccagtaacagagaaccactgctcaggtgtagcgatgcgcgacgagacttggagctcgctattggcggagttctgcgggctgagcaacagatcaaggataacttacgggaggtgaaagcgcagatccattcctgtattagtcgccacctggaatgcctgcgtagtcgcgaggtctggctgtacgagcaggttgacctcatctatcagctgaaggaggaaacactccaacagcaggcccagcagttatacagcttactcgggcaattcaattgccttacacaccagctggagtgtacacagaataaggatttggctaatcaggtgtcagtatgcctagaacgactcggatccctgaccctcaagcccgaggacagcaccgttctgctttttgaagcagatacaatcactctgagacagacaattactaccttcggatccttgaagacaatacagattcccgagcatctcatggctcacgcctcttccgctaacatcggtcctttcctggaaaaacgtggctgtatctcaatgcctgaacagaagtcggcctctggaatcgtagccgtgccgttctctgagtggctattaggtagtaaacccgcaagcggttatcaagcaccctacatcccatcaacagacccacaggactggttgactcaaaaacagacattggaaaattcccagacctctagtcgggcttgcaacttctttaataacgtcggtggcaacctcaagggactcgagaactggttattaaagagcgaaaagagctcatatcaaaagtgtaacagccactctacaactagctcctttagtattgagatggaaaaagtaggggaccaagaactcccagatcaagatgagatggatttgtctgactggctggtcactccgcaagagtcacacaagctgaggaagcctgagaatgggtcaagagaaacaagtgaaaaatttaagttgttattccagtcttacaatgttaatgattggctggtgaagacggacagttgcaccaactgccaggggaaccagcccaaaggcgtagagatcgagaacctcgggaacttgaagtgtctgaacgatcacctggaggccaaaaagccactctccaccccaagcatggtaaccgaagattggttggtgcagaaccaccaggacccctgtaaagtggaagaggtatgtagggccaacgagccatgtacctcttttgcagagtgcgtgtgcgatgagaattgtgagaaggaggccctgtacaagtggttgctgaaaaaagaaggaaaagacaaaaacggaatgcctgtggagcccaaaccggaaccagagaagcataaggactctctcaacatgtggctgtgccctcgcaaagaggtgattgagcagacaaaagccccaaaggcaatgaccccaagtagaatcgcagacagtttccaggtgattaaaaacagccccctgtccgagtggctgattcgtcctccttataaagagggctcccctaaggaggttccagggaccgaggatagagccggaaaacaaaagtattaccttatccacctttatcggaggaacatcacaagcccccaaacaatcatggcctccctgcagtttgtgatcagcctgcccgtgtgctccctcaagctcataaaacggtcaggctacattgagttgctgtatcggtgcgagggtatggacaagagttag

SEQ ID NO: 233097 - DNA, 1845 bp, synthetic construct
  misc_feature 1..1845: note = Description of Artificial Sequence: Synthetic coding sequence
  source 1..1845: mol_type = other DNA
atgaatactttccaggaccaaagcgggtcctcgtccaatcgcgaaccactgctgcgatgtagtgatgctaggagagatctggagctcgccattggaggagtactaagggcagagcagcagatcaaggacaacttaagagaggtgaaagctcaaattcactcatgtatctctcgtcacctagaatgcctacggtcccgggaggtgtggttgtatgaacaggtggacctcatctatcagctgaaggaagagacgttgcagcagcaggctcaacagctgtactccctactgggccaattcaactgtctcacacaccagctggagtgcacccaaaacaaagacctagctaatcaggtcagtgtctgcttggagcgcctgggtagtcttacattgaaaccggaagactcaactgtgctgctgttcgaggcggacacaataaccctgcggcagactatcactacctttggctctctcaaaacaatccagatccccgagcacctcatggcacatgccagctctgcgaatatcggaccattcttagagaagcgcggatgcatttcgatgcctgaacagaagtccgcttccggaatcgtagcggtcccattttccgaatggcttcttggctcgaaaccagcctctgggtaccaggcgccttacattccctctaccgacccccaggactggctgacccaaaagcagacactggagaactctcagacgtcctcccgtgcgtgtaattttttcaataatgtggggggaaatctgaaagggctggagaactggctgctgaagagcgaaaaaagtagttatcagaagtgcaacagtcactctactacttcttcattctctattgagatggagaaggtgggtgaccaggaacttcccgatcaagatgagatggacttgtccgactggctggtaacaccacaggagagccacaagctccgaaagcccgagaacggcagccgagagacttccgagaaatttaaactgctcttccagtcatacaatgtgaatgactggctcgtgaagacggatagttgtactaattgtcagggaaatcagcctaagggtgtcgaaatcgaaaacctcggtaacctgaagtgcctaaacgatcatcttgaggccaaaaagcctctgagcacaccctcaatggtgacggaagactggctggtgcagaaccatcaggatccatgcaaggtggaggaggtttgtagagcaaatgagccatgcactagtttcgctgagtgcgtctgcgatgaaaattgtgaaaaagaggccctttacaaatggctgctgaaaaaagagggaaaggacaagaatgggatgcctgtagagcctaaacccgagcccgagaagcacaaggactccctgaacatgtggttgtgccccaggaaagaggtgattgagcaaaccaaggcccctaaggccatgacacctagcagaattgctgatagctttcaggtgatcaagaattcgccgctgtctgaatggctcattagacccccatataaagagggctcccccaaggaggtacctggcaccgaagatcgggctgggaagcagaagttcaaatcacctatgaataccagctggtgcagtttcaatacggccgactgggtcctgcctggcaaaaagatgggtaacttgtctcagctgtcctccggtgaggacaagtggctcctcaggaaaaaagctcaggaagtgctcttgaattcacctctgcaggaggaacacaattttcctcccgatcattacggactgccagctgtatgtgatctgttcgcatgcatgcagctgaaagtggataaagaaaagtggctttaccggactccgctgcagatgtag

SEQ ID NO: 233098 - DNA, 1347 bp, synthetic construct
  misc_feature 1..1347: note = Description of Artificial Sequence: Synthetic coding sequence
  source 1..1347: mol_type = other DNA
atggctcatgcaagctccgccaatatcgggcctttcctggaaaaacggggttgtattagtatgccagagcagaaatccgcttcgggtattgttgcagtgccattctccgagtggctgctcggtagcaagcccgcatctgggtatcaagctccttacattcccagcaccgatccacaggactggctgacccaaaaacagacacttgagaactcccaaactagttcgagagcatgcaatttttttaacaacgtcggaggtaatcttaagggcctcgagaactggttactgaagtcagaaaagagctcataccagaaatgcaatagtcactctaccacgtcatcgttctccattgagatggagaaggtaggagaccaggagctacctgaccaggatgagatggatctatccgactggcttgttaccccgcaggagtcccacaaacttcgcaaacccgagaatggctcaagggagacctccgagaaatttaagctgttgttccagtcctataacgtcaatgactggctcgtgaagacggacagttgcaccaactgtcaaggcaaccagcctaaaggtgtggaaattgaaaacttaggtaatttgaaatgtctcaatgaccacctggaagccaagaagccattgtcgactccaagcatggtgactgaagactggttggtgcagaaccaccaagacccatgcaaggtcgaggaggtctgtagagctaacgaaccgtgtacttcatttgccgaatgcgtctgcgatgaaaattgtgagaaggaggctctgtataagtggttactgaaaaaagagggcaaagacaagaacgggatgccagttgagccaaagcccgagcctgagaagcataaggacagtttaaacatgtggttatgcccgagaaaggaggttatcgagcagacaaaagcacctaaagctatgactcccagccgcattgccgacagcttccaggtgattaaaaactcccctctatcagaatggctcatacgacctccatacaaggaaggctccccgaaggaggtccccggtactgaggatcgcgctgggaagcaaaaatttaaatcaccgatgaacactagctggtgctcgtttaacacagccgattgggtgctgccaggaaagaagatgggtaacctgtcacaactgagcagcggagaggataaatggctcctgcggaaaaaagcccaagaagttctgctgaattccccactgcaggaggagcacaattttccaccagatcactatggcttgccagccgtctgcgatttgttcgcctgcatgcaactcaaggtcgacaaggagaagtggttatatagaaccccactgcagatgtag

SEQ ID NO: 233099 - DNA, 1545 bp, synthetic construct
  misc_feature 1..1545: note = Description of Artificial Sequence: Synthetic coding sequence
  source 1..1545: mol_type = other DNA
atgaacaggtggacactgttcatcagcctcaagagaagacacttcaacagtagactgtctagctcaacacgtctgggcagcctaactctaaaaccagaggattccacagtgctgcttttcgaggctgacaccataactttacgacagaccatcactacctttgggtcattgaagaccatccagatccccgagcacttaatggctcacgcaagctcagccaacataggcccattcctggagaaaaggggctgcatcagcatgcccgaacagaagagtgcgagcggcatcgtagctgttcccttctcagagtggcttctcggctccaagcccgcttccggttatcaagcaccctatatcccaagtacggaccctcaggactggctcacccagaagcagacactggagaatagccaaacatcatcgcgagcatgcaacttctttaataatgtgggcggaaacctgaaggggctggaaaactggttgttaaagtccgaaaaatctagctatcagaaatgcaacagtcactctaccacttcatcattctctatagaaatggagaaggttggcgatcaggaactcccagaccaggatgagatggatctttccgattggctggtgacccctcaggaaagtcacaaactgagaaagccagaaaacggctcccgggagacctccgagaagttcaagttgctgtttcagagctacaacgtgaatgactggctcgtgaaaacagatagttgcaccaactgtcaggggaaccagcccaaaggagtggaaattgaaaatctgggcaatttaaagtgcctcaacgatcacctagaagccaagaagcccctatcgacaccaagcatggtgactgaggactggttggtccaaaaccaccaggatccgtgcaaggtggaggaggtgtgccgtgccaacgagccctgtacttcctttgctgaatgtgtctgcgacgagaattgcgaaaaggaggctctgtacaaatggttgttgaaaaaggaaggaaaggataaaaacggaatgccagtggaaccgaaacccgaaccagaaaagcataaggacagcctcaacatgtggctctgccctcgcaaagaggttatcgagcagacaaaggcgcctaaagctatgaccccttctagaattgcggactcatttcaggtcatcaagaacagccccctgagcgagtggctgatcaggccaccatacaaggaggggagccccaaagaagtgccgggaacggaagatcgcgctggcaagcaaaaatttaagtccccaatgaacacaagctggtgcagcttcaatacagccgattgggtgctgccgggaaaaaagatgggcaaccttagccagctgtcttctggcgaggacaaatggcttttgagaaagaaagcacaggaggtcctgcttaattctcccctgcaggaagagcacaacttcccgcctgaccattatggccttcccgcagtgtgcgatttgttcgcttgcatgcagctcaaagtggataaggaaaagtggctataccggactcctctacagatgtag

SEQ ID NO: 233100 - DNA, 795 bp, synthetic construct
  misc_feature 1..795: note = Description of Artificial Sequence: Synthetic coding sequence
  source 1..795: mol_type = other DNA
tgatgcacacctgcttgggcagcagagttggattcagtgagtaaacaaaaaaaaaatccgaagcctacctttaaaaaaaaaactgaagagagaacctgtgaggttaagaaggtgagcagactcggctctctgacacttaagcctgaagactctacagtgcttcttttcgaagctgacaccatcactctgcgacagacaattaccaccttcggctctttgaaaaccatacagattcctgagcacctgatggctcacgcctcatcagctaatatcggtccattcttagagaaaaggggttgcatcagtatgcccgaacagaaaagcgcttctgggatcgtagccgtgccattctccgagtggttactggggagcaagcccgcttccgggtaccaagcaccatatataccctccacggacccacaagattggctgactcagaagcagaccctggagaattcccagacaagtagtagagcctgtaattttttcaataacgtcgggggtaacctgaagggcctcgagaactggctcttgaagtctgagaagagctcctaccagaagtgtaactcccacagtacaacgagttcgtttagcatcgagatggaaaaggtgggagaccaggagctgcccgatcaggatgagatggacctgtcggattggctggtgacaccccaagagtcgcacaaactgcggaaacctgaaaacgggtcgagggagaccagcgagaagtttaaattgctgttccagagctacaacgttaatgactggctcgtcaagacggacagctgcacctag

SEQ ID NO: 233101 - DNA, 1893 bp, synthetic construct
  misc_feature 1..1893: note = Description of Artificial Sequence: Synthetic coding sequence
  source 1..1893: mol_type = other DNA
atgggagctcaacttacgaccttcgctctggccggtgcggtcagacgcatgaatacctttcaggaccagtctggttcctccagcaatcgagagcctttattgagatgctccgatgctcgacgcgacctcgaattggcaatagggggtgtcctgcgggctgagcagcagattaaggataatctgagagaggtcaaagcccagattcatagctgcatcagccggcacctggaatgcctccgcagtcgggaggtgtggctgtatgagcaagtggacctgatttatcaactgaaggaggaaactctgcaacaacaagcacagcagctttactcgctgctgggacagtttaactgccttactcatcaactggaatgcacccagaacaaggatctggccaatcaggtgagtgtttgtttggaacggcttggttcacttacactgaaacccgaggactccacagtattactgttcgaagcggatacaataacactaaggcagaccattaccacattcgggagcctgaagaccatccagatccccgaacacctgatggcacatgcaagttcggcaaatattgggccttttctggaaaagagaggttgcattagcatgcccgagcaaaaaagtgcaagcggtattgtggcagtccctttctccgaatggctgctggggtccaagccagcgagcggatatcaggcaccatacattccttctactgatccacaagattggctcacacagaagcagacacttgagaattcacagactagttccagggcttgcaatttcttcaataatgttggagggaacctgaaggggcttgagaattggctcttgaaaagtgagaaaagttcctaccagaagtgcaattcgcacagtactacatcatcttttagtatcgaaatggaaaaggttggagatcaagagcttccagaccaagacgaaatggatctatcagattggctcgtgaccccccaggagtcacacaaactcagaaagccagagaacggatcaagagagacctcggagaagttcaaattactttttcagagctataatgttaatgattggctggtcaaaacagattcttgcaccaattgtcaggggaaccagcccaaaggggtagagattgagaatctcgggaatctgaagtgtttgaacgaccatctcgaggccaagaagccgttgagcaccccctcaatggtgactgaggactggcttgtccaaaatcaccaggacccctgtaaggtagaagaggtgtgtcgtgctaatgagccgtgtacttcatttgcagagtgtgtgtgcgacgagaactgcgagaaggaggccttatacaaatggttgctaaaaaaagagggtaaggataagaacggcatgcccgtggaacctaaaccagagcctgaaaagcataaagactccctgaacatgtggctatgcccacgcaaggaggtcatcgaacagacaaaggcacccaaggccatgacgccaagtcgcatagctgattcctttcaggttatcaagaattccccactttccgaatggcttatcagacccccatacaaggaaggcagccccaaggaagtcccaggtacggaggacagggccggaaagcagaagtttaaatctcctatgaacacctcctggtgtagtttcaacacggcagactgggtcttacccggtaagaagatgggcaatctgagtcaattatcttccggtgaggacaagtggctgcttcgtaagaaggctcaggaagttctgctcaattctcccttacaggaggaacataacttcccccctgatcactatggactgccggcagtctgcgacctgttcgcctgtatgcaactgaaggtggacaaagaaaaatggctttacaggacacctctgcagatgtag

SEQ ID NO: 233102 - DNA, 1845 bp, synthetic construct
  misc_feature 1..1845: note = Description of Artificial Sequence: Synthetic coding sequence
  source 1..1845: mol_type = other DNA
atgaacacatttcaagatcaaagcggatcatcctcgaatcgtgaaccgctcctgagatgcagtgatgccagacgagatctggaattagccatcggaggggtcctgagggctgaacagcagatcaaggacaatctgcgcgaggttaaggcccaaattcattcctgtatctctagacacctcgaatgtctcaggtcacgagaggtgtggctttatgagcaagtagacctaatttatcagctgaaggaggagaccctccagcagcaggctcagcagctatactccctactagggcagttcaactgcctgacccaccagctggaatgtacccagaacaaggacctggctaaccaggtttcagtttgcctggagcgtttagggtctctcactttaaagcccgaagatagcacggtcctcctgttcgaggctgatacaattactttgcgacaaaccattactacctttgggagcttgaagacgattcaaatcccagagcatctgatggcacacgctagttccgcgaacataggcccattcctcgagaagagaggctgtatctctatgccagagcaaaaaagcgcgagcggcatagttgcagttccttttagtgagtggcttctaggcagtaagcctgcctctggctatcaggcaccatacatcccgtcaactgatccacaggattggttgacccagaagcagaccctagagaacagccaaacaagctctagagcctgcaattttttcaataatgtcggagggaacctgaaagggctcgagaattggctgctgaaatctgagaaatccagctaccagaagtgcaactctcattccacaacttcttccttctctattgaaatggagaaggtgggggatcaggaactacccgatcaagatgaaatggatctttcagattggctggtcactccgcaggaaagtcataagttgcgtaaacctgaaaatggctcccgcgagaccagcgagaagttcaagctgcttttccagtcatataacgtgaacgactggctggtaaagacagattcctgtaccaactgtcagggcaatcaaccaaagggagtggagatcgagaatctgggtaacctgaaatgccttaacgaccacttggaagccaagaagccactgagcacaccttcaatggtgactgaggattggcttgtgcagaaccatcaagacccatgcaaggtggaggaagtgtgccgggcaaacgagccctgtacttcatttgcagagtgcgtatgcgatgagaattgtgagaaggaagctctgtataagtggctgctaaaaaaggaggggaaagacaagaatggtatgccggtagagcccaagcctgaacccgaaaaacataaagattcactgaacatgtggctgtgccctcgtaaggaggtgattgaacaaacaaaagcacccaaagccatgacgcccagtaggatcgccgattctttccaggttataaagaattcgccattgtcagagtggctgatccgcccaccatacaaggaggggtcgcccaaagaagtgccgggaaccgaggacagagcaggcaagcaaaagttcaaaagtcctatgaacacatcttggtgctcatttaatacagcagactgggtgctcccaggtaaaaaaatgggtaacctgagtcagctgtcatccggcgaagacaagtggctgcttcgtaaaaaggcccaggaggtgctgcttaactcccccctgcaagaagagcacaattttccccctgatcattacggccttcccgctgtgtgtgatctgttcgcctgtatgcagctgaaagtggataaagagaaatggctctacagaactcctttgcaaatgtag

SEQ ID NO: 233103 - DNA, 1953 bp, synthetic construct
  misc_feature 1..1953: note = Description of Artificial Sequence: Synthetic coding sequence
  source 1..1953: mol_type = other DNA
atgggcgctcaactgaccacattcgcactggcaggcgcagtgagaaggatgaatacctttcaggaccagtctggtagctcatccaatcgcgagccgctgctgaggtgctccgacgctagaagagatctggagcttgctatagggggagtgcttcgcgcagagcaacagatcaaagataatttgcgcgaggttaaagcccagatccactcctgcatctcccgccatttagagtgcctgagatccagggaagtttggctgtacgaacaggtcgatttgatataccagttaaaggaggagaccttgcagcagcaggcccaacagctttatagcctcctgggacagtttaactgtctaactcatcaactcgaatgcactcagaacaaagatctggctaatcaggtttccgtctgcctcgagaggttgggtagtctcactctaaagccagaagattctacagtgctcctgttcgaggccgataccatcacactccggcagaccatcacaacgttcggctctctgaagactatccagattcctgagcatctcatggcccacgcatctagcgcaaatatagggccatttctggagaaacggggttgcatcagcatgcctgagcagaaatccgcttctggaattgtggcagtgccatttagcgaatggctcttgggtagtaagcctgcctcaggctaccaggcaccgtacataccctcgaccgatccccaagattggctcactcagaaacagacgctcgaaaactcccagactagctccagagcttgcaatttttttaacaacgtgggcggtaatctgaaaggcttagaaaattggctgctgaagagcgaaaagtctagttaccagaagtgtaattctcacagcacgactagttccttcagcatcgagatggaaaaggtcggtgaccaggagctgccggatcaggacgagatggacttaagcgattggttggtcactccccaggaatcccacaagctcagaaagcctgaaaacggatcccgggagacctcagaaaagttcaagcttctgtttcagtcctacaatgtgaatgattggctggtgaagacggattcttgcacaaactgtcaaggtaatcagcccaagggcgtcgagattgagaacctggggaatctgaaatgtctgaacgaccacctggaggctaaaaaacccctatctacaccatctatggtgaccgaggactggctggtgcagaaccaccaggatccctgcaaagtcgaagaggtttgtagagccaacgagccttgtacgtcctttgccgagtgcgtgtgcgatgaaaactgtgagaaagaggccctgtataagtggctgcttaaaaaagaagggaaggacaagaatggcatgcctgtggaaccgaagcctgagcccgagaagcacaaagatagtctcaatatgtggctctgtcccaggaaagaagttattgagcagacaaaagccccaaaagctatgaccccaagtagaatcgccgatagctttcaggtcattaagaacagtccactgtccgagtggctcattaggccaccctataaggagggaagtcccaaggaggtccccggaacagaggacagggctggaaagcagaagtttaaatcacctatgaacacgtcatggtgctcgtttaatacagcagattgggtacttcctggcaaaaaaatggggaacttgagtcagcttagctcgggtgaagataaatggcttctgagaaaaaaagcccaggaagtgctactgaattcgcctctccaggaagagcataactttccgcctgatcattacggtttacctgccgtttgtgatctgtttgcctgtatgcagctaaaagttgataaagaaaagtggctctaccgcaccccccttcaggcttactttaagatgaacttccaggacgtcacagtgggaaattttcagattccttgtggcttttag

SEQ ID NO: 233104 - DNA, 6191 bp, synthetic construct
  misc_feature 1..6191: note = Description of Artificial Sequence: Synthetic coding sequence
  source 1..6191: mol_type = other DNA
atggtcctggatgacctgcctaacttggaggacatctacacgagtctgtgttcatctacgatggaggattccgaaatggattttgattccggcctagaagatgacgataccaagagtgactcgatcctggaggacagcacaatcttcgttgcttttaagggcaatatagacgacaaggactttaagtggaagttggacgcaatcttaaagaatgtgccgaacctgctccatatggagtcttccaagctgaaggtccaaaaagttgaaccttggaatagcgtgcgtgttacctttaatattccacgggaggcagctgagagactcaggatccttgctcagtctaacaatcaacagctcagagatctcggaattctttctgtgcagatcgagggggaaggggcaatcaatctggccttggctcagaatagatcccaggatgtaagaatgaacggccctatgggggcagggaattctgtgcgcatggaagcaggattcccaatggcctccggtccgggaattattcgcatgaacaatcctgcaactgtgatgattcctccgggtggcaatgtgtcctcctccatgatggcccctggccctaacccggagctacagccacgtacgcctaggccagccagccagtcggacgcgatggatccactgctgtctggccttcacatacagcaacagtcacacccatctggatccctggccccaccacaccatccgatgcaaccggtgtccgtgaaccgccagatgaacccagccaacttcccccaactgcagcagcagcagcagcagcagcagcagcagcagcaacagcagcaacagcagcagcagcagcaacagcaacagcagctgcaggctcggccacctcagcagcaccagcagcagcagccccagggcattaggcctcagtttacggcacccactcaggtgcctgtgcctcccggatggaaccaattgccgagtggcgcattgcagccaccaccagcacagggtagtctgggcacaatgactgcaaatcaaggctggaaaaaggcaccactccctgggcctatgcagcagcaacttcaggctaggccttcgctcgcaaccgtgcaaaccccaagtcatccacctcccccatatccattcgggtctcagcaggcgagtcaggcccacaccaattttccacaaatgagcaacccaggtcaatttacggcccctcagatgaagtctcttcagggcggaccaagtcgggttccaaccccgttgcaacagcctcatctgaccaacaaaagcccagcatcaagcccttcaagcttccagcaaggctcccccgcaagttcccctactgtcaaccagacacagcagcaaatgggcccacgcccaccacagaacaatcctttgcctcaggggtttcaacagccagtcagtagcccaggcaggaatcctatggtgcaacaaggaaacgtgccccctaacttcatggtaatgcagcagcagcccccaaaccaaggcccacagagtctacatcctggactcggcggaatgccgaagaggcttcctcccggttttagcgccggtcaggctaatcctaacttcatgcaaggccaggttccaagcacaaccgccaccacacccggtaattctggcgctccccagctgcaggccaaccagaatgtccagcatgcgggaggccagggagccggtccccctcagaatcagatgcaggtctctcacggacctcccaatatgatgcagccgtcactgatgggcattcacggtaatatgaataatcagcaggccggaaccagcggcgtgccccaagtgaatttgtctaacatgcaaggacaaccgcaacaaggccctccaagccaactaatgggaatgcatcagcaaatagtgcctagccagggtcagatggttcagcagcaaggtacccttaaccctcagaatcctatgatcctttctagagcccagctgatgccccagggacagatgatggtcaacccgcctagccaaaacctggggccttcgcctcaacgcatgactccacctaagcaaatgctgtctcagcaggggccacagatgatggcgcctcataatcaaatgatgggaccacagggccaggtgctgctccagcagaacccaatgattgagcagataatgaccaatcagatgcagggtaataagcaacagtttaacacccaaaaccagagtaacgtgatgcccggtccggcacagattatgcggggtcccacgccaaatatgcaagggaacatggtgcagttcacgggtcagatgtccggccagatgcttccccaacagggtccagttaacaattcaccgtcacaggtgatggggatccagggacaagtgttgagaccgccagggccttcccctcacatggcccagcagcatggcgacccagccacaacggcaaacaatgatgttagcctcagccagatgatgcccgatgtttctatccaacaaactaacatggtccctccacacgtgcaagccatgcaaggcaattcagcttctggcaaccacttttccggccacggcatgtcatttaatgcgccttttagcggtgctccaaatggtaaccagatgtcatgcggccaaaaccctggcttccctgtcaataaggatgtgacactcaccagccctcttctggtgaacctgttacagagcgacatatccgccggacatttcggggtaaataacaaacagaataatacaaacgccaacaaaccaaaaaagaagaaaccgccaagaaagaagaagaactctcaacaggacttgaacacaccggatacccgtcctgccggattagaggaagcagaccagcccccactgcctggagaacagggaatcaatcttgacaacagtggtcccaagttgcctgaattttcaaacaggcctcctggctaccctagccagccagtggagcagcggccactgcagcagatgccgcctcaactgatgcagcacgtggcaccaccgccacagccgccacagcagcagccacagccccagctacctcagcaacaacaaccgccacctccatcacaaccacagtcccagcagcagcagcagcagcagcagcagatgatgatgatgttgatgatgcagcaggatcccaaatcggtcagactccccgtaagccagaacgttcatccccctaggggcccactcaatcccgactcgcagaggatgccgatgcagcagagtggttcagtcccagtcatggtgagtctccagggccctgcttccgtgcctcccagtcctgacaagcaacggatgcctatgcccgtcaacaccccattaggctccaattctcgcaagatggtgtatcaggagtcaccacagaatcctagctcgtctccgctggccgaaatggcatctcttcctgaggcctcaggatccgaggcaccatccgtgcctggaggacccaacaacatgcctagtcatgttgtgctccctcagaaccagctgatgatgactgggcctaagccaggccctagccccctgagcgccacccagggcgcaacgcctcagcagccgcctgtgaacagcttgccatcatctcacggtcatcacttcccaaatgtggcggcaccaacccaaactagccggcctaagacaccaaacagagcgagtccgaggccctattacccccagacaccgaataaccggcctccttctacagaaccctctgaaatatcattgtccccagaacgcctgaacgcaagtatcgccggactgtttccgcctcaaattaacattcccctaccccctcgccctaacctgaaccgcggatttgatcagcaggggctcaatcctacaacacttaaggcaatcgggcaggcccctagtaatttaacaatgaacccctctaatttcgcaacaccccagacacacaagctcgactctgtggtcgtgaattctggcaagcagtcgaattccggtgccaccaagagggcatctcctagcaacagccggcgatcgtcaccaggtagttccaggaagactaccccaagcccagggagacagaattcaaaagccccaaagcttaccctggccagccagacaaatgccgctctcctgcagaacgtggaactgcccaggaacgtccttgtctctcctacgccacttgcgaatccccctgtccctggatccttccctaacaattctggtctgaacccccagaactctaccgtttctgtggcagccgtgggcggtgttgtggaggataacaaggagtcacttaatgtaccacaggactccgactgtcagaattctcagtcacggaaggaacaggttaacattgagcttaaggcggtgcctgcacaggaagtgaagatggttgttcctgaagaccagtccaaaaaggacgggcagccttctgaccccaataaactgcctagtgtggaggagaataagaatctggtgtccccagctatgcgcgaagcacccacgtccttaagccagcttcttgacaactccggcgctcctaacgtaacaatcaaacccccaggcctcacggacctcgaggtgactccccctgtggtgtcaggcgaggacctgaaaaaagcatcagtgatccccacacttcaggatctaagcagtagcaaagagccctccaacagcctgaatcttccccactcaaatgagctatgctccagcctggtgcaccctgaactatctgaggtgtccagcaacgtggctcccagcatccctcccgtgatgagtaggcctgtgagcagtagcagtatctcaactcctctcccacccaatcagatcaccgtgttcgttacgtctaatcccattacaaccagtgccaatacatcggcagctctgcccacacacctgcagagtgctctcatgagcaccgtagttacaatgcctaatgctggatcaaaggttatggtcagcgaaggccagtcagcagcccagagcaacgctcgccctcagttcatcactccggtgttcatcaattcttcctctatcatacaggtcatgaaggggtctcaaccaagcacaattccggctgctcccttgacaaccaattctggtctaatgccgccttctgtcgctgtagtcggaccccttcacattcctcagaacatcaaattcagtagcgcgcctgtacctcctaatgcactctcatcttcacccgctcccaatatacagacgggacgccctttggtgcttagctctagagccactccagtgcagctccctagcccaccatgtacttcttctcctgtggtacctagtcaccctcctgtccagcaggtgaaggagctcaatccagacgaggcgagccctcaagttaacactagtgccgatcagaacaccctgcctagctcacaatcaacaacaatggtgagcccactgttgactaatagcccagggtcctcaggtaatagaagaagtcccgtgagctcttcaaaaggcaaaggcaaagtcgacaaaattggccaaattctgctgaccaaggcgtgtaagaaagtcactggctccctcgaaaagggcgaagaacagtatggcgcagatggggaaaccgaggggcaaggtcttgatacaacagccccaggtctgatgggcactgaacagttaagcactgagctggacagtaaaacccctaccccccctgcaccaaccctcctgaagatgacctcgtcgccagtcgggcctggcacagcatccgccggaccctcactgcccggaggcgcactgccgacctctgtaagatcgatcgtgactaccctggtcccttcagaactcatatccgcagtgcccaccaccaaatcaaaccacggcggaattgcctcagagtccctcgcaggcggattagtggaagaaaaagtcgggtcccaccccgagctgctaccatctattgcgccaagccaaaaccttgtgtcaaaagagacgtccaccacagcgcttcaggcctcggtggccagacctgagcttgaggtcaatgctgccatcgtatctgggcagtccagcgaacccaaggagattgtcgagaagagcaaaattcctggcaggcgtaactcgaggactgaagagcctaccgttgctagtgagtccgtcgagaacggacacagaaagagatcatctcgaccagctagcgcctctagttccacaaaggacatcacctcagcggtgcagtccaaaagaagaaaatctaaata

SEQ ID NO: 233105 - DNA, 6191 bp, synthetic construct
  misc_feature 1..6191: note = Description of Artificial Sequence: Synthetic coding sequence
  source 1..6191: mol_type = other DNA
atggtgcttgacgatctccccaacctggaggacatttacacgtccctttgtagcagcacaatggaagacagcgaaatggacttcgactctggcctggaagatgacgacaccaagtccgacagcatactggaggacagcaccatttttgttgcattcaaggggaatatcgacgacaaagatttcaagtggaagctggacgcaattctgaagaatgtgcccaatctgctccacatggagtccagcaaactgaaagtccagaaagtggagccatggaattctgtcagagtgactttcaatatccctcgcgaggccgctgagagactacgcatccttgcccaaagcaacaatcaacagcttcgggaccttggcattcttagtgtgcaaattgagggagaaggcgcaatcaatctggctctagcacagaacagatctcaggatgttcggatgaacggcccaatgggtgctggcaattcagtacgaatggaggctggctttcctatggcgtctggaccaggaattatacgtatgaataacccagctacagtgatgatacctcccggaggcaacgtttcctcatccatgatggcacccggtccaaacccagagttgcagcctcgaactccacggccagcctcccagtctgatgccatggaccctttgctctccggactacatattcaacagcagtctcatccaagtggctcactggcccctccacatcatcccatgcagccagtttccgtgaaccgccagatgaaccccgctaacttcccccagttgcagcagcaacagcagcagcagcagcagcaacagcaacaacagcaacagcagcagcagcagcaacagcagcagcagttgcaggcacgccctccccagcagcaccaacaacagcagcctcaggggataaggccccagttcacggcacctacccaggtcccagtgccacccggatggaaccagctcccaagcggagccctgcagccgcctcccgcacaaggaagtctcgggacaatgaccgcaaaccagggatggaagaaggcccctctgccaggccctatgcaacaacaactgcaagcacggccaagcctggccaccgtgcagacacccagccacccaccccctccttatccgttcggtagccagcaggcatctcaggcgcacaccaactttccacagatgagcaaccctggccaatttaccgcccctcagatgaaatccctgcaggggggaccttcaagagtgcccacccccctccaacaacctcatctcacaaataagtctccagccagctccccctccagcttccagcaaggatctccagcctcttctcccactgtgaatcagactcagcaacagatgggccctaggcctccacagaataatcctctaccccagggatttcagcagcccgtgtcatcacctggcagaaatcccatggtgcaacagggtaatgtgcccccaaacttcatggttatgcagcagcaacctcccaaccagggaccgcaatctctccacccaggcctgggcggaatgcctaaaagacttccgcctggattcagtgctggacaggctaaccctaatttcatgcagggccaggtccctagcacgaccgcaactactcccggtaacagcggggcaccccaactccaggccaaccagaatgttcagcatgcgggaggccagggggcaggccctccccagaaccagatgcaggtgtctcacggtccccctaacatgatgcaaccatctttaatgggcattcatggcaacatgaataaccagcaggcaggcacctcaggcgtcccccaagtcaacctgagcaacatgcagggccaaccacagcaaggtcccccatctcagctgatgggcatgcatcaacagattgtgcctagccagggccaaatggtccagcagcagggcaccctaaatccccaaaaccccatgatcctctcaagagcacaactgatgccacagggtcaaatgatggttaatccgccttcccagaatttaggacccagcccgcagcgcatgactccacccaagcaaatgctgtcccagcagggccctcagatgatggccccacacaaccaaatgatgggcccacagggacaagtgctcctccaacagaacccaatgatcgaacagataatgaccaatcagatgcaggggaacaaacaacaatttaacacccagaaccagtctaacgtcatgcctggccctgctcagattatgcgagggccaacccccaatatgcagggtaacatggttcagttcacaggccagatgtcgggccagatgcttccacagcagggacctgtcaacaattcacccagccaggtcatgggcattcaggggcaggttctcagaccccctggcccttccccccacatggcccagcagcatggtgatccagccaccactgctaacaacgacgtatctttatcccagatgatgcccgacgtgtcaattcagcagactaatatggtgcctccccacgtgcaagctatgcagggaaacagcgcctccggcaaccatttctctgggcatgggatgagtttcaacgcaccattctctggtgcaccaaatggaaatcaaatgtcatgtggccagaacccaggcttccccgttaataaagacgtcacattgactagcccactgctggtgaatcttcttcagtcagatatctctgccggtcattttggggtgaataacaagcagaacaatacgaatgctaataagccaaagaagaagaagcctccacgtaaaaagaaaaacagtcaacaggatctgaacactccagatacgcgccctgctggacttgaggaggccgaccagccaccactgcccggagagcagggcattaacctggataatagcgggcctaaattacccgaattctctaacaggccacctggctatccttctcagcctgtggaacagcgtcctctccagcagatgccgcctcaattgatgcaacatgtcgctcccccaccacagccgccacagcaacaaccccaaccccagctcccccaacaacaacagccgccacccccatcacagcctcaatcccaacaacagcaacagcaacagcagcaaatgatgatgatgctgatgatgcagcaggatcctaagtccgtcagactgcccgttagccagaacgtccatcctcctcgaggcccattaaacccagatagccaacgcatgcccatgcaacagtctggttctgtacccgtcatggtgagcctacaaggacccgcttccgtgcccccttccccagacaagcagaggatgccgatgccagttaacaccccgctgggtagtaatagccgtaagatggtgtaccaggaatctcctcagaatccctcttcatcgccgctggcagagatggcctcactcccagaagcttccgggagtgaggcacctagcgtgccagggggtcctaataacatgccctcccacgtcgtcctaccacagaaccagctgatgatgacaggccctaagccaggaccatctccgctctctgcgactcagggtgctacaccacaacagccccctgtaaatagcctgccatcaagccatgggcatcatttcccgaacgtggctgctcccacgcagacatccaggcccaagaccccaaaccgggcttctccacgcccttactacccccagacccctaacaatcgtccaccaagcactgagccttctgaaattagtctgagccccgaacggctgaatgctagtattgctgggctgttcccgcctcagataaacatccctttgccaccacggccaaatttgaacaggggcttcgaccaacagggactgaacccaactacacttaaggctatcggacaagccccttccaacttgacgatgaaccctagcaatttcgcaaccccacaaacacacaagctcgatagcgttgtggttaacagcggtaaacaaagcaattcaggggctaccaaacgagcatccccttctaactcgagacgttcatcccctggatcatctagaaaaactacgcctagccctggtaggcagaactccaaagcacccaaactaaccctcgcatcacagactaatgctgccctgctgcagaatgtggaattgcctcgaaatgtactggtgagtcccactcccctggccaatcctcctgttccgggatcattccccaacaatagcgggctcaatccgcagaactccacggtcagcgtagcagcagtgggtggggtggtcgaggacaacaaggaaagtctgaatgtcccccaggacagtgattgtcagaattcccagagtaggaaagagcaggtgaatatagaactcaaagctgttcccgctcaggaagtgaagatggtggtgcctgaggatcagtcaaagaaggatggacagcctagtgatcccaataaactgccatctgttgaagaaaataagaaccttgtgtcgccggctatgcgagaagcaccgaccagtctcagccaattactcgacaacagtggtgccccaaatgttactatcaaaccaccgggattaaccgatctggaagtcacacctccggtggtttcgggcgaggatctaaaaaaggccagtgtgatccctacgttgcaagatttgagctcaagcaaggaaccaagcaattccttaaatctccctcattccaacgagctatgtagcagtttggtccatccagaactgtccgaggtgtcatccaatgtcgccccttccatcccccctgtcatgagcaggcctgtttcctcttcttctataagtacgcctttgccccctaaccagataaccgtgttcgtcacctcaaatccgattacaacatctgccaacacatctgccgctctccctacacacctgcagtctgcactgatgtctaccgtggtgaccatgccgaacgccggatcaaaggtcatggtgtccgagggccagtctgctgcgcagagtaacgcgcgtccccagtttattaccccagtctttataaattctagtagcatcattcaagtcatgaaaggctcacagccatccaccattccagctgccccactgaccaccaacagtgggcttatgcccccatcagtcgccgtcgtggggcctctccacattccacagaatatcaaatttagcagtgcacccgtgccgcctaacgcactctcctcgtcacccgcacccaatattcaaacaggcagaccgctggtgctttcctcccgtgctacacctgttcagctaccaagcccaccctgtacaagtagccctgtggtccctagtcatccgccagttcagcaggtgaaagagctgaacccggatgaggcttcacctcaagtgaacacatccgccgaccaaaatactttaccatcctcgcaaagcacaactatggttagccccttgctaaccaattcgcctgggagctccgggaatcgaaggtcccccgtgagctcttccaagggaaaaggtaaagtcgataagatcggacagatcctgctcaccaaggcatgtaagaaggtcactggctctctggagaagggtgaggaacagtacggggctgatggggagacggaggggcagggtttagatacaactgctccaggtctaatgggaactgagcagctgagtactgagctagattccaaaacccctacccctcctgcccctaccctgttgaagatgacttcctcacccgtgggaccgggtacagcatcagcagggccatccctaccaggcggagccctccccaccagcgtccgtagcatcgtcacgacactggtgccttcagagctcatatccgccgtgcccactaccaaatctaaccacggaggtattgcgtccgagagccttgccggagggctcgttgaggagaaagtcgggtctcacccagaattacttccttctatcgcaccctcccagaaccttgtgtccaaggagaccagcacgactgccctccaagcgagtgtggctaggccagaactggaggttaatgccgctattgtttccggtcagtccagtgagcctaaggaaatagtcgaaaaaagcaagatcccaggcaggcgaaactcacgaaccgaggaacctaccgtagcttctgaaagcgtggaaaatggacacagaaagaggagctccaggcccgcaagtgcatcttccagcacaaaggacatcaccagcgccgtccaatcaaaacgcagaaaatcaaaata

SEQ ID NO: 233106 - DNA, 1086 bp, synthetic construct
  misc_feature 1..1086: note = Description of Artificial Sequence: Synthetic coding sequence
  source 1..1086: mol_type = other DNA
atggttctggacgacctacctaatttagaggatatctacacatccctctgtagctccactatggaggattcagagatggatttcgattccggcctcgaggatgatgatactaaaagcgactcaatactggaagatagtacaatttttgtcgcgttcaaaggaaacatcgacgacaaggattttaagtggaagctggatgcaattctgaagaacgtgccaaatctgctgcacatggaaagttctaaactgaaggtacagaaagtggagccctggaactcggttagggtgacctttaatatccccagagaagcggctgagcgactcagaatcttagcccagtctaacaaccaacaactccgagatctggggatcttaagcgtacagattgagggcgagggggctatcaacctggcattggcccaaaatcggagccaggatgtacgaatgaacggcccaatgggtgccggaaacagcgtccggatggaggccggattccctatggcgtcaggccctgatgccatggatccccttctttcaggcctgcatatacaacagcagtctcatcccagtgggagcctggcgccaccccatcatccaatgcaaccagtcagcgttaatcgtcagatgaaccccgctaattttccccagctgcagcagcagcagcagcaacagcagcagcagcagcagcagcagcagcagcaacagcaacagcagcagcaacagcagttgcaggcccgaccaccccagcaacaccagcagcagcagccccagggtatccgaccacagttcactgctcctacacaggttcccgtgcctccgggttggaaccagctgccctctggggctctgcagccacctcctgctcaagggagtttaggaacgatgacagcgaaccagggttggaagaaagctccgctccctggtccgatgcagcagcagctgcaggcccgtcccagcctcgcgacggtgcaaactccaagccaccccccacctccgtaccctttcgggtcacagcaggcgagccaagcgcacactaacttcccccagatgtctaaccccggacaatttaccgctccccaaatgtag

SEQ ID NO: 233107 - DNA, 549 bp, synthetic construct
  misc_feature 1..549: note = Description of Artificial Sequence: Synthetic coding sequence
  source 1..549: mol_type = other DNA
atggccgaggagcaggtgaatcggagcgccggtctggccccagattgtgaggcttctgccaccgctgaaaccaccgtgagctccgtggggacctgtgaagcagcaggcaaatcccctgagcctaaggactatgactccacatgcgtgttttgccggattgcaggaagacaggatcccggaaccgagcttctgcattgcgagaatgaagacctgatctgttttaaggatattaagcctgccgcaacacaccattatctggtggtccccaaaaaacatataggaaattgtaggactctccgtaaggaccaagtggagctggtcgagaacatggtgacagttggaaaaacaatccttgagcggaacaactttacggacttcactaacgtgaggatggggtttcacatgccgcctttttgtagcatctctcacctgcatctgcacgtactagctcctgtggatcagcttggatttctgagcaaattagtgtaccgtgtcaattcctattggtttataaccgctgatcacctgatcgagaagctcaggacctag

SEQ ID NO: 233108 - DNA, 552 bp, synthetic construct
  misc_feature 1..552: note = Description of Artificial Sequence: Synthetic coding sequence
  source 1..552: mol_type = other DNA
atgggcgctgcccattccgtttgggaagtggaccacctgtatacgttctttgttcagtggagcccggacgtgtacggaaaagatgctaaagagcaaggatttgtggtagtggaaaaggaggagctgaacatgatcgacaactttttctcagaacccactactaagtcctgggagatcatcactgtggaggaggccaagcgaaggaagagcacttgttcttattacgaggatgaggatgaggaagtccttcctgtgctgcgaccacactctgccctcctggaaaacatgcacatagaacagctggcacgtagattgccggctcgggtgcaaggctatccctggcgactcgcttatagcactctggaacatgggacctcacttaagaccctttataggaaatctgcatccctcgattcgcccgtattgctggtgattaaagatatggataaccaaatcttcggagcttacgcaactcacccctttaagttctccgatcactattacggcaccggcgaaacatttctctacaccttctctcctcatttcaagtag

SEQ ID NO: 233109 - DNA, 2829 bp, synthetic construct
  misc_feature 1..2829: note = Description of Artificial Sequence: Synthetic coding sequence
  source 1..2829: mol_type = other DNA
atggataccaaggaggagaaaaaggagaggaagcagtcatacttcgctcgcttgaagaagaagaaacaggccaagcaaaacgccgaaacagccagcgctgtggctacacgcactcacaccggcaaagaagataacaacacagtagtattggagcccgataagtgcaatatagctgtggaggaagaatatatgacagacgagaaaaaaaagcggaaaagcaatcagctgaaagagattcgccgaacagaactgaagaggtattattccattgacgacaaccagaacaagactcacgataaaaaggaaaagaaaatggtagtgcagaaaccccacgggacaatggagtacacggcaggcaaccaggacaccctgaactcaatcgctctcaaatttaatattacacctaacaaactcgttgaactgaacaagctgtttactcacactatcgtccctggacaggtcctattcgtccccgatgcaaatagtccgagttctacgttaagactctcatcttcgtctccaggggctactgtgtcaccttcatcttctgatgcagagtatgataaattacccgatgctgatttagcccgaaaagcactgaagcccattgaacgggtgctgtcaagtactagcgaggaggacgagcccggtgtggttaagtttctcaagatgaattgtcgctactttactgacgggaaaggcgtggtaggtggtgtgatgatcgtcactccaaataacataatgtttgatccacacaagagcgaccctctcgtgatcgagaatggctgcgaggaatacggcctgatctgccccatggaggaggtggtgtctatcgccctgtacaatgacatttctcacatgaaaatcaaggatgcgcttccctctgaccttccgcaagacttgtgcccactttatagacccggagaatgggaggacctcgcaagcgaaaaggacattaaccccttctctaagtttaaatctatcaacaaggaaaagcgccagcagaatggagagaagattatgacttcagatagcaggcctatcgtccccctggaaaaaagtacgggtcacacccctaccaaaccgagcggttctagtgtctccgaaaaattaaaaaaattggatagctcaagagagactagccacggaagtcccacggttacaaagctctcaaaggagcccagtgacacttcaagtgcctttgaatcaaccgctaaggaaaatttcctgggtgaggacgacgatttcgttgatctagaagaactctccagtcagacaggaggcggtatgcacaagaaagacacattaaaggagtgcctctcactggaccctgaggagcgaaagaaagccgaatcacagatcaacaattccgctgtggagatgcaagtccagtctgctttagcgtttctgggaactgaaaacgatgtggagcttaagggcgcactggatctcgaaacttgcgagaaacaggacattatgcctgaagtggacaaacaatccggtagcccagagtcacgggtcgagaacacgctgaatatacatgaagaccttgacaaggtgaaactgatcgaatactatctgacaaagaacaaagaggggccacaggtctccgaaaatctccaaaagacggaactttctgatggcaagtctattgagcccggtggcattgatatcactttgtcctccagcctttcccaggctggcgacccaatcactgaagggaataaagaaccagataaaacatgggttaagaaaggcgaacctctgcccgttaaattgaactcgtccacagaggctaacgtcattaaggaagccttggattccagcctggaaagcacccttgacaactcctgtcaaggtgcccagatggataacaagagcgaggttcagttgtggctgttaaagagaattcaagtacccatagaggacattttaccaagtaaggaagaaaaatcgaagacccctccaatgtttctgtgtattaaggtggggaaaccaatgcggaaatcgtttgctacgcacacggcggctatggttcagcagtacgggaagcgcagaaagcagcccgagtattggttcgccgtgccacgagagagggtcgatcatctgtatactttctttgttcaatggtcacctgatgtttacggcaaagacgcaaaagagcagggctttgtcgtggtggaaaaagaggaactgaatatgatcgacaacttcttctcggaacccaccaccaaatcatgggagatcattactgtggaagaggcgaagcgcaggaagagtacatgctcatattacgaggacgaggacgaggaggtgcttccggtgcttcgccctcactcggcactcctggaaaacatgcacattgagcagctcgcccgtaggttgcccgcacgcgtgcagggatacccctggaggctggcatatagcactctcgagcatggcacttccctcaaaaccctctaccgcaagagcgcgagccttgattcccccgtcctcctcgtaatcaaggacatggacaatcagatctttggtgcctacgccacccatcccttcaagttctctgaccactattatgggacaggggagaccttcttgtacacatttagccctcacttcaaggtttttaagtggtcaggtgagaacagttacttcattaacggagacatttcgtccctggaactcggcggaggaggtggcagatttggactatggttggatgcggacctatatcatggtcgcagcaacagctgtagtacctttaacaacgatattctgagcaagaaagaagacttcatagtgcaggatttggaggtgtgggctttcgattag

SEQ ID NO: 233110 - DNA, 2829 bp, synthetic construct
  misc_feature 1..2829: note = Description of Artificial Sequence: Synthetic coding sequence
  source 1..2829: mol_type = other DNA
atggatactaaggaggagaagaaagagagaaaacaatcctatttcgctagactcaaaaagaaaaaacaagccaaacagaacgccgaaactgcctcggctgtggcaaccagaacacataccggcaaggaagataataacacagtggtgcttgagcccgacaaatgtaatattgcagtggaagaggaatacatgaccgatgaaaagaaaaagcgcaaaagcaaccagctcaaggaaattcgcagaaccgagctgaaacgttactatagtatcgacgataatcagaataaaacccatgataaaaaggaaaaaaagatggttgtacagaagccccacggcaccatggagtatacagcagggaatcaggatacacttaacagtatcgctctgaaatttaacattacccccaataagctggttgagttgaataaattgttcacccacaccatcgttcccggacaagtgctattcgtcccagatgccaacagtccgtcatctacactgcgattatccagtagcagccctggagcaacagtcagtccctcatcttccgacgccgagtacgataaactccctgacgccgacctggcacggaaagccttaaagcccatcgagagggtcctttcctcaacctctgaagaagatgagcctggcgtggtaaaattcctcaaaatgaattgtaggtattttactgatggaaagggagtggtgggaggcgtgatgatcgtgacccccaacaacataatgtttgatcctcataagagcgacccacttgtgatcgaaaatggatgtgaagaatacggcctcatctgccctatggaagaagtcgtaagtatcgcgctctataatgatataagccacatgaaaattaaagacgccctgccgtccgatctgccacaggacctgtgtccactgtacaggcctggtgagtgggaggatttggcatcagagaaagacattaacccatttagcaaattcaagtctatcaacaaagagaaacgccagcagaacggagagaagatcatgacttcagacagccgccctattgtcccactcgaaaaatccaccggacacacccctacaaagccctccggttcttccgtgagcgagaaactgaagaagcttgacagcagcagggaaacgtcacacggcagtcctacggtgacaaagcttagcaaagagccaagcgatacgtccagcgcgtttgagagtacggccaaggagaactttctgggcgaggacgacgatttcgtggatctcgaagaattgtctagccagaccggcggtggaatgcataagaaggatacgctgaaggagtgcctgagcctggatcctgaagaacgtaaaaaggcagaaagccagatcaacaactccgccgtggaaatgcaggtacagtccgcccttgccttcctcggcactgagaatgacgtggagctcaaaggtgcactggacctggaaacttgcgaaaagcaggatataatgccagaggtagacaaacagtcaggaagccccgagtcaagggtggagaatacactgaacatccacgaagacctggataaagtgaaactcatcgagtattacctgactaaaaacaaagaaggtcctcaggtgagcgaaaaccttcaaaaaacagaactgagcgatggtaaatcaatcgagccaggaggaatcgacattacgctctcttctagcctgtcccaggctggggatccgataacggagggcaataaggaaccagacaaaacatgggtgaagaagggcgagccgctgcccgttaagctaaacagctctacggaagccaatgtaatcaaagaggccttagactctagtctggaaagtactctagacaattcctgtcagggggctcagatggacaataaatcagaggtgcagctttggctgcttaagaggattcaggtaccaatagaagacattctgccttccaaggaggaaaaatccaaaactccccctatgttcttgtgtattaaggtgggaaagcctatgagaaaaagctttgcgactcacactgccgcaatggttcaacagtacggaaaaagaagaaagcagcccgagtactggttcgctgttcccagggagagagttgatcatctctatacttttttcgtgcaatggtcaccagacgtttacggtaaagacgctaaggagcaggggtttgtggttgtggagaaagaagagttgaatatgattgataacttcttttctgaacctactacaaagagctgggagataattaccgtcgaagaggcaaaaagaagaaagtcaacttgcagttactacgaagatgaagatgaggaagtcctgcctgtgctccggccacatagcgccctgcttgaaaacatgcatattgagcagcttgctcggcgactgccagcccgtgtacagggctacccctggaggctcgcctacagtacgctcgagcatgggacatcccttaagacactttatcggaagtctgccagcttagactctcctgtcctactggtaattaaagatatggataatcagatttttggtgcttacgcaacgcaccccttcaagttcagcgatcattattatgggaccggggagacgtttttgtatacgttctcccctcattttaaggtcttcaagtggtccggtgaaaattcatatttcattaatggagacattagctctcttgagctcggaggaggcggtggcagattcggactctggctggatgctgatttataccacggcaggtcgaactcctgctctacatttaacaacgacatcttaagtaagaaggaggacttcattgttcaggatttggaggtgtgggcttttgactag

SEQ ID NO: 233111 - DNA, 1323 bp, synthetic construct
  misc_feature 1..1323: note = Description of Artificial Sequence: Synthetic coding sequence
  source 1..1323: mol_type = other DNA
gacgctgatttagcgagaaaggcactcaagccaattgaacgggttctgagctccacttctgaggaagacgagcccggagtggttaagtttctcaaaatgaattgtcgttactttactgacggcaaaggcgttgtgggaggtgtgatgattgtgacgcctaacaacattatgtttgacccacacaaatccgatcccctagttatagaaaacggatgcgaggagtacggactcatctgccccatggaggaagttgtgtctatagcactgtacaacgatatttctcacatgaagatcaaggatgcccttccttcacccggagagtgggaggacctggcttctgaaaaagacattaatccattcagtaagttcaagagtataaacaaagagaagaggcaacagaatggtgaaaaaatcatgaccagcgactctagaccaattgtgcccctggagaagagcaccggccatacccctactaaaccaagtggctcctccgtatccgagaaacttaaaaaattagactcaagccgagaaactagtcatggttcgcccaccgttacaaaactttcgaaagagcctagcgacacgtcctccgcattcgaaagcactgccaaggaaaacttcctgggtgaggacgacgacttcgtggatctggaggaactgtccagtcagacaggcggagggatgcacaaaaaggataccctcaaagagtgcttaagcctggacccagaggagaggaagaaggccgaaagccagatcaacaattcagcggtggaaatgcaagtgcagtcagctctagcctttctcggcacagagaatgatgtggagttgaagggcgctctggatttggagacgtgcgagaagcaggatataatgcccgaggtggataaacagagcggcagtcctgagtcacgagtcgagaataccttgaatatccacgaagacttagataaagttaagctgattgagtactacctcaccaaaaataaggagggaccccaggttagtgagaatctccagaaaacggagctcagcgatgggaagagcatcgaaccaggagggattgacatcaccctgtcctcgtcactttcccaggcaggcgaccctattaccgagggcaacaaagagccagataagacctgggtaaagaagggcgagcctctccctgtgaaactgaactcttcaactgaagccaacgtcatcaaagaggctcttgattcctccctcgaatctaccctggacaacagctgccaaggtgcgcagatggataacaagtctgaagtccagttgtggctgctgaagcggatccaggttcctatcgagtag

SEQ ID NO: 233112 - DNA, 576 bp, synthetic construct
  misc_feature 1..576: note = Description of Artificial Sequence: Synthetic coding sequence
  source 1..576: mol_type = other DNA
atggataccaaggaggagaaaaaagagcgcaagcagtcctactttgcgagattgaaaaaaaagaagcaggccaaacagaatgccgagaccgcatccgctgtcgccacgaggacacacactgggaaagaagacaacaataccgtcgttctcgagcctgataagtgtaacatcgcagtggaggaagaatacatgacagatgagaagaaaaaacgaaagtccaatcagctcaaggagatcagaagaacagagctgaaaagatactatagcattgatgataatcagaacaagacccacgataaaaaggaaaaaaaaatggtcgtccagaagccacatggcacaatggaatacactgccggaaaccaggataccctgaatagcatcgcactgaaatttaatatcacacctaataagctggtcgaactaaacaagctgttcacccacacaatcgtccccggacaggtcctatttgtgcctgatgccaattccccttcctcaacactgaggctgtctagttcctccccaggcgctacggtgtcccccagcagttccgatgccgagtacgataaacttccatag

SEQ ID NO: 233113 - DNA, 354 bp, synthetic construct
  misc_feature 1..354: note = Description of Artificial Sequence: Synthetic coding sequence
  source 1..354: mol_type = other DNA
atggatacgaaggaggagaagaaagagcgcaaacaatcttattttgcacgactgaagaaaaagaagcaggcgaagcagaatgcagagacagcttctgccgtggccactaggacgcataccggaaaagaagataacaacacggtggtgctagagccagacaagtgcaacattgcagtagaagaagaatacatgactgatgaaaaaaaaaagcggaagtcgaatcagctgaaagaaatccgaaggacagagctgaaacgttactattctatagacgataaccagaataagacccacgacaagaaagagaagaagatggtggttcagaagcctcacggaactatggagtatacctag

SEQ ID NO: 233114 - DNA, 273 bp, synthetic construct
  misc_feature 1..273: note = Description of Artificial Sequence: Synthetic coding sequence
  source 1..273: mol_type = other DNA
atggacaccaaagaggagaaaaaagagcgcaagcagtcttactttgccagactgaaaaagaagaagcaggccaagcagaacgccgaaacagcctctgccgtggccacccgcacacacactgggaaggaagataacaatactgtggtgctggagcccgacaagtgcaatatagcagttgaggaagaatatatgactgacgagaaaaagaagcgcaagtccaatcagctgaaggaaatcaggaggacagagctaaaacgctattactctatatag

SEQ ID NO: 233115 - DNA, 273 bp, synthetic construct
  misc_feature 1..273: note = Description of Artificial Sequence: Synthetic coding sequence
  source 1..273: mol_type = other DNA
atggacaccaaagaagagaagaaagagagaaagcagagctactttgccaggctcaagaaaaagaagcaggccaaacaaaatgccgaaaccgccagcgccgtcgccactcgtactcatactggcaaagaagacaacaacactgtggtattggagcccgacaagtgcaacatagctgtagaagaggaatatatgaccgacgagaaaaaaaagcgcaagtccaaccaactcaaggaaattcgcagaaccgaactgaagcgctactacagcatttag

SEQ ID NO: 233116 - DNA, 552 bp, synthetic construct
  misc_feature 1..552: note = Description of Artificial Sequence: Synthetic coding sequence
  source 1..552: mol_type = other DNA
atgggcgctgcacatagcgtgtgggaggtggatcacctgtatacatttttcgtgcagtggtcccctgacgtgtatggcaaggacgccaaagagcaggggttcgttgtggtagagaaagaagaactgaacatgattgacaattttttctccgagcctacaacaaaatcttgggagatcataaccgttgaggaagcaaaaaggcgtaagtctacctgtagctattacgaagatgaagatgaggaagttttgcctgtgctgcggcctcactcagcactcctggaaaacatgcacattgagcagcttgcaagacgcctgcccgctcgtgtacagggttacccctggcggctggcttactccaccctcgaacacggtacttcccttaaaaccctgtatcgcaagagtgcgagcctcgattctcccgtattactggtaatcaaggatatggacaatcagatttttggggcatacgctactcatccgttcaagttctccgaccactattatggtacaggagagacttttctgtacacattttccccccactttaaatag

SEQ ID NO: 233117 - DNA, 714 bp, synthetic construct
  misc_feature 1..714: note = Description of Artificial Sequence: Synthetic coding sequence
  source 1..714: mol_type = other DNA
tgagagaagacctgttcttcacttgagagggagcctcacttcagcctactaacaatgagagggcagcggctccctttggatatccagattttctattgtgccagacctgacgaggagccgttcgtaaagatcattacagtggaggaagcaaagcggaggaagagcacgtgttcgtactatgaggacgaggatgaggaggtgctgcctgtcctaagaccccactcggccctgctggaaaatatgcacatcgaacagctggccaggcggttgcctgcgcgagtccagggctacccttggcgcctggcttactctactttggaacacggcaccagcctgaagactctttatcgcaaatccgctagtttggattctccggtccttttagtgatcaaggacatggataatcaaatttttggcgcatacgccacacaccccttcaagttctctgatcattactacgggacaggcgagacctttttatacacattcagtcctcactttaaagtgttcaagtggagtggagaaaactcatatttcataaacggcgacatctcctctcttgagctggggggaggagggggacgatttggactctggctggatgctgacctgtaccatggacgcagcaactcctgttcaactttcaacaatgatatattaagcaagaaagaggatttcatagtacaggatctggaagtttgggcatttgattag

SEQ ID NO: 233118 - DNA, 534 bp, synthetic construct
  misc_feature 1..534: note = Description of Artificial Sequence: Synthetic coding sequence
  source 1..534: mol_type = other DNA
taagagaagacatgtagttcacttgagcgtgagcctcacttttccctcctcacaatgcggggtcagcgacttccgctggatatacagattttctactgcgcaagacctgacgaagaacctttcgtgaagatcataacggtggaagaggctaagaggcggaaatcgacctgtagttattacgaagacgaggacgaagaagtgttgccagttctccggcctcattctgctctactggagaatatgcacattgaacagctggctcgcagacttccggctagagttcagggctacccttggcgcttggcctatagtaccctcgaacatggcactagcctcaagaccctctatcgaaaaagcgccagcttggactcccctgttctgcttgtaattaaagacatggacaatcagatcttcggtgcttatgcaacacacccatttaagttctctgaccactactacggaacaggtgagacttttttgtacacctttagtccgcacttcaagggcacgatttggttcatggccagatgctag

SEQ ID NO: 233119 - DNA, 573 bp, synthetic construct
  misc_feature 1..573: note = Description of Artificial Sequence: Synthetic coding sequence
  source 1..573: mol_type = other DNA
taggagaagacctgttccagccttgaacgggagccccacttctctctccttacgatgcggggtcagcggttgccgctggatatccagatcttctactgcgccagacctgacgaagaacccttcgtaaagataatcacagtggaagaggcaaagcgtagaaagtctacctgcagctattacgaggacgaagacgaggaggttttgcccgtcctccgacctcatagcgctctccttgagaacatgcatatcgagcagcttgcaagaaggctccccgctcgagttcaaggatacccatggcgtctggcttactctaccctggagcacggtacctcactcaagaccttgtataggaagtctgcatcacttgactcaccagtgctcctagtgattaaggatatggataatcagatcttcggcgcttacgccacacaccccttcaagttcagcgatcattattacggaaccggagaaacttttctctacacgttttccccgcattttaaatggagtggagaaaattcttacttcatcaacggcgatatttcaagcctagaactcggcggtggcggatag

SEQ ID NO: 233120 - DNA, 273 bp, synthetic construct
  misc_feature 1..273: note = Description of Artificial Sequence: Synthetic coding sequence
  source 1..273: mol_type = other DNA
atggataccaaggaagaaaaaaaagaacgcaagcagtcctattttgctagactcaaaaaaaagaaacaggccaaacagaatgcagagacagcaagcgctgtggctacacgaactcacacggggaaagaagataataatacagtggtgctggaacctgacaaatgcaacattgctgttgaagaagagtatatgactgacgaaaaaaagaaacgtaaatcaaatcaactgaaagagatccgtaggacagagctaaaacgctactactctatttag

SEQ ID NO: 233121 - DNA, 7565 bp, synthetic construct
  misc_feature 1..7565: note = Description of Artificial Sequence: Synthetic coding sequence
  source 1..7565: mol_type = other DNA
atgtccggatctacccagccagtcgctcagacttggcgggcaacggagcctcggtaccctcctcattcactctcttacccagttcaaattgccaggactcatacagacgttggattgctggagtaccagcaccactcacgtgattacgcaagccatctgtctcctggaagtataatccagcctcagagacgcaggccgtctctgttatctgagttccagcctggcaatgagagatcgcaggagcttcacctccgaccagaatctcactcatacttgccagagctggggaaatcagaaatggaatttattgagagcaaaagacccagactcgaactgctgcccgaccctctgttgagaccaagcccactgctcgctacaggtcagcccgctggttccgaggatttgaccaaagaccggtccctgactggcaaactggagcccgtctcgcccccttcacccccacatacagaccctgagttggaactggtgccgccacgactgagcaaagaagagcttatccagaacatggaccgggtggaccgcgaaatcaccatggtggagcagcagatctccaagctgaagaaaaagcaacagcagcttgaagaggaggccgctaagccaccagagcccgaaaaaccggtgtcaccgccacctatagagagcaaacaccgttccctcgttcagattatctacgacgagaacaggaagaaggctgaagctgcgcatcggatcctggagggcctgggtcctcaagtggagcttccattatataaccagccatctgatacccgccagtatcacgaaaacattaagatcaaccaggccatgcgcaagaagctgatcctctactttaaacggaggaaccatgctaggaagcagtgggagcagaagttttgtcagcgctatgaccagctaatggaggcatgggaaaagaaagttgaaagaattgagaacaatccacgtcgtagagccaaagagtctaaggttcgtgagtattatgagaaacagttcccagagatccggaaacagagagagctccaggaacggatgcagagtcgagtggggcagcgagggtccggtctgtccatgtccgccgctagatccgagcacgaggtgagcgagatcatcgacggattaagtgaacaggagaatctcgagaaacagatgaggcaactggcagtgattcctcccatgctctatgacgccgatcaacagagaataaaattcataaatatgaacggattgatggccgacccaatgaaggtttataaagaccgacaggtgatgaacatgtggagcgaacaagaaaaagaaacctttcgggagaagtttatgcagcacccaaagaatttcggcctcattgcatcttttctggagcggaaaaccgtggctgagtgcgttttatattattacctgaccaagaaaaacgagaattataaatctctggtgagacgctcttacaggcggagagggaaatcacagcaacagcagcagcagcaacagcagcaacagcagcagcagcagcaacaaccaatgcctcgctcctctcaggaggaaaaggacgaaaaagagaaagagaaggaggcagagaaggaagaggagaaacccgaagtggagaacgataaagaggaccttctgaaagaaaagacagatgacacctctggagaagacaatgacgagaaggaggccgtggcctctaaaggaagaaagacagccaattcccaagggagacgcaaaggcagaataacaaggtccatggctaacgaggctaactcagaagaggcaatcaccccacagcagtccgcagagttggcatccatggagcttaacgagagctccagatggactgaagaggagatggagacggctaaaaaggggttgctcgagcatggcagaaactggagcgccatcgcacgcatggtgggctcaaagaccgtgtctcaatgtaagaatttttacttcaactataaaaagcggcagaacctggacgaaattcttcagcagcataaactcaaaatggaaaaggaaagaaatgctagacggaaaaagaagaaggccccagccgctgcctctgaggaggcagctttccctcccgtggtggaggacgaggaaatggaagccagtggcgtgagcgggaacgaagaggagatggtggaggaggcagaagcacttcatgcaagcgggaacgaagtgccccgaggcgaatgtagtggcccagccacagtgaataactcaagcgacactgaaagcatcccttccccccacacagaggcagccaaagacacgggccagaacggtccaaagccgccagcgacattgggcgcagatggaccaccaccgggacctcctaccccacccccagaagatattccagcccctaccgagcctactcctgcttctgaggctacaggagcgcctacccctcctccagcaccccctagcccttcagctccccctcccgtggtgccaaaagaggagaaggaggaagagaccgcagctgctcctcccgtggaagagggtgaggagcaaaagcctccagccgctgaagaactcgcagttgacactggcaaggcggaagaacctgtcaagtctgaatgtacagaggaagcagaggaagggccagccaagggcaaagatgctgaggcagctgaagcgacagccgagggggctctgaaagcagagaaaaaagaggggggtagcgggcgagctaccacagccaagtcctccggggctcctcaagacagtgatagctccgctacttgcagcgccgatgaagtggatgaagctgagggcggtgacaagaacagactcttatcccctcgaccatctttgcttacacccactggggatcctcgagccaacgctagtccgcagaaaccattagacctcaagcaactgaagcagcgggctgcagccattcctcccatcgttaccaaggtgcatgaaccccctcgagaagatgcagcacctacaaaacccgcaccgccagccccaccacccccacagaatctccagcctgagtcggatgctccccaacagccagggtcatccccacggggtaagagccgcagcccggctcctcccgcagacaaggaggccgaaaaacccgtgttctttcccgcatttgcggcagaggctcaaaaactgcctggcgatccaccttgttggacgtctggactgcctttccctgtgccacctagggaagttatcaaggcctcacctcacgccccagacccttccgcattctcatatgccccacccggacacccactccctctgggtttgcacgacaccgccagaccggtgttacctcgtcccccaacaatctctaatccacccccattgatatcatcagccaaacacccctcagtgctggaacggcagattggcgctatcagccagggtatgagcgttcagcttcacgtgccgtactccgaacacgcaaaggccccagtcggcccagtgactatggggttgccactgcctatggaccctaaaaaactggcccctttctcaggagtgaagcaagagcagctgtcgccgagagggcaagcgggtcctcctgagagtcttggagttcccacagctcaggaggcgagcgttctccggggaaccgctctggggagtgttcccggtgggagcataactaagggtattcccagcacgcgcgttccatctgacagcgctattacatacaggggctccatcacacatggtaccccggctgacgtgctctacaaaggaaccatcacccgaattatcggcgaagactctccctcccgtctggaccgaggtcgtgaagactccctcccaaagggccatgtaatttatgagggcaaaaagggacacgtgctcagttacgagggaggaatgtcggtcacgcagtgctccaaagaagatggaaggagcagtagcgggcctcctcacgaaacggctgccccaaaaaggacatacgacatgatggagggtcgtgtaggcagagccatcagttccgcctcaattgagggactcatgggacgagccatcccacctgagcggcactcccctcatcatctgaaggaacagcaccatattagaggcagcatcactcaaggaattccacggtcttatgtcgaggcccaggaggattatttgaggcgggaggcgaaattgctgaagcgcgaaggaaccccccctcctcctcccccttctcgtgacctcactgaagcttacaagacccaggctctaggaccacttaagctcaagccggctcacgagggcctggtggctacagtcaaagaggcaggaaggagcattcacgagatccctcgagaggagctgcggcatacccctgagctccctctcgccccaagacccttgaaggaaggaagtatcacccagggcacccccttgaagtacgacacaggggcatctaccacaggctctaaaaagcacgatgtcaggtccctgattggcagtcctggaagaacattccctcctgtacatccgcttgacgtcatggccgacgccagagcactcgagcgtgcctgctacgaggaatctctgaagtctagaccaggtactgcctcttcctctggaggtagcattgccaggggagcaccagttatcgtcccagaattaggtaagcctcggcagagccccctgacctatgaggaccacggcgctccttttgcaggtcacctgcctaggggatctcccgtcactacacgcgaacccacccctagattgcaggagggctctctctcttcaagtaaagctagccaggatcgcaaactgacaagtacccccagagagattgctaagtctccacacagtactgtcccagagcatcaccctcatccaatctccccgtatgagcacttgctgcggggagtaagcggggtagatttatacaggtcccatattccactggccttcgaccccacttctattccacgtgggattcccctcgacgcggcagcagcttattatctgcctcggcacctggctcccaatcctacttatccacatctgtaccccccttacttaattcggggttaccccgacacagcagctctagaaaaccgtcaaaccataattaacgactatatcacctcacagcagatgcaccacaatgcagccacagctatggcccagagggctgatatgctgcgtggcctctcacccagagagagttccctggccctaaattacgctgccggacctcgagggattatcgacctcagtcaggtgccccacttgccggtgctggtcccacctacacctggaacacctgctacagccatggatcggctggcttacctgcctaccgcgcctcaaccgtttagctctcgccacagtagttcacctctgtcccccggtgggcctacgcatctaacaaagccaaccaccacctcgagcagcgagagggagagagaccgagacagggagcgggatagagaccgagaacgggagaagagcatactgacctcaaccacaactgtggaacacgccccaatatggagacccggtaccgaacaatctagcggatccagcggagggggagggggatccagctctcgacccgcttcccacagccacgcacaccaacactcccctatctccccacgcacccaggacgcactgcaacaacgcccttcggtgcttcacaataccggtatgaaggggattatcacggccgtggagcccagcacccctaccgtcttgaggtcaacttcgaccagttctcctgtgcgccctgcggcaacatttcctccagccacccattgccccctgggtggcacattagatggagtatacccaactttgatggagccggtgctgttgcctaaggaggctcccagagttgcaaggcccgagcgcccacgggcagacacaggccatgcatttttggccaagccacctgcaaggagtggactggagccagcgtctagcccatccaaggggtctgaaccacgcccactggtgcctccggtgagcggtcatgctacaatcgcacgcacccctgcaaaaaatctcgccccacatcacgcaagccccgatccgccagctcctcctgcaagtgcttcagacccgcatagagagaagacccagagtaagccatttagcatacaggaactggaattgcgttctctagggtaccacggctcaagctacagtccggaaggcgttgaacccgtctctcccgtgtcttccccttccctgacccacgataagggtttgccaaagcatctggaagagttagacaaatcccacttggaaggagagctgagaccgaagcaaccaggccctgtaaaactcggaggcgaggcagctcacctgccacacctgaggcctctccccgaatcccagcctagttcaagccctctgctccagacagctccaggcgtaaaaggacaccagcgcgtggttaccctggcccaacatatctcagaggtcataacacaggactacaccaggcatcacccccagcagttgagcgcacccttacccgctccgctgtactcattcccaggtgcctcctgccccgtgctggatttgcgcaggccgccatccgacctgtacctaccacctcctgatcacggcgcacccgcacggggtagcccccatagtgagggaggaaaacgctcacctgagcctaacaagaccagcgtcctcgggggaggcgaggacggaatcgaacccgtttctcccccagaaggaatgactgagccgggacattcccggtccgcggtctaccccctgttgtatcgggacggcgagcagaccgagccatccaggatgggcagtaagtcccctggcaatacctcccagccacccgcttttttttctaagctgaccgaaagtaatagcgccatggtcaaatccaaaaagcaggagattaataaaaagctgaacacccacaaccggaacgagcccgaatacaacattagccagccaggcacagaaatctttaatatgccggctataactggcaccgggcttatgacctaccggtcgcaagccgttcaagaacatgctagcaccaacatggggttagaagctattatccgtaaggccttaatgggcaaatacgaccagtgggaagaatccccccctctgagcgccaacgccttcaaccccctaaatgccagcgcctcactgcctgcggctatgcctatcaccgcagctgatggtcgctcggatcataccctaacttcaccgggaggtggcggtaaagccaaggtgtcggggaggcctagcagccgcaaggcgaagtcacctgctcccggtctggcatcaggggaccgaccaccttccgtgagctccgtgcacagtgagggagactgcaacagacgcaccccattgacaaacagagtctgggaggataggccctcaagtgcaggtagcaccccgtttccatataaccctctgatcatgaggctgcaggccggtgtgatggctagcccacctcctcccggactgcctgcgggtagcggccctctggctgggccacatcacgcatgggacgaggaaccgaagcccctgctgtgctcacagtacgagactctctcagacagcgagta

SEQ ID NO: 233122 - DNA, 7379 bp, synthetic construct
  misc_feature 1..7379: note = Description of Artificial Sequence: Synthetic coding sequence
  source 1..7379: mol_type = other DNA
atgagcgggagcacacagccggtggctcagacgtggagggccacagagcctagatacccacctcattcacttagctaccctgtccagattgctaggactcacactgatgtgggactgctggagtaccagcaccacagtcgagactatgcttcacacctgtctccgggatcgatcatccagccacagaggcgtagaccatctttgctatctgagttccagcctggtaatgaacggtctcaggagctccacctccgtcctgaaagtcatagctacctgcccgagcttggaaaatcggaaatggagttcattgagagtaaacggcctcgcctggagctactcccggaccctttactgcgcccaagtcccttgttggctacgggccagccagccggaagcgaggacctgactaaggaccgcagtctaaccggcaaactcgaacccgtaagccctcccagccctccccacaccgatcccgaactagaactggtgccaccccgactgagcaaagaagagttgatccagaacatggatagagttgaccgtgaaatcactatggtcgagcaacagattagtaagcttaagaagaaacagcagcagttggaggaagaggctgcaaagccccctgaacctgaaaagccagtgagtcccccacccatagaatccaagcataggtctctggtgcagatcatttatgatgaaaatagaaaaaaggccgaggctgctcaccgcatactcgagggactgggcccacaggtggagctcccactatacaatcagccttccgacactcgccagtaccacgagaacatcaagatcaaccaggctatgcggaagaagctgatcctctacttcaagagaaggaatcatgcacgcaagcagtgggagcagaagttctgtcaacgttacgatcagctcatggaagcatgggagaaaaaggtcgagcgaatagagaacaacccaagaagacgcgcaaaggagagcaaggtccgcgaatattatgagaagcaatttcccgagatccgaaagcaaagagagttacaggaacgcatgcagagccgcgtcggacagagaggatccgggctctcaatgagcgctgcccgttctgagcatgaggtgtccgagataatagacgggctgtctgaacaggaaaacttagagaagcagatgcggcaactagctgtgatccctccaatgctgtatgacgccgaccaacagcgtattaagtttataaacatgaacgggctgatggccgatcctatgaaggtgtacaaagaccggcaggttatgaatatgtggtctgaacaagagaaggagacattccgtgagaaatttatgcagcaccctaaaaactttggactgattgcttcatttttggagcgaaaaactgtcgccgagtgcgtgctctactattatctgactaaaaagaacgagaattataaatctttagttagaagatcttacaggagaagaggcaagagccaacagcaacagcaacaacagcagcaacagcaacagcaacaacagcaacaacctatgccaagatcttcacaggaggaaaaagatgaaaaagagaaagagaaggaggcagagaaagaggaggaaaaaccggaggttgagaacgacaaggaagaccttctaaaggagaagactgacgacactagtggagaggataatgacgaaaaagaagctgtggccagcaagggcaggaagactgccaattctcagggcaggaggaaaggccgaattacccgctctatggcgaacgaggcaaatagtgaagaggcgattactccacagcagtctgccgagctcgccagcatggagctaaatgaatcctcgcgctggactgaggaggaaatggaaactgccaaaaaaggtctgttagaacacggcagaaactggtctgccatcgcccgtatggtcggttcaaaaactgtgtcccagtgtaagaacttttatttcaattataaaaaaaggcagaatctggatgagatcctgcagcagcacaaactcaagatggagaaggagagaaacgctcggagaaagaagaagaaggccccagcagccgcatccgaggaggctgcttttccaccggtggtcgaggatgaagaaatggaggcttcgggagttagcggaaacgaggaggagatggtcgaggaagctgaggccacagtgaacaactccagtgatactgagtcaattccctcaccccacaccgaggccgctaaagataccgggcagaatgggccaaagcccccagccaccctgggcgctgatggaccccctcccggtccgcctacccctcccccagaggacattcccgcacctaccgagccaacaccagcctctgaggctaccggagcccctacaccaccaccagccccaccctcaccaagcgcaccaccccctgttgtgcctaaagaagagaaagaagaggagactgccgctgccccaccagtggaagagggtgaggagcaaaagccccctgctgccgaggagctggcagtcgatactgggaaagccgaggagccagtaaagtctgagtgtaccgaagaggccgaagagggacctgctaagggcaaggacgcggaggccgctgaggctaccgctgaaggagctctgaaggccgagaagaaggagggtggaagtgggcgagcaaccaccgcaaagagttcaggagctccccaggattccgacagctcggcaacctgctcagcagacgaggtggacgaggccgagggcggtgacaagaatcgccttctgtcacccagaccctctctattgacccccaccggggatcctcgtgccaatgcaagccctcaaaagccactcgacctgaagcagctgaaacaaagagccgctgccataccacctattcaggttacaaaggtgcatgagcccccaagagaggatgcagcccctactaagccagctccacctgcaccccctccccctcagaatctccagcctgagtccgacgctccccagcagccgggatcgtccccacggggaaagagccgcagccctgcccctcccgcagataaggaagcagagaaaccagtgttctttccggcttttgccgcagaagctcagaaattgcctggggatcccccttgctggacttcagggctccctttcccagtccccccacgcgaggtcatcaaggcctcccctcatgcccctgatccgtctgccttttcttacgccccacccggacatcccctgccactgggcctgcacgacaccgccagaccggtgttgcccagaccccctacgattagcaatccgcctccccttatatcaagcgcaaaacacccttccgtgctggaacgacagattggcgctataagtcaaggtatgagcgtgcagctgcacgtgccttactcagaacatgccaaggcaccagttggtccggtgaccatgggcctgccgctgccaatggatcccaagaaactcgccccattctcaggcgtcaagcaagagcaactctcaccacgtgggcaggccggacccccagaatctctgggggtccctacagcccaggaagccagcgtgctaaggggcaccgccctgggctccgtgcctggaggctctataactaagggcatcccatcaacaagagtgccctctgacagtgctatcacgtatcgaggcagcatcacgcatgggacccctgctgacgttttgtacaagggaactatcactcgcatcataggagaagactcccctagccgactcgaccggggtcgggaggactcgctgccaaagggccatgtcatatatgagggcaaaaaagggcacgtcctttcatacgaaggcggaatgtctgtcacccagtgcagcaaggaggatgggagatcgagctccggaccgcctcacgaaaccgccgctccgaagagaacatatgacatgatggaaggacgggtaggccgagccatttcttccgcttctatcgaaggtttaatgggaagagccattcccccagaacgccattccccgcatcacctcaaagaacagcaccatatcagaggaagcatcacccaggggattccccgatcctacgttgaggcacaggaggactatttacggcgagaagccaagctcctcaaacgggagggaactcctcccccacccccaccttccagagacctgacggaggcttacaaaacgcaggccttgggccctctgaaacttaaaccagcgcatgaaggcctggtcgccacagtcaaggaagctggtcgaagcatacacgagattccacgggaagagctacgccatacgcctgagctacccctggccccacggccactgaaagaggggtctattacccagggcacgcccctcaagtacgacaccggcgcaagtacaaccggatccaaaaaacacgatgtgagatctctcatcgggtcccctggacgtacattccctccagtccacccgttggatgtgatggctgatgcacgggcactggaacgggcttgctatgaagagtctcttaagtctcgaccagggactgcatcctcatctggagggagcattgcgagaggcgcacctgtcattgtacctgagctcggcaagcccaggcagtccccactcacttacgaagatcacggcgcacctttcgccggacacctccccagaggtagtcccgtgactacacgggaacctaccccacgcctgcaggagggcagtctgagtagtagtaaggcttcacaggatagaaaactaacctctacacctagagaaatagccaaatctccacactcaacagtacccgagcatcatccgcacccaatctcaccttacgaacatctgctgcgcggagttagcggcgttgacctctatcgttcgcacattccccttgcattcgacccgaccagtattcccaggggcatcccactcgacgcagcggcagcatactacctgcctcgtcatttggcccctaaccccacttaccctcatttgtacccaccctatttgatcaggggctacccagacacggccgcactagagaacaggcagaccatcattaatgattatattactagccaacaaatgcaccacaatgcggctacagccatggctcagagggccgacatgttaaggggccttagtccaagagaatcctccctggctcttaattacgccgctgggccacgcggaatcatcgatctgagccaggttccccaccttcccgtgctcgtcccccctacccccggaacacccgctactgcgatggaccggctcgcctacctgccgacagcaccgcagccgtttagctcccgtcatagttcatccccactctcgccgggaggcccaactcatttgaccaaaccgacaactacaagctcctcagagagagagcgggaccgagatcgcgagagggaccgcgatcgggagcgagaaaagtctattctgacctcaacaacgaccgtggaacacgcacccatttggagaccgggaacagaacagagtagcggctcttcaggcggaggtggcggttcttcgagccgtcctgcttcccattcccatgcacaccagcacagtccgatcagtccgaggactcaggacgctctgcagcaacgcccttcagtcttgcataataccgggatgaaaggtattatcaccgccgtagagccgagcacacctactgtgctgcgctcaacaagtacctccagccccgttagacccgctgctacatttcctccagccactcactgccccctggggggtacgttggatggggtttaccccactctaatggaaccagtgctgctgcccaaggaggcccctagggtggcacgccctgaaaggccacgcgctgataccgggcacgccttcttggccaaaccaccggctaggagcgggctcgaacccgcatcaagcccatcaaagggctctgagcccagaccactggtcccgccagtatccgggcacgcgaccatcgctaggactcctgctaagaatctggccccacatcacgcctctcctgatccccctgcccctccggcatctgccagcgatccccatagagagaagacacagagcaagccatttagcatacaggagctcgagctcaggtcactggggtatcacggctcctcctactcacccgagggtgtagagcctgtctctccagttagctccccttcccttacacacgataaaggactccctaaacacctggaggagcttgacaagtcccatcttgagggcgagctcagaccaaagcagccaggcccagtcaagctgggcggtgaagcagctcatctgcctcatctcagaccactgcccgagtcacaaccaagctcatcacctctgctccaaacagctccaggagtcaaaggccaccaaagggtggtcacactggcgcagcatattagtgaggtcatcacacaggattacacccgccatcacccacagcaactgtctgctccattgcccgctccactctactctttcccgggagcgtcctgtcccgtcctggacctgcgaagacccccaagcgacttatacctgcctccaccagatcacggtgcgcctgccagggggagcccccattcagaaggaggcaaacggtccccagagcctaataagactagcgtgttgggagggggagaggacggcattgagcctgtctcaccccctgaaggtatgaccgagccaggccactcacggtcagccgtgtatcccctcctgtatcgggacggggaacagacggagccatcacgcatggggtctaagtcacccggtaacacctcacagccgccagccttcttttctaaactcactgagagtaacagcgcaatggtaaagtctaagaaacaggagataaataaaaaactgaacacccacaacaggaatgagccagaatacaatattagtcaacctgggaccgagatattcaacatgccagcgatcacaggaaccggcctgatgacttatagatcccaagccgttcaagagcatgcaagtactaatatgggcttggaagccattatccgaaaagcactgatgggaggaggcggtaaggccaaagtcagcggacgtccctctagtagaaaggccaaatcccctgctcctggcctggccagtggtgatagaccacccagtgtgagctcagtccacagtgagggtgattgcaaccgcaggacccccctgacaaacagagtctgggaggataggcctagttccgcagggagcacaccttttccctataacccgctgattatgcggctccaagccggtgtgatggcttcccctccacccccagggttacccgctggatccggacctctcgccggacctcaccacgcctgggatgaagaaccgaagcccctactgtgtagccaatatgagaccctctctgactctgaata

SEQ ID NO: 233123 - DNA, 6227 bp, synthetic construct
  misc_feature 1..6227: note = Description of Artificial Sequence: Synthetic coding sequence
  source 1..6227: mol_type = other DNA
atgtggtctgagcaggaaaaagagacttttagggagaaatttatgcagcacccgaaaaactttggattaattgcgtcctttctcgagagaaagaccgttgctgagtgcgtgctgtattactaccttacgaagaagaatgaaaattacaagtctctggtacggagatcatatagacgcaggggcaaatctcaacagcaacagcaacagcaacagcagcaacaacagcagcagcaacagcaacccatgcctcgttcatctcaggaagaaaaggacgagaaggagaaggagaaagaggcagaaaaggaggaggagaaacccgaggtggagaatgacaaggaagatttgctcaaggagaagacagacgatacaagcggagaggacaatgatgagaaggaagccgtggcatctaagggcaggaaaacagcaaatagccaggggcgacgcaagggaaggattacgcgcagcatggccaatgaagccaattcggaggaggcgattactccacagcagtctgcagagctggcttcaatggagcttaacgagtcaagccggtggaccgaagaggaaatggaaaccgccaagaaaggcctgctggagcatggaaggaactggtctgcaatagcaagaatggtcggctcaaagacggtgagccagtgcaaaaatttttattttaactacaagaaacggcaaaacctcgacgaaattctgcagcagcacaagctcaagatggagaaggagagaaatgctcggcgaaagaagaagaaagcccctgccgctgcaagcgaggaggccgcatttcccccagtggtagaagacgaagaaatggaagcgagcggggtgtcaggcaatgaagaggaaatggtggaggaagcagaggccaccgtaaataactcctccgacactgagtccataccaagcccccataccgaggccgctaaggacaccggtcagaatgggccaaaacccccagcaacactcggggctgacggcccaccccctggccctcctaccccccctcctgaagatatccccgctcccaccgaacccactcctgcatctgaggctaccggggctcccacgccacccccagctccaccgagcccctccgctcccccaccagtcgtccctaaagaagaaaaagaggaggagaccgccgctgcccctcccgtggaggagggtgaagagcagaaaccaccagccgcagaagagctggccgtcgatacaggcaaggctgaggagcccgtgaaatctgagtgtacagaggaggccgaggagggtccagctaagggtaaggacgctgaagctgccgaagcaacagcggagggtgctctcaaggcagaaaaaaaagagggtggctctggacgggctacgaccgccaaatcatctggtgctcctcaggatagcgactcctccgccacatgttcagcggacgaagtcgacgaagctgaggggggtgataaaaatagactgctttctcctcggccatccctgctcacccccaccggggatcccagggcaaacgcttctcctcagaaacctcttgacttgaaacagctgaagcaaagagccgctgctatcccccctatccaggtgacaaaggtccacgaaccccctcgggaggacgccgctccgaccaaacccgctcccccagcccctcctccccctcagaacctgcagcccgaatcggacgccccacagcagccgggttcatcccccagagggaagagccggtctcccgctcctcctgcagataaggaggccgagaagcctgtcttcttccccgctttcgctgccgaagcgcagaagcttccgggagaccctccttgctggaccagcggcctaccgtttcctgtgccaccaagggaggttattaaggcatccccacacgcaccggacccctccgcgttttcctacgcacccccaggccaccccctgcctctggggttgcatgataccgccagaccagttcttcccagaccccctactatcagcaacccccctcctctgatttcatcagccaagcacccttccgtgttagagcggcagattggagctatctctcagggcatgtcggtccagcttcacgtgccttattcagagcatgctaaagcgcctgtaggcccagtgaccatggggttgccacttcctatggacccaaagaagttggctcccttcagcggtgtcaagcaggagcagctttcccccaggggacaagctggcccaccagagtcactaggcgtgccaaccgcacaagaggcttccgtgctgcggggtactgcactcgggagtgtccccggaggatccattacaaaaggtatcccgagcacacgcgtgccatccgatagtgccatcacttaccgcggttcaattacccacggtacacccgcagacgtactttacaagggtacaattactaggatcataggcgaggatagtccatcccggctggacagaggacgggaagactccctgcctaagggccatgtcatctacgaagggaagaaaggccacgtcctgtcatatgagggcggaatgtccgtgacacagtgttccaaggaagacgggagaagtagcagtgggcctccccacgagaccgccgctccgaaacggacatacgacatgatggaggggagagtgggtcgcgcaattagtagtgccagtattgagggactgatggggagagcaattcccccagaaagacactcaccccaccacctaaaagagcagcaccacattcggggaagtattacacaaggtatcccccgaagctatgtagaagctcaggaagattaccttcgtcgagaagcaaaactgcttaagcgagaaggaacgcccccacctccaccaccgtcgagagacctgaccgaagcttacaagacccaggcgctgggcccactcaagctcaaacctgcacacgagggcttagtcgctaccgtaaaggaggcaggacgatccattcacgagatacctcgggaagagctgcgccatactccagagcttcccttggcaccacgacccctaaaagagggatcgataacccagggcaccccgctcaaatacgacaccggggcatccaccactggttccaagaaacatgacgtgcgatccctcattgggtcacctgggaggacgtttccacctgtccaccccctcgacgtgatggcagacgcgcgtgcactggagagggcatgttatgaagaatcacttaaatcccgccctggcaccgccagcagttcaggcggatccattgccaggggggcaccagttatcgtgccagaactgggcaaaccaagacagagtcccctcacctatgaggatcacggagctccattcgccggtcatcttcctcggggaagtcccgttactacccgcgagcctacacctagacttcaagaaggatctctcagcagtagtaaagcgagccaggacaggaagctgacatccactcctcgggagatcgccaagagtcctcactcaaccgtcccagaacaccacccacaccccatatcaccctacgagcaccttctacggggtgtaagcggagttgatctgtataggtcacatatacctctcgccttcgaccccacttcaattccaagggggatcccactggatgcagccgcagcttactacctccccagacacctggctcctaatccaacatacccgcacctgtatccaccatacttaataagaggataccccgatactgccgctcttgaaaataggcagaccataataaatgactacataactagccagcagatgcaccataatgccgctactgctatggcacaaagggccgacatgctgagaggtctttcccctagggagtctagcctagccctcaattatgccgctggcccacgaggaattattgatctgagccaggtcccacacttgcccgtgctagtgccaccaacccccggaactcccgctaccgccatggacaggctggcctatctcccgaccgcccctcagccctttagctctcgacatagctcaagccctttgagcccaggaggtcctacacatcttactaagcccactactaccagctcttccgagagggagcgggacagagaccgcgagcgtgaccgtgatcgagaacgggaaaagtctatcttgacatctaccaccactgtggaacatgctcctatctggagacccggaacagaacagtcctctggcagttccggcggaggcggaggatcttctagcaggccggcatcccatagccatgcacatcagcattcccccatttctccgagaacacaagatgccctgcagcagcgcccttccgtccttcataacacggggatgaaggggattattacagccgtagaaccgagtacacctactgtcttgagatccacaagtacatcttcacctgtgagaccggctgctacttttccccctgccacacactgccctttagggggaactttagatggcgtgtaccctacactgatggagcccgtgctgctgccaaaggaagcacctagagtagctcggcctgagagaccacgcgctgatacaggccacgcatttctggccaaaccacctgcacgctccggcttggagcccgcttcctccccctcaaaaggaagcgagcccagacctttggtgcctcctgtgagtggacatgccactatcgccagaactcccgcaaaaaatctggccccacaccacgcctcccctgatccccctgcccctcccgctagcgcgtctgatccgcaccgggaaaaaacacagtcaaaaccgttcagtattcaggagctggagctgcggagtctgggctaccatgggtcgagttacagcccagaaggagtggagcctgtcagccccgtgagctccccttctctgacccatgacaaggggctccccaaacacctggaagagcttgacaagtcacatcttgaaggtgagctcagaccgaaacagcccggacccgtgaagctcggaggtgaagcggcacatctgccgcacttacgccctctcccggaatcacaacccagctcctccccccttttgcaaaccgcaccaggtgtgaaaggccatcaacgcgtggtgactctggcccagcatatctccgaagttatcacgcaagactacacgaggcatcatccacagcagctgtccgcgccactacccgctcctttatattcattcccaggcgcaagctgccccgtgctggacctcaggaggcctccctcagatctgtatttgcccccaccagaccacggggcaccagccagagggtcaccccattcggaggggggaaaaagatctcccgaaccgaataagactagtgtcctgggaggtggtgaagatggtattgaaccagtgtcccctccagaagggatgacagagcctggtcatagtcggagcgccgtgtacccactgctatatcgtgacggcgaacagactgagccgtcccgtatgggatctaaatcccctggaaacacaagtcagcctcctgcgttcttctccaaactgaccgagtctaactcagccatggtgaagtcgaaaaagcaagagattaataagaagctaaacacacacaacaggaacgaaccagagtacaacatcagtcaaccaggaacggagatcttcaatatgcccgctattactgggacaggcttgatgacctatagatcccaggcggtccaggagcatgcctcaactaatatggggctggaagctattattaggaaggcactaatgggaaaatacgatcagtgggaggagagccccccactctcagcaaacgcgtttaatcccctgaacgcttccgccagcttaccagctgcgatgccaatcaccgccgcagacgggagaagtgaccacacactgactagtcctggcggagggggaaaggctaaggtgtccggacgaccatcgagtaggaaagccaaatcgcccgctcctggactcgcatcaggcgataggccaccttcggtatctagcgtacacagtgagggtgattgcaacagacggacccccttaacgaatcgtgtgtgggaagacagacctagtagtgctggctccaccccgttcccctataacccattaattatgcggcttcaagctggcgtcatggcaagtcccccacctcccggacttccagcaggtagcgggcctttggccggtccccatcacgcatgggacgaggagcccaagcccctgctgtgctcacagtatgagacactgagcgattctgagta

SEQ ID NO: 233124 - DNA, 7376 bp, synthetic construct
  misc_feature 1..7376: note = Description of Artificial Sequence: Synthetic coding sequence
  source 1..7376: mol_type = other DNA
atgagtgggtccacccaacccgtagcccaaacctggcgggcaaccgaacctaggtatccccctcattccctgtcataccccgtacaaattgcgagaactcacacagatgtcggcctgcttgaatatcaacaccactctcgggattacgcatcacacctttcccccggaagcattatacagcctcagaggcgcaggcccagcctactgagtgagttccagccgggaaatgaacgtagtcaggagctgcacttgaggccggagtctcacagttacctgcctgagctaggcaagagcgaaatggaattcatcgagagcaagagacctcgtttggagttgctccccgatcccttgctgaggccatctcctctacttgctaccgggcagcctgccggtagcgaggacctcacaaaggacaggagcctgactggcaagctcgagcccgtgtctcctccctcccctcctcacactgaccccgaattagaactagtgcctccccgacttagcaaagaggagctgatacagaacatggacagagtcgacagagagattaccatggtagagcagcaaatcagcaagctgaagaagaagcagcagcagttagaggaagaagccgctaaacctcccgagcccgaaaaacctgtgagtccgcctccaatcgagtcaaaacacaggtcccttgtgcaaatcatctacgacgaaaacaggaaaaaagctgaggctgctcacagaatactcgaagggcttgggccacaagtcgagttacccttatacaaccagccttccgacacgcggcagtaccacgagaacatcaaaataaatcaggctatgagaaagaaattaatcctatatttcaagagaagaaaccacgctcggaaacagtgggagcaaaagttctgccagcggtatgaccagctgatggaggcttgggaaaaaaaagttgaaaggatcgagaacaatccaagacgccgagcaaaggaaagtaaagtgcgcgaatactatgaaaagcagttcccagagattaggaaacagagggaactgcaggagaggatgcaacgggtaggccagcgcggttccggattgtccatgagcgccgctagatcggaacacgaggtgtcagaaatcatcgacgggttgtccgaacaggaaaatcttgaaaagcagatgagacagctggcagttatcccccctatgctgtatgacgccgatcagcagcgtattaagtttattaacatgaatggcttaatggccgatcccatgaaggtgtataaggaccggcaggtcatgaacatgtggtctgaacaagaaaaggaaacctttagagagaaattcatgcagcacccaaagaacttcggattaattgcaagttttctcgagcgcaagacagtggcagaatgtgtgctctattattatcttaccaagaagaacgaaaactataaatctctggttaggcgctcttacagaagaagggggaagagtcaacagcagcagcaacagcagcagcagcagcagcagcagcagcagcagcagccaatgccccgttctagccaggaagagaaagatgagaaagagaaggagaaagaggctgaaaaggaggaggaaaaaccggaggttgaaaacgacaaggaggatttgctgaaggaaaaaaccgacgacacatctggggaggacaatgacgaaaaagaagctgtcgcatctaagggtagaaagaccgccaattcgcagggaagacgcaaaggcagaattaccagaagcatggcgaacgaggctaactctgaagaagcaattacacctcagcagtccgctgagttagcaagcatggaacttaacgagtcatcacgttggaccgaggaggagatggaaactgccaagaagggcctgctggagcatggtcgaaactggagcgctatagcccgtatggttggttcgaagaccgtttcccaatgcaagaacttctactttaattataagaagagacagaacttagacgaaattctgcagcagcacaagctgaaaatggaaaaggagagaaatgctcggcgtaagaaaaaaaaggccccagcagcggcttcagaagaagctgcctttccgccagtagtcgaagacgaagaaatggaggcatctggcgtatccggcaatgaggaagaaatggtggaagaggctgaagccactgtgaacaatagctccgacacagagagtatcccctctcctcacacagaagccgctaaagataccgggcaaaatgggcctaagccaccagctaccctgggggctgacggaccccctcccggtcctccaacacccccaccagaggatattcccgctcccacggagcccactccagcatcagaggctacaggggctcccactcctcctccggctcctcctagcccctccgctcccccaccagtagtgccgaaggaggagaaggaggaggagacggccgctgcccctccggttgaggaaggtgaggaacaaaaacctcccgcagcagaagagctggccgtggatacagggaaggcggaagaacccgtgaagtccgagtgcacggaagaggctgaagaaggaccggcaaaggggaaggatgcagaggcagctgaggccactgctgaaggagctctcaaggcagagaaaaaagaaggcggaagtgggagagcaaccacggctaaaagctctggagctccccaggacagtgactcctcagctacatgctcggccgatgaggtggacgaggccgaggggggtgacaagaaccggctgcttagtcctaggccgagcttgctgacaccaacgggggaccctcgggctaatgcctcgccccagaaaccgttggacttaaagcaattgaagcaacgtgctgctgcaatcccacctattcaggtgactaaagttcacgaacctcctagggaagacgccgcacctaccaaaccggctccaccagcgccacctccaccgcagaatctccaacctgaatctgatgccccacagcagcctggcagctcaccacgtgggaagagccgttccccggctcctcccgctgacaaggaagcagaaaagccagtcttcttccctgccttcgctgcggaagcccaaaagttacccggagatcctccttgttggacctcaggtctcccgtttcccgttcctcctagagaagtgataaaagcctccccacacgctccagatccaagtgccttcagttacgcccctcccggacacccccttcccctaggactccacgacactgcaaggccagtcctgccacgtccaccaactatctccaatccacctccactgatttcctcagctaagcatcccagtgtcttggaaaggcagattggagctatcagccaggggatgtctgtgcagctgcatgtcccctactccgaacacgcaaaggctccagtaggtcctgttactatgggtctgccactgccaatggatcccaagaaactcgctcctttcagcggagtaaagcaggaacagctctcccccagaggacaggcagggcctcccgagtctttgggcgtgcccaccgctcaggaggctagcgtgctgagaggaaccgctttgggatctgtgcctgggggtagcattactaagggcatcccttccacaagagttcccagcgacagcgccatcacctatagaggatccatcactcacggaacaccagctgacgtcctgtacaaaggcaccataaccagaatcatcggcgaagactctccttctaggctagacagggggcgagaggactctcttcctaagggacatgtcatctatgaggggaaaaaaggacacgttctaagttatgaaggcggaatgtctgtgacgcaatgcagcaaggaggatggcagatcctcatctggccctcctcatgagaccgcagctcccaagagaacatacgacatgatggaaggcagagtcggacgcgctatctcctccgcctctatcgagggtttgatgggtcgggctattcctcccgaaaggcattcgcctcaccacttgaaagaacaacatcacattcgtggatcaattacccagggaataccgcgttcatacgtcgaagctcaggaggactatctgaggcgggaggctaaactcctgaagcgtgaggggactcccccaccacccccaccttcccgagatctgactgaagcctacaagactcaggctctcggaccactcaaacttaaaccggctcatgaggggttggtcgctactgtgaaggaagccggtcgatcaattcacgagatacctagagaggagctgcggcacacaccggaactgccactggcgccacggcctctgaaggaaggttctatcactcagggcacaccccttaagtacgatacaggcgctagtacaaccggtagtaagaagcatgacgtgcggagtttgatcggcagccctggaaggacatttccaccagtccatcctctggatgtcatggctgacgccagagccttggaaagggcctgctacgaggaatctctcaaaagtcggcctggaacggcctcctcaagtggagggtccattgccaggggagcgcctgtcatagtgccagagctcggcaagccaaggcaatctcctcttacgtatgaggaccatggcgctcctttcgcaggccatttgcctcgcggatctcccgttaccacacgcgagcctacacctcgtttgcaggaagggagtcttagtagcagtaaagcatcgcaggacaggaagctaacctcaacaccacgggagatcgccaaaagtccccactccacggtgcccgagcatcacccccatccaatatctccatatgaacacctgctgcgaggggtgtccggcgtcgacttataccgctcacatattccactggcttttgatcctacatcaatccctagagggatccccttagatgctgcagccgcttattatctgcctagacatctggcgccaaacccgacatacccacatctatatccaccctacttaatcagaggctatcctgacactgcagccctcgaaaaccggcagacaattataaacgactatatcacatcacagcagatgcatcacaacgctgcaactgctatggcccaacgagctgacatgctgaggggattgagtcccagagaatcctccctggcattaaactatgccgctgggcctcgcggtatcatcgacctatcccaggtgccccatttaccagtactggtaccaccaacccccggaactccagccacagccatggatcgcctggcctatcttcccaccgcaccccaaccattttcttctagacatagcagttccccactatcaccgggaggacctacccacttgacaaagcctactacaacatcatcttcagaaagggagcgtgaccgcgatcgcgaaagagatagagaccgcgagagagagaaaagtattctgacgtcaacaaccactgttgaacacgcacccatttggagacccggaaccgaacagtcttcaggatcttctggaggtggcggaggctcgagtagtaggcccgcttcacactcccatgctcatcaacactcacccatttctcccaggacccaggatgcgctgcagcagagaccaagcgtactgcacaataccggcatgaagggaattatcaccgcggtggagccctcgacaccaactgtgttgcgctcaacatccacgagctccccagtgcgccctgcagccacattccccccagcaacgcattgcccactgggcggtaccctcgatggagtctaccccactctgatggagccagtcctgttgcctaaggaagcccctcgggttgcacgtcctgagagacctagagcagataccggccatgcttttctcgccaagcctccggctaggagcggacttgagccagcttctagcccatcgaaaggtagcgagcctaggcctctcgtaccaccagtgtctggacacgcaaccattgctaggacccccgctaaaaatttggcgccacaccacgcatcgccagatcccccagcccctcccgctagcgcgtcggatccacatagggaaaagactcagtccaagccattctcaatccaagagctcgagttgagaagcctgggctaccatggcagtagctattcccccgagggagtggaaccagtgtcacctgtctcctccccctctttgacacatgacaaagggctgcctaagcaccttgaggagctcgataagtctcacctggagggagaactcaggccgaaacaaccaggtcccgtaaagctgggtggtgaggctgctcacctccctcacttgagacccctgcccgagagccaaccaagctccagtcctctgctgcaaacagccccaggggtcaagggacatcagcgcgtggtaaccctagctcagcatattagcgaagtcatcacccaggattacactagacaccatccacagcagctcagcgccccactgccagcacccctatattcattccctggtgcaagctgtccagtcctggacctgcgtcggcctcctagcgatctttacctaccaccacctgaccatggagctccagctcgaggctctccccacagcgaaggaggcaaacgatccccggagccaaataaaacctcggtgctcgggggtggcgaagatgggatagagcccgtctcgccacccgaaggaatgaccgaaccagggcactcccgaagtgctgtgtatcccctgctgtatcgagacggcgagcagacggaaccgtcccggatgggcagcaaaagcccaggcaatacttcacagcctcctgcgtttttcagtaaacttactgaatcaaactcggccatggtgaagtcgaagaagcaagagatcaataagaagctcaatacgcacaataggaatgagccggagtataacatcagccaacccggaactgagatctttaatatgccagcaatcacgggcaccggtctgatgacctatagaagccaagctgtccaggaacacgcctctacaaatatgggtctcgaagccattatccgaaaggccctgatgggcggtggaggcaaagccaaggtgtcaggccgtccttcctccagaaaggctaaatcccctgcacctgggctggcctctggagaccgtcctcctagtgtatctagtgttcactctgaaggggactgcaaccgacggactcctctgactaatagggtctgggaagatcggccttccagcgctggttctactccattcccctataacccactcatcatgcgcctgcaggctggcgttatggcctctccacccccacccggactgccagcaggttctggtcctcttgcgggtcctcaccacgcatgggacgaggaacccaaaccattgctctgctcacaatacgagacgctgtctgactcagagta

SEQ ID NO: 233125 - DNA, 7544 bp, synthetic construct
  misc_feature 1..7544: note = Description of Artificial Sequence: Synthetic coding sequence
  source 1..7544: mol_type = other DNA
atgtccggcagtacgcagcccgtggctcagacttggagagcaaccgagcctcgttaccctccccactccctgtcttatccggtacagatcgctcggactcacactgatgtcggactcctagaatatcaacaccacagtagggactatgcctctcatctgagccccggaagcattatccaaccccagcgtcgacgaccatccctcttgtccgagtttcagcccggaaacgaaagatctcaagagctacatctgaggccagaatctcatagttatctcccagagttaggaaaatccgaaatggaattcattgaatctaagcggcctcgcctggaattgcttcccgacccgctgttgcgtcctagcccacttctggccacagggcagccagcaggatcggaagaccttactaaggatcggtcactgacgggtaagctggaaccagtgagtcctcctagtcctccccacactgatccagagctcgagttggtcccgcctcgactgtcgaaggaagaactaatccagaatatggacagggtggaccgggagattaccatggtagaacagcagatttcaaagctgaagaagaaacaacagcagctggaggaggaagcagcaaagcctccggagccagagaagcccgtcagtcctcccccaatagaaagtaaacaccgtagcttggtgcagattatctatgacgagaatcggaaaaaggcagaggccgctcataggatcctagagggactgggaccacaagtggagctgccactgtataaccagccttcagatactcggcagtaccacgagaacattaaaatcaatcaggcaatgcggaagaagttaatactgtactttaagaggcggaatcacgctcgcaaacaatgggaacagaagttttgtcagagatacgatcagctgatggaagcttgggagaagaaggtagagagaattgagaataatccacgacgccgtgccaaggagtcaaaggtccgcgagtactacgagaagcagtttcccgaaattagaaagcagagggagctccaagaaagaatgcaatcccgcgtggggcagagaggatccgggctgtccatgtcagctgcaaggtccgaacacgaggtgtctgagatcattgatgggctgtctgagcaggagaatctcgagaaacaaatgcggcaattggccgtaatcccaccaatgctctacgacgccgatcagcagcggatcaaatttatcaacatgaacggactgatggcagacccaatgaaagtctataaggatagacaggttatgaatatgtggtctgagcaggagaaggaaacattcagagagaagtttatgcagcatcccaagaattttggcctgattgccagttttttggagcgcaagacagtagctgaatgtgtcttatattactacctgactaagaaaaacgagaattataagagcctagtccggaggtcctaccggcgaaggggaaagagccaacagcagcagcagcagcaacagcagcagcagcagcagcagcaacagcagcccatgccacgctccagccaagaggagaaagatgagaaggagaaagagaaggaggctgaaaaggaagaagagaagccagaggtggagaatgacaaagaagaccttttaaaggaaaagaccgatgacacttccggggaggataacgatgagaaagaggccgtggcttccaaaggcagaaaaaccgccaattcgcagggcagacgtaagggtaggattactcgctcaatggcaaacgaggccaacagtgaggaagctattacacctcagcaatccgccgaactggccagcatggagttaaatgaaagttcaaggtggactgaagaggaaatggagactgccaagaaggggctcctggagcacggcaggaactggtccgctatcgccaggatggtggggtccaaaactgtgagccagtgcaaaaacttctattttaattataaaaaacgacagaacctggacgagatcctgcagcagcacaaactaaaaatggaaaaagaacgaaacgcacgacgcaagaagaaaaaagcacccgctgccgctagcgaagaggccgcattcccccctgtggtggaagacgaagagatggaggccagtggtgtctctggtaacgaagaagaaatggttgaggaggcagaagcccttcacgcctcagggaatgaggttccccgaggggaatgcagcgggccagccaccgttaacaattcctcggatacggaatcaatccccagcccccatactgaggccgctaaggacacgggacagaatgggccaaaaccccctgcaacattaggtgcagacggcccacccccaggaccaccgactccccctcctgaggatattccagcccctacggagcctacaccagctagcgaagccaccggagcgcctacacctcccccagcacccccatcacccagtgccccacctcctgtggtaccaaaagaggaaaaggaggaggaaaccgcagcggctccaccggtggaagaaggtgaggagcagaaacctccggcagccgaggagctggccgttgatacgggcaaggccgaggagccggtgaaatcagagtgtaccgaagaagccgaagagggacccgcaaagggcaaggacgctgaagcggctgaggcaaccgctgaaggggcactgaaagcggagaaaaaagaaggcggttcggggagagccactacagcgaaaagcagcggtgcacctcaggacagtgattctagcgcaacttgcagtgccgatgaggtggacgaggccgagggtggagataagaaccggcttctgtcccccagacccagcctgctgactcccaccggcgatccacgcgctaacgcctccccgcagaagccactagacttgaagcaacttaaacagagagccgcagctatacctcccattcaggtgaccaaggtgcacgaacctcccagagaagatgctgcaccgacaaagccagccccaccagcacctccgcctcctcagaatctccagcctgaatcagacgcgccacagcaacccggatctagccctcgaggaaaatcccgcagtccagcccctccagccgataaagaagcattcgccgctgaggcccagaagcttccaggcgaccctccttgctggacgagcgggctgcccttccccgtcccgcctcgcgaagtcatcaaagcaagccctcacgcacctgatcccagcgccttttcatacgcccctccaggccatcccctgccactaggcttgcatgatactgcgagaccagtactgccccgacctcccaccattagcaacccaccacccctaattagttctgccaaacaccccagtgtcctagaaagacagataggggcaatatcccagggcatgagtgtgcagctgcacgtgccatacagcgaacacgcaaaggccccagtgggacccgtaacaatgggcctgcccttacccatggacccaaagaaacttgcgcctttctccggcgtgaaacaagaacaattgtcacccagggggcaggcgggacccccagaatccttaggcgtccccactgcccaggaagcttctgtgctgaggggtacagctttagggagcgtcccgggaggctccataacgaagggcattccctctacacgcgtcccttccgacagtgccatcacctataggggatctattactcacggtacaccagcagatgtgctttataagggaaccatcacaagaataattggcgaggattcgccttctcgcctggatcgcggtcgggaagatagtctgcctaaaggccatgttatctatgaggggaagaaaggccatgttctctcgtatgagggcggaatgagcgtcacacagtgtagtaaagaagatgggcgatcatcttctggcccacctcacgagacagctgccccaaaacgtacctatgatatgatggagggtcgggtggggagagccatcagcagtgcatccatcgagggcctgatggggagggcaatccccccagaacgacattcaccacaccacctgaaagaacagcatcatatccgcggttcaattacacagggtattccaaggtcatacgtggaggcccaggaggattacctgagacgcgaggcaaagctgctcaagagggaaggcactcctccacccccacctccttcacgcgatctcactgaggcctataaaacccaggcccttggtcctctgaaactgaagccggctcacgagggacttgttgccactgtgaaggaggccggaaggtccatacacgagatacctcgggaggaattaagacatacacccgagctgccactggctcccagacccttgaaagagggatctatcactcagggcacccccctgaaatatgacactggagcgtccaccaccgggtcgaaaaagcatgacgttcgatcactgatcggctctcctggcagaacgttcccaccagtgcatccgctggacgtgatggctgatgcccgtgcccttgagcgcgcatgttatgaggagtcactgaaatcccgccctggaaccgcatcctcttcaggtggttctatagctcggggtgcacctgtgattgttcccgaactgggtaaacctcgccagtctcccctcacatatgaagatcacggggcaccgttcgcagggcacctacccaggggatcacctgtgactacccgcgagcctactcccaggctgcaggagggctcattgtcctcttcaaaggcatctcaggaccgaaagctgacaagcaccccaagggagatagccaagtcaccacattccacagtccccgaacaccatcctcaccccatttccccatatgaacacctgcttagaggcgtttctggtgtggatttgtacaggtcgcatattccgcttgcctttgatccaacgtctatacctagggggatcccattggatgctgctgccgcatactatctgcctcggcatctggcccctaaccctacgtacccccacttataccccccatatctcatcagagggtacccagacacggcagctttggagaatcgacagacaatcatcaatgattacattacaagccagcagatgcaccacaatgcggctactgcaatggcacaacgcgcagacatgctcagagggctcagccctcgcgaatccagtttggcactgaactacgcagcaggtccccgaggcatcatagacctgtcccaagtgccacacttaccagtcttggtgcctccaacacccggaacccccgctactgccatggacagactggcatatctccccacagctccgcagccattttcgtctcggcactcttcctcgcctcttagccccggtggacctactcacctcaccaagccgactactacctcttcctctgaacgggagcgcgatagggatcgggaacgggaccgcgatcgggagcgagaaaaatctatcctgacctcaaccacaaccgtggagcacgccccaatctggcgcccaggcaccgaacagagctccggctcctcaggaggtggcggtggatcctcctccaggccagccagtcacagtcatgcccaccagcattctccaatctctccccgaactcaggacgcactgcagcagcgccctagtgttctccacaacacagggatgaaaggaattatcacagcggtggaacccagcacccccaccgtgctgagatccacttcgacgagcagcccagtgcgcccagccgcaacctttcctccagcaactcattgccctctaggcggaaccctggacggtgtttaccctactctcatggaacccgtcctgttgcccaaggaagctcctcgcgtcgccagaccagaacgcccacgcgcagatacagggcacgcattcctggcaaaaccccctgctcgctctggcttggaaccagcaagcagtccgagcaaggggtcggaaccacgcccattagtccctcccgtgtcaggtcatgccacaatagccagaacccccgcaaagaatctcgcccctcatcatgccagccctgatccgcctgcaccccctgcatcggcttcagacccacacagagagaagacacagtccaaaccttttagcattcaggaactggaactacgatccctcggctaccatggctccagttattcccccgagggcgtggagcctgtcagcccagtatcctccccttccttaactcacgacaaaggcctgcctaagcacctggaagagctcgacaagagccacttggaaggcgagcttcggcctaagcagccgggtccagtcaagctggggggagaggccgcacatctgccccatctgcgaccgctccctgagtcacagccaagttccagtcctctgctgcagacagctccaggcgtcaaggggcaccagagggtcgtaaccctggctcagcatatttctgaagttataacccaagactatacccgccaccatccgcagcagttgtccgctccactgccagcaccactgtactctttccccggtgccagttgcccggtcctggaccttagaaggcccccatcggacctgtaccttccccctccagatcacggagcccctgctaggggaagcccacactcggagggaggcaagcggagtccagagcccaacaagacttcggtattggggggtggtgaagacggtatcgaacccgtgtccccgccagagggcatgacagaacccggacatagtagaagtgcggtgtatcctctcctctaccgagacggcgaacagacagagccaagtcggatggggtcaaaaagcccagggaatacaagccagcctccggcattctttagtaaacttaccgaatcaaattctgctatggtaaagtccaaaaagcaagaaattaacaaaaagctcaacacccacaaccgcaatgagccagagtacaatattagtcagccaggcacagaaatattcaacatgcctgccatcacgggtacaggcttaatgacctatcgctctcaggcagtccaggagcatgcatcaacaaacatgggactggaggcaatcatccgcaaagctctgatggggaagtacgatcaatgggaagagtcacctcctttgagcgctaatgctttcaatcccctcaacgcctcagccagcctaccagccgctatgccgatcacagccgctgacgggcgttccgaccacacactcacttcccccggaggtgggggtaaagctaaggtctctgggaggccaagcagccgaaaggccaagtcccccgctcctggcctcgcctccggagatcggccaccctcagtgagttcggtgcactccgaaggcgactgcaatcggagaacacccctgacaaaccgggtgtgggaggaccggccttcttccgcgggatccacgcctttcccatataatccacttattatgaggttacaagcaggcgtcatggctagcccacctccgcctggtctgccagccggaagcggaccattggccggaccccaccacgcttgggatgaagaacctaagccattgctgtgtagccagtacgaaacgctaagcgatagcgagta

SEQ ID NO: 233126 - DNA, 7514 bp, synthetic construct
  misc_feature 1..7514: note = Description of Artificial Sequence: Synthetic coding sequence
  source 1..7514: mol_type = other DNA
atgagcgggtcaactcaaccagtggctcagacatggagggcaacggaaccacgttacccaccgcactcgcttagctacccagttcagattgcaaggactcatacggacgtcgggcttcttgagtatcagcaccattcccgggactacgcgtcacacctgtccccaggcagtatcatacagccccagcggcgaagaccttccctgctgagtgagtttcagccaggcaacgaacggagccaggagctgcacctgcgtccggaatctcatagttacctgcctgaactagggaagtctgagatggaatttatcgaaagcaagcggcctagattggagttgctccccgacccattgttacgcccttccccactcctcgccaccggtcaaccagctgggtccgaagacctgaccaaagaccgctctctgaccggcaaactcgagcctgtgagccccccaagtccccctcacaccgatcccgagttggaactcgtgccacccaggctgtctaaggaagagttgatacagaacatggacagagtggatcgtgaaatcacaatggtcgaacagcagatatctaaactgaagaaaaaacagcagcagctggaggaggaggctgcgaagccgcctgaacccgagaagcctgtttccccccctcccatcgagtcaaagcatagaagtctcgtccagattatttatgatgagaacagaaaaaaagccgaggcagctcatcgcattctggaagggttgggcccacaggtcgagctccccctgtacaaccagccaagcgacacccgtcagtaccatgagaacatcaaaatcaatcaggcaatgcgaaagaaactgatcctttatttcaagagaaggaaccatgccaggaaacagtgggaacagaagttctgccagaggtacgatcaacttatggaggcctgggaaaaaaaggtggaacgcattgagaacaaccctaggaggagagccaaggagtccaaggttcgtgaatactatgaaaagcaatttccggagatcaggaagcagcgcgaactccaggaaaggatgcaaagagtcggccaacggggaagtggtctttccatgtctgctgctcgttctgagcacgaagtttcggagataatagatggtctgagcgagcaggaaaatcttgagaagcagatgaggcagctggcagttatccccccaatgctatacgacgcagatcagcagaggattaaattcatcaacatgaacggtttaatggctgaccccatgaaagtctacaaagatcgacaagtcatgaatatgtggtctgaacaagagaaggaaactttccgcgaaaagttcatgcagcaccccaaaaatttcgggctgatcgctagctttcttgaaagaaagactgtggcagaatgcgtgctgtattattacctgactaaaaagaacgagaattacaagtcgctggtgcgacggtcctacagaaggagaggtaagtctcagcagcagcaacagcagcaacagcagcagcagcagcaacagcaacaacaaccgatgcctcggtcatctcaggaagagaaggacgaaaaggaaaaggagaaagaagcagaaaaggaggaggaaaaaccagaggtcgaaaacgataaggaggacctgcttaaagagaagactgacgacacttccggcgaggacaacgatgagaaggaagccgtcgcatccaaggggaggaagacggcgaactcgcagggtaggagaaagggcagaattacccggagcatggctaacgaggccaactctgaggaagccattactcctcagcagagtgctgagctagcatcaatggaattaaacgagagctcaagatggactgaggaggaaatggaaaccgctaaaaaggggctcctggagcacggcaggaattggagcgcgattgctcgcatggtgggttcaaagaccgtgagtcagtgtaaaaacttctattttaattacaagaaaagacagaacttagatgaaattctgcaacagcacaaactcaagatggagaaagagagaaatgccaggaggaagaagaagaaagcacctgcagcggcatccgaggaagctgccttcccacctgtcgtggaagatgaggagatggaagccagcggtgtgtcaggcaacgaggaggagatggtggaagaggccgaggcaaccgtaaacaactctagcgacaccgagagcattcccagcccccacaccgaggcagccaaagataccggtcagaacggacccaagccacccgctacgcttggcgcagacggcccacccccaggccctccgactccgcctccggaggacatccccgctccaacggagcctacgcccgcatccgaggccacaggggcacccactccccctcccgctcctccctcaccgtccgcgccaccccctgtggtgccgaaagaagagaaggaggaggagacagccgcagcccctcccgtggaagaaggggaggagcagaaaccaccagccgctgaagagctcgccgtggacacaggcaaagccgaggaaccggttaaaagcgagtgcacggaggaagccgaagagggacctgccaaaggaaaggacgcagaggccgctgaagctaccgcggagggtgcgctgaaagccgagaagaaagagggcggaagcggacgcgctactaccgccaagagctcaggtgcacctcaggattctgacagctctgccacatgtagcgcagatgaagtggacgaggccgagggcggtgacaaaaatcgactgctgtccccccgtccctccctgctaactccgaccggtgatccgagagccaacgccagccctcagaagcctttggatcttaaacagttgaaacagagggctgccgcaataccacccattcaggtcactaaagtgcatgagccccctagggaagatgcggcaccgaccaagccagcccctccagctccaccgcctccccagaatctacagcctgagagtgacgccccacaacagcctggcagcagccccagaggaaagagtcgatcccctgcaccgccagccgacaaggaagcagagaaacctgtattcttccccgctttcgcagctgaagcccagaaactgccaggggatcccccatgctggaccagcggcctgcctttccccgtcccgcctcgggaagtgatcaaagcctcccctcatgcacctgatccctcagctttcagttatgctcctcctggccaccccctgcctctaggtctacacgatactgctcgcccagtgctcccgcgaccgcctacaatcagcaatccaccacctcttatctcttccgcaaaacacccatcggtcctcgaacgccaaataggagcaatctcgcagggtatgtcagtgcagttgcacgttccttacagcgaacatgctaaggccccagtgggtcccgtgactatggggttacctctgcctatggacccaaaaaagctggctcccttcagcggggttaaacaagagcaactgtctcctcgaggccaggccggacccccagagtctctgggtgtcccaacagcgcaggaggcctcagtcctccgaggtaccgcccttggcagtgttccaggcggatccattactaagggaatcccatcaacaagggtcccctccgacagcgccataacatatcgaggcagcattacgcatggtacccccgctgacgtgctatataagggtacaattactcgaataatcggtgaagacagcccctcaagactggacagggggcgagaagattccctccctaagggacatgtcatctatgagggaaagaagggacacgtgctgtcttatgaaggtgggatgtctgtcacgcagtgcagcaaggaagacggcaggtcttctagcggaccccctcatgaaacagctgctcccaagaggacctatgatatgatggagggcagagtcggacgcgcaatcagctcggcctccattgagggccttatgggaagagccatcccgcctgagaggcatagccctcaccacctgaaggaacagcatcacatccgcggaagtataactcagggaattccacgcagttatgtcgaagcgcaagaggactatctgagaagggaagctaaactcttgaagcgtgaaggtactcctcctccaccacccccatctcgggacctgactgaggcatacaaaacgcaggccttgggcccactgaaactgaaaccagcccacgaagggctggtagcaaccgtgaaggaggctggcagatcaatacatgagattccaagagaggaacttcgtcacacccctgaacttccactcgcaccaagacccttgaaggagggtagcattacccaggggaccccccttaaatatgacacgggggcaagcactactgggtccaagaagcacgacgtcagatctctgataggcagtccagggagaacattccctcccgtccatcccttggacgtgatggcggacgccagagccctggagcgggcatgttacgaggagagtcttaagagtaggccaggaaccgcctctagtagcggcggtagcatcgcgaggggagcgcctgtaattgttcctgagctcggcaaaccaagacagtctccactgacttatgaggaccatggagctccctttgccggtcatctgccacgcggatcaccggttactacaagagagcccactcccaggctgcaggagggtagcctatccagctctaaggcatctcaagaccgtaagctgacatccacacccagagagatcgccaaaagtccccactcaaccgtccccgagcaccacccccatcctatttccccttacgagcacctcctgagaggcgtgtccggcgttgacctttataggtcgcatatcccgttggcattcgatccaaccagcatccctcggggaattcctctggacgccgcagcagcctactacctaccacgccatcttgctccaaaccccacatatccccacctttaccccccttatctgattagaggctatcccgacacagccgcacttgaaaataggcagactatcattaacgattatatcacctctcagcagatgcatcataacgctgctaccgccatggcacagagagctgacatgctacgcggtctgtcccctagggaaagttctttggcgcttaactatgcagctgggccacgaggcatcatcgatctctcgcaggtgccccatctccctgtgctggtgcctcccacgcccggaacgcccgcaacagctatggatagattagcctatctgccaaccgcgccacaacccttctctagtaggcacagctcttctccattgtccccaggcggacccactcacctgaccaagcctacgacaacctcctcatccgagcgcgagcgggatagagaccgcgagagagacagagatcgcgaacgcgagaagagtattttaacttccacgaccaccgttgagcatgctcccatttggaggcccggtaccgagcagagctcaggcagttccggaggaggaggcggatcctctagccgccctgcttcacattcacacgctcatcaacattctcctatatctcctcggacgcaggacgccctgcagcagaggccttccgtacttcataacactggtatgaagggcatcattacagcagtggaacccagtacacccacagtattgcgctccacttctacttctagcccggtgagaccggctgcgacgttcccacctgctactcattgccctctcggcggaacactggacggtgtctatcctactctgatggagcccgtgctgctgcctaaggaggcccctagagtcgctcgtcccgaacgacctcgtgcagacaccggacacgcctttctggccaaaccccctgccagatccggactcgagcccgcaagcagcccgtccaaaggaagcgagccaaggccactcgttccgcctgtaagtggacacgccacaatagcacggactccggcaaaaaacttggccccacatcacgcgagtcccgatcctccagctcctccagcttcggccagtgatccccatcgagagaaaacccaatctaagcccttctcaattcaagaactcgagctccggtcactagggtatcacggatcttcttactctcctgagggcgtcgagccagtgtcccccgtgagctctccttctctaacccacgataaggggcttccgaagcacctcgaggaactcgataagtcacatctggagggagaactgaggccaaaacagcccggtcccgtgaagttggggggagaagcggcacacctgccccatctacggccactgcccgagagccagccaagttcttcgcctcttctgcagactgctccaggggtgaagggccaccaacgggtggtaacccttgcccagcacatcagtgaggtgattactcaagactatactcggcatcatcctcaacaattgtccgccccattacctgccccattgtattcatttccgggagcaagctgtcccgtgctggatctgagaagacctcccagcgatctgtacctaccaccccctgatcatggcgcaccagccagaggatccccacacagtgagggcggaaaacggagcccagagcccaataagacttccgtccttgggggtggcgaagacggcatagagccagtaagtcccccagaggggatgacggagccagggcactcacgctcggccgtgtaccccttgttgtaccgtgatggagagcaaaccgagccctctagaatgggatctaagagccccggaaacacgagtcagccgccagcgttcttcagtaaattgactgagagcaacagcgctatggtgaagtcaaagaaacaagaaataaataagaaactgaacacccataatcggaacgagcctgaatacaatattagccaaccgggtaccgagattttcaatatgccagctataaccggcaccggactcatgacgtacaggtctcaggccgtgcaggaacacgcaagcacgaatatgggattggaagccattataaggaaggctctcatgggcaagtacgatcagtgggaggaaagcccacctcttagtgctaatgccttcaatcccctcaacgcgtccgcctctctgcctgccgcaatgccaattacagcggctgacggtaggtccgatcataccttgaccagccccggtggcggaggaaaagctaaagtctcaggtcgtccttcctctagaaaagccaaaagtcccgctccgggtctcgcctccggtgacaggcccccttctgtgagttctgtgcattcggagggcgactgtaacagaagaaccccactcacgaatagagtctgggaggatcggcctagttcagctggatcgacgcccttcccttataacccgttgattatgagactgcaggccggagtaatggccagtcctccccctccagggcttccagctggcagtggtcccttggctggtcctcaccatgcatgggatgaggaaccaaagcccctgttgtgtagccagtacgagactttaagcgatagcgaata

SEQ ID NO: 233127 - DNA, 7541 bp, synthetic construct
  misc_feature 1..7541: note = Description of Artificial Sequence: Synthetic coding sequence
  source 1..7541: mol_type = other DNA
atgtctgggagtacccagccggtcgcacagacctggagagccaccgagcctcgctatcctcctcacagtctgtcctaccctgttcagattgctcgcacacacaccgacgtcggactgctagagtatcagcaccacagtagagattacgctagccacctttcccccggatcaattatccaaccgcagaggagacgtccctctttgctttcggagttccagccaggaaatgagaggtcgcaggaattacacctgcggcctgagagtcacagctatctaccagaactggggaagtccgagatggaatttattgagtccaagcggccacggctcgagctcctgcccgatcccctgttgcgaccgagccctcttctcgctaccggtcagcccgcaggtagcgaagatctgacaaaggatagatccctgaccggcaaactcgagcctgtaagcccccctagcccccctcataccgaccccgaactggaactggttccacccagactatctaaggaagaactgatccaaaatatggaccgtgtggaccgggaaatcactatggttgagcagcaaatatcaaaattgaaaaagaaacagcagcagctggaagaggaggcggctaagccacccgaacccgagaagcctgttagtccacccccaatagaatccaaacacaggtccctggtgcaaattatctacgatgaaaacaggaaaaaggccgaggcagcgcacagaatcctggaagggctgggcccacaggtggagctgcctctgtacaatcagccctcagatacccgacagtatcatgagaatataaagattaatcaggcgatgcggaagaaactcatcctctactttaaacgcagaaatcacgctcgtaagcagtgggagcaaaaattctgtcagaggtacgaccagctaatggaggcctgggagaagaaggtcgaacgaattgagaataatcctaggaggagggctaaagaaagcaaggtgcgagagtactatgagaagcaattccctgaaatcagaaaacaacgtgaactgcaggagcggatgcagtcgcgcgtcggacagagggggagtggactttcaatgtctgccgcacggtctgaacatgaggtgagcgagattattgatgggctgtcagagcaggaaaatctggaaaagcagatgaggcaactcgcagtcattccacccatgctctacgatgccgaccagcagagaataaaatttatcaatatgaatggccttatggccgatcctatgaaagtatataaagatagacaggtcatgaacatgtggtctgagcaggagaaagaaactttccgggaaaagtttatgcagcaccccaagaacttcggcttgatcgcaagctttctggagcggaagacggtggccgagtgcgtcttgtactattatttgactaaaaagaacgagaactataaaagtctcgtccgcaggtcctatcggaggcgcggaaaatctcaacagcagcagcagcagcagcagcagcaacagcagcagcaacaacagcagcctatgcccagatcctcgcaggaggagaaggatgagaaggagaaggagaaagaggcagaaaaagaggaagaaaagccggaggtagaaaatgataaagaggacttgctcaaggagaaaaccgatgacacttcgggtgaggataacgacgagaaagaagctgtggcctccaaaggacggaagaccgctaacagccaaggcaggaggaaaggtaggattactcgatccatggccaatgaggctaattccgaagaggcgatcacacctcagcagtccgccgagctcgcatccatggagctcaacgagtcatctcggtggacggaagaggagatggaaactgcgaagaagggcctccttgagcacgggaggaattggagtgccattgcacggatggtgggttctaagactgtgagccagtgtaagaatttctattttaattacaagaaaagacagaacctagatgaaatactgcagcagcataagcttaagatggaaaaagaacgcaatgcgcgacgcaaaaaaaagaaggcaccagctgccgcatctgaagaggcagcctttccccctgtcgttgaggatgaggagatggaggccagtggagtgagcggcaacgaagaagaaatggtcgaagaggctgaggccctgcacgccagtggaaacgaggtcccgagaggcgaatgcagcggaccagcaaccgtaaacaactcttctgatactgaaagtatcccatctcctcataccgaggccgcaaaggatactggacagaatggtcccaagcctccagctaccctcggagcagatggacctccacctggacctccaactcccccacgcagaaccagccgacctacagagcctacaccggcaagtgaggccactggcgcaccaacaccgccacccgcacctcccagcccatctgctccccctcctgtggtgcccaaggaagagaaagaagaagagacggctgccgctcccccagtggaggagggcgaggaacaaaaacccccagcagccgaggaattggccgtagatacggggaaagccgaggaacctgtaaagagcgaatgtaccgaagaggcagaagaaggacccgcaaaaggaaaggacgccgaagctgctgaggcgacagccgagggcgctctcaaagcggagaagaaggaagggggaagcgggagggcaaccacagctaagagtagcggagccccacaggatagcgattcctcggccacgtgtagtgccgatgaggtagatgaggccgaaggcggtgacaaaaacaggctcctttcaccaaggccctcattactcacaccaacgggggaccctcgagccaacgctagcccccagaagcctctcgacctcaagcagctcaaacagagggccgcagcaatcccacccatccaggttaccaaggttcatgagcctccaagggaggatgccgcacctaccaagcccgcacctccggcaccaccaccccctcagaacttgcagcccgagtccgatgcaccacagcagcccggaagcagccccagaggcaaatctcgttccccagccccacctgccgacaaagaggccttcgcggcagaagctcagaaactacctggagatcccccttgttggactagtgggctcccattcccggtgccacccagggaagtgattaaggcttcaccgcacgctcctgacccatccgccttctcatacgcacctcccggacatcccttacccctaggacttcatgatactgcacgtcctgtgttgcccagacctccaaccatttccaacccaccacccttgatcagtagcgcaaaacacccctctgttctggagcgccaaataggcgctatttctcagggaatgtcagtgcagttgcacgtaccctacagcgagcacgctaaagcccctgtgggcccagtcacgatgggactacctcttcccatggacccaaaaaaattggcccctttctccggtgtgaagcaggagcaactttctccaaggggccaggctggacccccagaatccctcggggtgccaacagcccaggaggcttcagttcttaggggaactgccctagggtctgtgccgggtggcagcattaccaaaggcattccatccactcgagtgccttcagacagcgccattacctatagaggttctatcacccatggtacaccagccgacgtgctctacaagggtaccattacaaggatcattggcgaggattcaccctctcggctcgaccgagggagggaggactctttacccaaggggcacgtcatttacgaggggaagaagggccacgtactgagttacgaagggggaatgagcgttacccagtgctccaaggaagacgggagaagttcctcaggccctccacacgaaacagctgccccaaaacggacctatgatatgatggaggggagagttgggagagccatcagttcagctagtatcgaaggcctcatgggtcgggctattccaccggagagacacagcccacaccacctaaaagagcagcatcacatacgcggaagcattacacagggtatccccagatcctacgtcgaggcccaggaagattatctccgtagagaagccaagctgctcaaaagagaaggaaccccccctccgccacctcccagccgcgatttgaccgaggcatacaaaactcaagcactgggacctcttaaactgaagcctgcacacgaaggcttagtggctacagtcaaagaggccggaagatctatccacgagattccacgagaggagttgagacacacaccagagctgccattagccccacggcctcttaaggagggctccattactcaggggactcctcttaagtatgataccggagcctcgaccacagggtccaagaagcatgacgtgcgctcactgatcggcagcccaggccgaacctttccccctgttcatccactggatgtcatggctgacgcacgcgcactggaaagagcttgttatgaggagagcctgaaatctaggccaggcaccgctagcagcagtggaggatcaatagcaagaggagctccagtcatcgtgcccgaactcggcaaaccgagacaaagtcccttgacctacgaggaccatggggctccctttgcgggacatcttcctcgaggatcacctgtgactaccagggagcccacacctcggctccaggagggatccctgtcaagtagcaaggcaagccaggaccggaaactcacctccactccccgtgaaattgctaaaagtcctcatagcactgtacccgaacaccacccacacccaatctctccctatgaacaccttctcagaggcgtatccggcgtagacctgtatcgcagtcacatcccattggcgttcgacccaacaagcatcccgaggggcatccctcttgatgccgctgccgcatactacttacccaggcaccttgcaccaaacccaacttacccccacctctatccaccttacctgattcgcggatatccagatacggctgcactggagaatagacagaccatcattaatgactatataacctcacaacagatgcaccacaatgccgctaccgctatggcccagcgcgcagacatgcttcgaggcctgtcaccacgggagagcagcctggctctcaactatgcggctggtcctagaggcattatcgacttatcccaagtgccacaccttccagtcttagtcccgcctacgcccggaacacccgctactgcaatggatcgtctggcatacctccccaccgcgcctcagcccttctcgtcccgccattctagctctccgttgtctccaggtggtccaactcacctaactaagcctactacaactagtagcagtgaaagggaacgcgaccgtgaccgagagcgagaccgtgaccgggagcgggagaagagtattcttacatcaactacaaccgtcgaacacgccccaatttggcgcccaggaactgagcagagctccggtagctccgggggaggcggtgggtcttccagtagaccagccagtcacagccacgctcaccaacattctcccatcagtcctagaacccaggacgctctgcagcagcggccttctgttctccacaatacaggcatgaaaggaatcatcaccgccgtcgagccaagcacacctactgtcctgaggagtacctcaacaagttctcccgtgagacctgcggcaacctttccgcctgccacacactgtcctttgggcggtaccttggacggtgtttatccaacattaatggagcccgtgttgcttcctaaagaggcccctcgtgtcgccaggcctgagaggcctagggcagatactggacacgcgtttctggccaaacccccagctagatctggattagagccggcatccagtccttcgaaaggtagcgagccgagacctctcgtcccgcctgtatccggccatgctactattgccagaacaccagctaagaatctggctcctcaccatgcttcaccagaccctccagcccctcccgcttccgcttctgacccccatagggaaaaaacacagagtaaacctttctctattcaggaactggaattgagaagcctgggataccatggtagcagttacagccctgagggcgttgagcctgtgagtccagtgtcgagtccctcgcttacacacgataagggactccccaaacacttggaagagctggacaagtctcaccttgaaggggagctgaggccaaaacaaccaggccctgtcaaactcggcggtgaggctgcacacctcccacacctgcgccctctgcccgaatcccagccctcctccagcccactcctccagactgccccaggagtgaaaggacatcagcgagtagtcactctggcccagcatatcagcgaagtgataacacaggactacactaggcaccatcctcagcagctgtccgcacctctgcccgcaccgctgtatagctttcccggtgcctcatgtccggtcctcgatctgcgcaggccaccttccgacctctatcttcctcctcctgaccacggggctcccgcaagaggatccccccatagtgaaggaggcaagaggtcacccgaacccaataagacatcagtgttgggcggaggtgaggatggtatcgaaccagtctcacctcctgagggcatgacagaaccaggtcatagccggagcgccgtatatccactgctatatcgcgatggggaacaaaccgagccctccaggatgggatccaaatcacccggaaacacttcccagccacccgcttttttttccaaactgaccgaatccaactcagccatggtaaaatctaagaagcaggagatcaacaagaagctaaatacgcacaatagaaatgagcccgaatacaacatcagtcagcccggaacagagatcttcaatatgcccgctatcacgggtacgggtctgatgacctatcggtcacaggccgtgcaggagcatgctagcaccaatatgggtttggaagccatcattcggaaggccttaatggggaagtacgatcagtgggaggagtctcctccactcagtgctaacgctttcaatccgcttaatgccagtgcctctctccccgcagccatgccgatcacagctgccgatggtcgatccgaccacaccctcacctcccctgggggtggcggaaaggcaaaggtgtcagggagaccgtcatctagaaaagcgaaatcaccagcacctggcctggctagtggggacaggcccccttcggtatctagcgtccattctgaaggagattgcaacaggagaacacctctaactaacagggtctgggaagatcgacctagctcagccggttccaccccattcccatacaatccactcattatgcgcttgcaggcaggcgttatggcttctccccctccgccaggtttgccagccggttcaggaccgctcgccggaccccaccacgcatgggatgaggaacctaaacctttactctgcagccagtatgagactctgtcggacagtgagta

SEQ ID NO: 233128 - DNA, 1821 bp, synthetic construct
  misc_feature 1..1821: note = Description of Artificial Sequence: Synthetic coding sequence
  source 1..1821: mol_type = other DNA
ctgcaatccggtgctactcattgcccgttaggagggacactcgacggcgtttaccccaccctgatggaacccgttctgcttccgaaggaggcacctcgcgtcgcaagaccagaacggccacgggcagatacgggccatgcctttctggcaaagccaccggcaagatccgggctggaacccgcatcttcgccctcgaaaggatcggagcctagacccctggtgccacctgtgtcaggacatgccactatcgcacgaacacccgcaaaaaatttagccccacatcacgcttctcctgacccccctgcccctcccgctagcgcaagcgacccccatcgcgagaagacacagagcaaacctttcagcattcaagagcttgaactgagatccctgggctaccatggctcctcctacagccccgaaggtgtggagcccgtgtctcctgtctccagcccctcactaacacatgacaaaggtttgcccaaacatctcgaggaactggataaatcccatctggagggggagcttcgaccaaaacagccaggccctgtgaagcttggaggcgaggcagcacaccttccccatctgcggccattgcctgaatcgcaaccctcaagctcgcccctgctgcaaacagccccaggtgtgaagggccatcagcgggtcgtgaccctagcccagcacatttccgaggtgattacacaggattataccagacaccatcctcagcagctgagcgcaccgctgcctgcgccattgtactctttccctggagccagctgccccgttctggacttgagaaggccaccatcagatctgtatctgccacctccagaccatggtgctcccgctcggggaagcccccattcagagggaggaaaaaggtctccggagcccaacaagacttcggtgttaggaggaggagaggacggcatcgagcccgtgtccccacctgaagggatgaccgaaccaggacatagccgctcagccgtgtatccactcctgtatcgcgatggcgaacaaacagagcccagccggatggggtccaagagcccaggcaacacttcgcagccccctgcgttcttcagcaaattgaccgagagcaacagcgctatggtgaaatcaaaaaagcaggagattaataaaaagctgaatacccacaatcggaacgagcccgaatacaatatctcacagccgggaacagagatcttcaacatgcccgctataacaggaacaggactcatgacgtaccggtcccaagcagtccaagagcacgcatccaccaacatgggcctagaggccatcatacgaaaggctctgatgggcaagtacgatcagtgggaggaatctcctccactcagcgccaacgcgtttaatcctctgaatgcatcggcatctctgcctgcagccatgcccataactgctgcagacggacgcagcgaccacactctaacctctccaggtggcggtggcaaagccaaagtgtccggaaggcccagctcccgaaaggcaaaatcgcctgctcccggactagcgtcgggcgaccgccctcccagtgtttccagcgtgcatagtgaaggcgactgtaacaggaggacacctcttactaatagagtgtgggaggacagaccttccagtgcagggagcaccccttttccttataaccctttgatcatgaggctgcaagctggtgtcatggcttcccctccaccccctgggcttcccgcagggagcggcccactcgctggaccccaccatgcctgggacgaggagcctaagccattgctttgttcccagtatgagacgctgtccgattccgaatag

SEQ ID NO: 233129 - DNA, 726 bp, synthetic construct
  misc_feature 1..726: note = Description of Artificial Sequence: Synthetic coding sequence
  source 1..726: mol_type = other DNA
atgttttatagcggactactgaccgaaggtgggaggaaagagaccgatatgcgcgaggctgcgtccctgagacagcagaggcgtatgaagcaagctgtgcaattcatacacaaggactcagccgacctacttcctctggacgggctgaagaaactgggcagttctaaggacatgcagcctcacaacatactgcaaagaaggctgatggagaccaacctcagcaagttgcgcagcgggccaagagtgccatgggcaagcaagaccaacaagctcaaccaagctaaatctgaggggttaaagaaatccgaggaggacgacatgatcttggtatcctgccagtgtgcagggaaagatgtcaaagctctggttgatacagggtgtttgtataacctcatttcgctggcctgtgtggatcggttaggcctgaaggagcacgtgaaaagccacaaacatgaaggggaaaagctaagtttgcctcgtcatctcaaagttgtggggcagattgagcacttagtgatcactttaggtagtctcagactggattgtcccgctgcagtggtagacgataacgagaagaatctttcactggggcttcaaacactcaggagcctgaagtgcattattaatctagataaacacaggctgatcatgggcaagaccgacaaagaggaaattccattcgtcgagaccgtcagcctgaatgaggacaacacttctgaagcctag

SEQ ID NO: 233130 - DNA, 774 bp, synthetic construct
  misc_feature 1..774: note = Description of Artificial Sequence: Synthetic coding sequence
  source 1..774: mol_type = other DNA
atgtcaacatcccagccaggagcctgcccctgtcagggagcagcgtctagacctgctatactgtatgccctgctgagttctagtcttaaagccgtaccgcgaccacgctctcgatgtctttgtcgacagcatagaccagtccaactgtgcgctccccatcgaacatgtagagaagcactggacgtcttagcgaagacagtggccttcctgaggaacctacccagcttctggcagctgcctcctcaggatcagcgcaggctactgcagggctgctggggtccgttgttcctcctgggtctcgcccaggacgcagttacgttcgaagtggcagaagctccagtgccttctatactaaagaaaatactcttggaggagccatcgtcctctggagggagcgggcaactgccagataggccacagccttcactagccgcagtccagtggctccagtgttgcctcgaaagtttctggtccctcgaactctcaccaaaagagtatgcatgtcttaaagggacgattctgtttaaccctgacgtaccaggattacaggccgcttctcacatcggtcacctgcagcaagaggcccactgggtgctttgcgaagtcctggagccttggtgccccgctgctcaagggaggctcaccagggtactgctgactgcctcaactcttaagtcaataccgacatcactgctcggcgatttattcttccgcccaattattggtgacgtcgatatcgccggattgttaggggacatgctgctgctccgctag

SEQ ID NO: 233131 - DNA, 1845 bp, synthetic construct
  misc_feature 1..1845: note = Description of Artificial Sequence: Synthetic coding sequence
  source 1..1845: mol_type = other DNA
atgactacacttgattctaataataataccgggggagtcatcacttatattgggtcctccgggtcttcgcccagccggactagtcccgagagcctgtatagcgacaatagcaacggcagctttcagtccctgacccaaggatgtccaacttacttcccgccaagtcccacaggctctttaactcaggacccagccagaagtttcgggtcaatacccccttcactatctgacgatggctctccttcctccagttcatcctctagctcaagtagctcatcattttacaacggatcacctcctggctccctccaagtggccatggaggactccagccgggtgtctccttctaagtctacttccaatattacaaaactcaatggcatggtgctgctatgcaaggtgtgtggcgatgtggcttccggttttcattatggtgtccacgcctgcgaaggctgcaagggcttcttccgccgaagcatccaacaaaatatacaatacaaaaggtgtctgaagaatgagaactgtagtatagtgcgcataaacagaaatcggtgccagcagtgccgctttaagaaatgcctgtcagtaggaatgtctcgcgatgctgtgcgattcgggagaattccaaaacgcgaaaaacagcgtatgctggccgagatgcagagcgcaatgaacctggccaacaaccagctcagctcgcagtgccccttagaaacttcgcccacacagcatccaacgccgggtcctatgggtcccagcccaccacctgccccagttcccagccctcttgtaggattttctcagtttccccagcagcttacccctcccaggagccccagtccggagcccacagtggaggatgtgataagccaggtagcaagggctcatcgggagatcttcacctacgctcacgacaagctggggagctcccctggaaattttaacgcaaaccacgcttcaggctcaccacccgctacaacaccacatcggtgggaaaatcagggctgccccccagcacctaacgacaataatactttggccgcacagaggcacaatgaagcgctgaatggactccgacaagcgccaagttcatatccccctacatggccccctggccctgcccaccactcttgtcatcaaagcaatagtaacggacatcgtctttgcccaacccatgtttatgccgcacccgaaggcaaggcacccgctaacagcccaagacagggtaactcgaagaacgtattgctggcttgcccgatgaatatgtatcctcacgggaggtcaggaaggactgtgcaggaaatttgggaagatttttcgatgtcatttactcccgctgtgcgagaggttgtagagtttgcaaagcatatacccggatttagggatctgtcccagcatgatcaggtgacattacttaaggcaggcacattcgaagtgctgatggtccggtttgccagcttattcaacgtcaaagatcagaccgtgatgttcctgagtagaacgacatatagtctgcaagaacttggtgccatgggtatgggtgacttgctgtccgctatgttcgatttctcggagaagctcaacagtctcgccctgacagaagaagaactgggtcttttcactgccgtagtgctggtctctgctgacagatcaggcatggaaaacagtgcctccgtggagcagttgcaagaaactctgttgagagccttgcgcgctttggtcttgaaaaacaggcctctggagacatcccggttcactaaactgctgcttaagctgccggaccttcgcactttgaacaatatgcacagcgagaaattgctcagttttagagttgacgcccagtag

SEQ ID NO: 233132 - DNA, 1383 bp, synthetic construct
  misc_feature 1..1383: note = Description of Artificial Sequence: Synthetic coding sequence
  source 1..1383: mol_type = other DNA
atgtcctccccaacaaccagtagcttggacacccctttgccaggtaatggtcctccccagcccggagcccctagtagctctcccaccgtgaaggaggagggcccagagccttggcctggaggacctgatccagatgttcccggaaccgatgaggcgtctagtgcctgcagcacggactgggtgattccagatcctgaagaggagcctgaaagaaaacggaagaagggtccagctcctaagatgcttgggcatgagttatgtagagtttgcggggataaagcatcaggcttccattataatgttcttagctgtgagggctgtaaggggttcttcaggcggagcgtggtgagaggcggtgccaggaggtacgcgtgccgtggcggtgggacctgtcagatggatgcttttatgcgccgtaaatgtcagcaatgccggctgcgaaaatgcaaggaggcagggatgcgggagcagtgtgtgttgtcagaagaacagattcggaagaagaagattagaaaacagcagcaagagtcgcaatcacagtctcagtctccagtgggcccacaggggagtagttcgtctgcatcaggcccaggcgcttcccccggtgggtccgaggcagggtcgcagggctcaggagagggagagggcgtccagctgacagccgctcaggagctgatgattcagcagttagttgcagcacagctccagtgtaacaaacgttcctttagcgatcagccaaaggtaacaccttggcctctgggtgccgatccacaaagcagagacgcgaggcagcagcggtttgcccactttactgagcttgcgattattagcgttcaagaaattgttgactttgcgaaacaggtccctgggtttcttcagctggggagagaggaccagattgccctgttgaaggctagcactattgaaatcatgctcctggagacagccagacgttataatcatgagacagaatgtatcaccttcctaaaggatttcacctacagtaaggacgattttcatcgagccggtctccaggttgaattcatcaaccctatattcgagttttccagggcaatgagaagactagggctggacgacgccgagtacgcattgctgatcgctatcaacattttctcagcagataggcccaatgtgcaggaacccggtcgggttgaagcacttcagcagccgtatgtggaggcattgctgtcatacacaagaattaagagacctcaggatcaactgcggttccctcgcatgctaatgaaattagtgtctctgaggaccctctcttctgtgcactctgagcaggtttttgcccttaggctccaggataaaaaactgccgccactgctgtctgaaatctgggacgtacatgagtag

SEQ ID NO: 233133 - DNA, 1377 bp, synthetic construct
  misc_feature 1..1377: note = Description of Artificial Sequence: Synthetic coding sequence
  source 1..1377: mol_type = other DNA
atgagctctcctactaccagcagcctggacaccccactgccaggcaacggaccaccacagcccggagcccctagctccagtcccaccgtcaaggaagaggggccagaaccatggccaggagggccagacccagatgtgcccggaactgacgaagccagctctgcctgctctaccgactgggttatccctgatcctgaagaggaacccgaacggaaacgcaaaaaaggcccagccccaaagatgctggggcatgaactgtgccgtgtgtgtggtgataaagcatcaggatttcattacaatgtgctgtcctgtgagggttgtaagggctttttccgtaggtctgtggtgcgtggaggggctcgcaggtatgcatgtaggggtggcggtacatgtcagatggacgctttcatgaggagaaaatgtcagcaatgcaggctccgcaagtgtaaggaagccggaatgcgagaacaatgcgtgctgtccgaagaacagatacggaagaaaaagatcagaaagcagcaacaggaaagccagtcacagtctcagagcccagttggtccacagggatcatcttcttctgcctctggaccaggcgcaagtccgggaggttctgaagccggtagtcagggctcaggcgagggtgaaggcgtccagctaactgctgctcaggagctgatgatccagcagttggtggccgctcaactgcagtgcaataagcgcagcttttctgaccagccaaaagtgaccccctggcctctcggagcagatccacagagcagggacgctagacagcagcggtttgcacacttcacggagcttgccatcatttcagtccaggaaatcgtcgattttgccaaacaggttccagggttcttgcaactgggtcgggaagatcagattgctttactgaaggcaagtaccatcgagataatgctgcttgagacggctaggaggtataatcacgagaccgagtgcatcactttcctcaaggattttacttattcaaaagacgattttcaccgagcagggctccaggtcgagtttattaatcccatatttgaattcagccgcgcaatgcggaggctaggcctggacgatgccgaatacgccctgctcattgccatcaacattttcagcgcagaccgacctaatggggctgggccacgcggaggggtagcggctgcactccgcggtggtgcagcagttcttcacgcccatcaagaagctgctgatcagctgagattccctcgaatgctgatgaaattagtgtcccttcgcacccttagctccgtccactctgaacaggtgttcgctctgaggctacaggacaaaaagctgcctccactactgtcggaaatctgggatgtgcacgaatag

SEQ ID NO: 233134 - DNA, 1092 bp, synthetic construct
  misc_feature 1..1092: note = Description of Artificial Sequence: Synthetic coding sequence
  source 1..1092: mol_type = other DNA
atgagctcaccaacaacttcctcactggacaccccactaccaggaaacgggccacctcagccaggtgcgccttcaagttctccaaccgtgaaggaagaaggcccagagccgtggccaggcggtcccgatcccgatgtcccaggcaccgacgaggcaagttctgcctgcagcactgattggggggtgctttcagaagagcagatcaggaagaaaaagattagaaaacagcagcaggaatcccagtcccagagtcagtcacctgtgggccctcagggcagcagttcttcagcgtctggtccaggagcctcccctggaggcagcgaggcaggttctcagggcagtggagagggagagggggttcagctgacagccgcacaggaactgatgatccagcagttagtagcagcacagcttcagtgtaacaaacgatccttctccgaccaaccaaaggttactccatggcccttgggagccgaccctcaatcacgtgacgcacggcagcagcgttttgcacactttactgagctggccattatctccgtgcaagaaatcgtcgactttgcaaagcaggtcccaggctttcttcagttggggagagaggaccagatcgccttacttaaagcatccacaatcgaaatcatgcttctggaaactgcaaggaggtataaccacgagactgaatgcataaccttcctgaaagatttcacttatagtaaagacgatttccatcgagctgggttgcaggtcgagttcattaaccccattttcgagttctcaagagctatgcgcaggctcggattggatgacgcagagtacgcccttcttattgctattaacatttttagtgctgatcgtccaaacgtccaggagccgggtagggtggaggcattgcagcagccgtacgtcgaggcactcctgtcttatacccggattaaaaggccccaggaccaactgaggtttcctcgaatgctcatgaaactggtctccctgcgaactctgagctctgtgcactcagagcaagtgttcgcactgcggctgcaagacaagaagctgccaccacttctctccgagatctgggatgttcatgagtag

SEQ ID NO: 233135 - DNA, 576 bp, synthetic construct
  misc_feature 1..576: note = Description of Artificial Sequence: Synthetic coding sequence
  source 1..576: mol_type = other DNA
atgattcagcagctggtggccgctcagctgcaatgcaacaagcgcagtttcagcgaccagcctaaagtcaccttgggtagggaagatcagatagctctgttgaaggcttctacaatcgagataatgctcttggaaaccgcacggaggtataatcacgaaacggaatgtataacattcctgaaggactttacttattccaaggacgacttccaccgggcaggcctccaggtagaattcattaatccgatatttgagttctccagggcaatgcgtaggctgggccttgatgatgcagaatacgccctgctgattgcgatcaatatcttttccgccgaccggccaaacgtgcaggaacccggaagagtcgaggcactgcaacagccttatgtagaagcacttcttagctacacgagaatcaaacgtccccaggaccagctcaggttccctaggatgctcatgaaattggttagccttcgaaccctgtcttcagtgcactcagaacaggtgttcgcattgcgactgcaagacaaaaagctccctccccttctgtctgagatctgggatgttcacgagtag

SEQ ID NO: 233136 - DNA, 1422 bp, synthetic construct
  misc_feature 1..1422: note = Description of Artificial Sequence: Synthetic coding sequence
  source 1..1422: mol_type = other DNA
atgactgtgacacgcacccaccatttcaaggaaggctcccttagggcccctgcgattccactgcacagcgccgctgccgagctagccagtaatcaccctcgcggaccagaggcgaatcttgaggtgagaccaaaggagagctggaatcatgcagatttcgtgcactgtgaagatacggagagcgtccccggtaagccctcagtcaatgccgacgaggaggtgggcggaccacagatctgccgcgtctgcggggataaagctacaggataccactttaacgtgatgacctgcgaggggtgcaagggatttttcagacgcgctatgaaaaggaacgctcgcctgaggtgccctttccgcaagggagcttgcgagattacccggaaaaccaggcgtcagtgtcaagcttgcagattgcgaaaatgtcttgaaagcggcatgaaaaaagagatgattatgtcagatgaagccgtggaagagcggcgtgctctgattaaacggaaaaagagtgagagaactggcactcagcccctcggcgtccagggcctgaccgaggagcagcgaatgatgattcgtgagctcatggatgcccagatgaagacatttgataccacttttagtcatttcaaaaatttccggctaccaggggttctttcctcaggctgcgagctgccggagagcctgcaagctccaagtcgggaagaggcagctaagtggtcgcaggttaggaaggacttatgttctttaaaggtcagtctccagttaagaggtgaagatggaagcgtctggaactacaagccgccagccgattcgggaggaaaggaaatattcagcctgctgccccacatggccgacatgtcaacttacatgttcaaaggcataatctcctttgctaaggtgatttcatacttcagggatcttcccattgaggaccagataagcttattgaaaggcgctgccttcgagctgtgtcagctgagatttaatactgtattcaacgccgaaaccggaacctgggagtgtggaagactctcttactgcctggaggacaccgccggaggatttcaacagctactactggaacccatgctgaaattccactacatgttgaaaaagctacagcttcacgaagaagaatatgtgctgatgcaggcgatctctctcttttcacccgataggcctggggtcttgcaacacagagtggtagatcagctgcaggagcagttcgcaatcactctgaagtcttatatcgagtgtaacagaccccagcctgcacataggttcctcttcctcaagatcatggccatgctgacggagttacgctccatcaacgcgcaacatactcagcggttgctccgcatacaggatatacacccattcgccaccccactgatgcaggaactgtttggaattaccggctcttag

SEQ ID NO: 233137 - DNA, 1305 bp, synthetic construct
  misc_feature 1..1305: note = Description of Artificial Sequence: Synthetic coding sequence
  source 1..1305: mol_type = other DNA
ctggaggttaggccgaaagaatcatggaatcacgccgattttgttcactgtgaagatactgagagcgtgccaggcaaaccctccgtgaatgcagacgaggaagtcggtggccctcaaatatgccgcgtttgcggcgacaaagccactgggtatcactttaatgttatgacgtgtgagggctgcaaagggttttttcgcagggccatgaagcgcaacgcccgtctgaggtgtccatttcgaaagggcgcttgcgaaattacaaggaaaacgcgccgacaatgccaggcttgccggcttcggaaatgcctagaaagcggaatgaaaaaagagatgatcatgagcgatgaggccgtcgaggaacgccgtgccctcattaagaggaagaagtccgagcgtaccgggactcagcctctgggtgtgcaaggccttactgaagaacagcggatgatgatccgtgagctgatggacgcccagatgaagacttttgatacgactttctcccatttcaagaactttcgtctgccaggcgtattgagcagtggctgtgagctgcccgagtccttgcaggcaccctcacgggaagaggctgcaaagtggtcccaggttcgcaaagacctctgtagcttgaaggtctccctgcagcttcgcggagaagatggcagtgtctggaactacaagcctccagccgactcgggtggcaaagagatatttagcctgctaccacatatggcggacatgtctacatatatgtttaaaggaattataagtttcgcaaaggtcatctcctacttccgtgacctccccattgaggatcagatctccctcctgaagggagcagccttcgagctatgccagctgcgctttaacaccgtatttaatgctgagactggtacttgggagtgcgggaggctgtcctactgcctggaagacaccgcaggcggatttcagcagctcttactcgagcccatgcttaagttccactatatgctcaagaaactccagctccacgaagaagagtatgtcctaatgcaagccatttctctgttcagccccgatcgccctggtgttctgcaacatcgggtggtggaccagctccaagaacagtttgccattaccctgaaatcgtacatcgagtgtaatcgccctcaaccagcccatcgcttccttttcttgaagatcatggctatgcttacagaactacgctcaataaacgcgcagcacacccagaggttgcttagaatacaggacatccacccgttcgccactccactcatgcaagagctcttcgggatcactggaagctag

SEQ ID NO: 233138 - DNA, 1194 bp, synthetic construct
  misc_feature 1..1194: note = Description of Artificial Sequence: Synthetic coding sequence
  source 1..1194: mol_type = other DNA
ctggaggtgaggcccaaagagtcttggaatcatgctgactttgttcattgtgaggacaccgaatcagttccaggcaaacctagtgtgaatgctgatgaagaagtgggcggtccacagatctgccgtgtttgtggggataaagccacagggtaccactttaacgtcatgacctgtgaagggtgcaaggggttcttccggcgtgctatgaagcgcaacgccaggctccggtgtccattcagaaagggagcctgtgaaattacccggaaaacccgtagacagtgtcaagcatgccgcttgcggaagtgcttagagtctggcatgaagaaggaaatgatcatgtccgacgaagctgtggaggagcgaagggccctgataaaacggaagaaaagcgagcgcacaggcacacaacccctaggcgttcagggcctgactgaggaacagcggatgatgatccgagagctgatggacgctcaaatgaaaactttcgatactaccttcagtcactttaagaacttcagggtgtccctacagctcaggggtgaggatggatccgtgtggaattacaagccccctgccgactctggaggaaaggaaatcttcagtcttcttcctcatatggccgatatgtccacatatatgtttaagggaattatctcttttgctaaagtcattagctactttcgggatctaccaatcgaggaccaaatctccctgttaaaaggcgcagcatttgaattatgccagctgcgatttaacaccgtgttcaatgccgagaccgggacatgggaatgtggaaggctgtcttactgtctggaggatactgcgggtggttttcagcagctcctgcttgaacccatgttaaagtttcattacatgctcaagaaattgcagttacacgaggaagaatatgttcttatgcaggcaatttctctcttttcacctgataggcccggagtgctccagcatcgtgtcgtcgaccaactgcaagagcaatttgccattactctgaagagctacattgaatgcaatcggcctcagcccgctcatcggtttctgtttttgaagattatggcgatgctgacagagctgcggtcaatcaatgctcagcacacacagcgcctgctcagaatccaggacatccacccttttgccactcccctcatgcaggaattattcggaataacgggttcctag

SEQ ID NO: 233139 - DNA, 1848 bp, synthetic construct
  misc_feature 1..1848: note = Description of Artificial Sequence: Synthetic coding sequence
  source 1..1848: mol_type = other DNA
atgacatcgcccagtcctcgcatccagatcattagcacggactccgctgtggcaagtccgcagcgtattcaggggtcagagcccgcttcggggcctctgagtgttttcacctcactcaacaaggaaaagatcgtgactgatcagcagacaggccagaagattcagattgttactgccgtggacgcatccggttccccaaaacagcagtttatattgaccagcccggacggagccggaacagggaaggttatcctggcgtcacccgagactagttccgcaaaacagcttatctttacaacctcagataatcttgtgcccggaagaatccagatcgttaccgatagcgcttccgtcgagcggttactaggaaagactgatgttcagcgcccacaagtggttgagtattgcgtggtctgcggagacaaggcttctgggaggcattacggggctgtgtcttgcgagggctgtaagggtttttttaagcgctcagtgcggaaaaatcttacctactcctgtcggtctaaccaggactgcattattaacaagcatcacagaaatcgttgccagttttgccggctcaaaaaatgtctcgagatgggaatgaagatggagagcgtccagtctgagcgcaaaccatttgatgtacagcgggagaagccttctaactgcgcagcctctactgagaagatctatataagaaaggatctccgctctccgctgattgctaccccaaccttcgttgccgataaagacggtgcacgacaaactgggttgctggatcctggcatgctggtgaatatccaacaacccctgatacgcgaggacggcaccgtgttactagcgacagacagcaaggccgaaacctcccagggagccctgggcaccctggcgaatgtggtaacgtctctcgccaacttgtccgaatcactgaacaatggggacacatctgaaattcagccagaggaccagagcgctagtgagatcaccagagcgttcgacaccctcgcgaaagcattgaataccaccgactccagctcatcccctagtctggccgatggaatagacactagtgggggagggtctatccacgttataagcagggatcagagcactccaatcattgaagtggaaggacctctcctctcagacactcatgtcacctttaaactgacaatgccttccccgatgcccgagtacctaaacgtgcattatatttgtgagtcagccagcagacttctgttcctgagtatgcactgggccaggagcatccccgcattccaggctctcggtcaagactgtaataccagcctggtgcgtgcctgttggaacgagttgttcaccctggggctggcccagtgtgctcaggtcatgagcctgtcgactattcttgccgcaatcgtcaatcatctccagaacagcatccaggaagacaaattgtccggcgaccgaattaaacaggtgatggagcacatttggaagctccaagaattctgcaacagtatggcgaaattggatatcgatggctatgagtatgcataccttaaggcaattgtgttgttctctcccgaccacccgggtctaacgtccacatcccagattgagaaatttcaagaaaaagcccagatggaactgcaggattacgtccaaaaaacctattccgaggatacctatagattggctcgcatcctggtacggcttcctgccctgcgccttatgtcgtctaatatcacagaagagctgtttttcaccggtctgatcggcaatgtctctatagattccatcattccctatattctcaagatggagacagccgagtataatggccaaattacaggagcatcgctctag

SEQ ID NO: 233140 - DNA, 1791 bp, synthetic construct
  misc_feature 1..1791: note = Description of Artificial Sequence: Synthetic coding sequence
  source 1..1791: mol_type = other DNA
atgacctccccctcacccagaatccagatcattagcaccgattctgccgtggcctccccacagcggatccagattgtcaccgaccagcagacagggcagaagattcagatcgtaacagccgttgacgctagcgggagtcccaaacagcagtttatccttacctcgccagatggagccggtacaggaaaggtcatcctggcaagtcctgaaacttcgtccgccaagcagctgatctttactacgtccgataacttagtgcctggtcgcattcagatcgttactgattcagctagcgtggaacggctgctaggcaagaccgacgtgcagagaccgcaggtggtcgaatattgtgtggtgtgcggagacaaagcgagtggccgacactatggggctgtttcttgcgaggggtgtaagggcttttttaaacgcagcgtacgcaagaacctcacatacagttgcaggagcaatcaagactgcattataaacaagcaccatagaaacaggtgccagttctgcaggctcaaaaaatgtctagagatggggatgaaaatggaatcagtgcagtccgaacgcaagcccttcgacgtccagcgcgagaagccttctaactgcgctgcgtcaacggagaaaatatatatccgaaaagaccttcgctctcctttaatcgccacccccacttttgtcgcagacaaggatggggctaggcagaccggtctgctagaccccggaatgctggttaacatacaacaaccactaattagagaagatgggactgtcctgctggcaaccgactccaaggctgagacgtctcagggtgctctaggaacgctcgccaatgtagttacctctcttgccaacctgtctgagagcctcaataacggtgacacatccgaaatccagcccgaggaccagagtgctagcgaaatcacaagggccttcgataccctagccaaggccctcaataccactgacagctcttcatccccttcactagctgacggcatcgatacttccggagggggaagtatccatgtgatatcacgcgatcaatctacacctataatcgaggtggaggggccattgcttagcgacacacacgtgactttcaaactgacaatgccatccccaatgcctgaatacctgaatgtacactacatatgtgagtctgcctcaaggcttctgttcctttcaatgcactgggccaggtccattccggcttttcaggccctgggacaggattgcaacactagtcttgtgcgcgcttgttggaacgagctgttcaccctcggccttgcccaatgcgcacaggtgatgtccctcagcacaatccttgccgcaattgtgaatcatttgcagaattctatccaggaagacaagctctccggcgacagaatcaaacaggttatggaacatatatggaagctccaggaattttgtaattcgatggcaaagctggatatcgacggctatgaatacgcctatctgaaggcaatcgtgctgtttagcccggatcaccccggtctaacatcaactagtcagatcgagaagttccaggagaaagcacagatggagctgcaggattacgtgcaaaaaacctatagtgaggatacctaccggttagccagaatactggttcggctcccggcacttaggctcatgagttcaaatatcactgaggaactgttttttacagggctcattggtaacgtgtctatcgattctataatcccgtacatactgaaaatggagaccgccgagtacaatggccaaatcaccggcgctagcctgtag

SEQ ID NO: 233141 - DNA, 1791 bp, synthetic construct
  misc_feature 1..1791: note = Description of Artificial Sequence: Synthetic coding sequence
  source 1..1791: mol_type = other DNA
atgactagtcccagcccacgcattcagatcatttccacagattccgcagtggccagcccccagcggattcagattgtcacagatcagcagactggtcagaagatacaaatcgtgacagctgtggacgcctccggcagccccaaacagcagtttattcttacatcccccgacggcgctggaacggggaaggtgattttggcatctccggagacctcatccgccaaacaacttatctttactacctccgataacttagtgcccggacggattcagatcgtcactgactctgcgagcgtggagaggctgctcgggaaaacagacgttcagaggccacaagtggtagagtattgcgtggtgtgcggagacaaagcttccggacgtcactacggtgcagtgagttgtgagggttgcaaaggcttctttaagcggagcgtcaggaagaacctgacttacagttgcaggagtaaccaggattgcattatcaacaagcaccaccgaaaccggtgccagttttgtagactgaagaaatgtctggaaatgggcatgaaaatggagtcagtgcagtccgaacggaaacctttcgacgtgcagagagaaaagccgtctaactgcgctgcaagtacagagaagatctatatcagaaaagacctccggtccccacttattgccacgcctacatttgttgccgataaggacggcgctcggcaaactggtttactggatccaggcatgcttgtcaatattcaacagccccttattagggaagacggaaccgtcctgcttgccacagattccaaagcggaaacaagccagggcgctctgggcaccctggccaatgtcgtgacttctctagcgaacctctctgaatcactgaacaatggcgatacaagtgaaattcagcctgaggaccagagtgcaagtgaaatcacaagagcttttgacaccttagctaaagccctcaacacgaccgattcttcaagtagcccctccctggccgacgggattgatacatctgggggtgggtcaatccatgtgataagcagggaccagtcaacgcccataattgaagtagaggggcctctgctaagcgacacacacgtgactttcaagttaacgatgccctccccaatgcccgagtatcttaatgtgcactatatctgcgagtctgctagtcggttactgtttctttctatgcactgggcacgaagcatcccagcatttcaagccctcggacaggattgtaatactagcctcgtgcgggcttgttggaatgagctgttcaccctgggacttgcgcagtgcgctcaggtcatgtcgctaagtacaatcttagccgctatcgtcaatcatctgcaaaactcaattcaggaagacaaattgtcaggcgaccgtattaagcaggtgatggagcacatttggaaactgcaggagttctgcaactctatggcaaaactcgacatcgacggttacgagtacgcatacctgaaggcaatcgtcctttttagtccggaccatcccggtttaacttctactagtcagattgagaagttccaggaaaaggcccagatggagctgcaggactatgtacaaaaaacttacagcgaggatacctacaggctggcgagaattcttgtgcggcttccagcccttaggctaatgagctctaatattaccgaggagcttttctttactggattgataggcaatgtgagtatagactccatcatcccatacattctgaagatggagacagctgagtacaatggtcaaatcacaggcgcatctctgtag

SEQ ID NO: 233142 - DNA, 1791 bp, synthetic construct
  misc_feature 1..1791: note = Description of Artificial Sequence: Synthetic coding sequence
  source 1..1791: mol_type = other DNA
atgaccagcccttctccccgaattcagataatctcaactgattcagccgtcgcgtctccccagaggattcagatagtgactgaccaacagacaggacagaaaattcaaattgtgaccgcagttgacgcatctggaagtccaaaacagcaattcatcttaacaagccctgatggggctggcacaggcaaagtcattctcgccagtcctgaaactagttcagctaagcaacttatctttaccacctccgataacctcgttccgggaaggatacagatcgtcaccgatagcgcctctgtagaacggctgctcggcaagaccgacgtacagagaccgcaagtggttgaatactgtgttgtgtgcggagataaggcgtctggccgtcactatggtgctgtcagttgcgaggggtgtaagggtttctttaagagaagcgtgaggaaaaacctgacatacagctgccgctcgaatcaggactgcattattaataagcaccacaggaacagatgccagttctgcaggctgaagaaatgcctggaaatgggcatgaaaatggagtccgtgcagagcgagaggaagccgtttgacgtgcaaagagagaaacccagcaattgcgctgcctctaccgaaaagatttacatccgcaaggacctccgatccccgctgatcgctacaccaacatttgtggctgataaggacggcgctcgccagaccggcctgcttgacccaggcatgctggtgaatattcaacaacccctgataagggaggacggcacggtgctgcttgcaacggattccaaggccgaaacatctcagggcgcactgggaacactcgctaacgtggtgacgagtctcgcgaacctgtctgagagcctgaacaatggcgacaccagcgaaatccagccagaagaccagagtgcttcagaaatcaccagggcctttgacacactggctaaagccctgaatacgaccgactcaagttccagtccctccctagcagatgggatagatacatctgggggaggatcaatccacgttatctctcgagaccagtcaacaccaattatagaagtcgagggtccactactcagtgacactcacgttactttcaagctcactatgccctcccctatgcctgagtacttaaacgtgcactacatttgcgagagtgcttcaagactcctgttcctgagcatgcactgggctcggagcattcccgcattccaggcactgggccaagactgcaacacctccctcgtacgcgcttgctggaatgaactctttacgttaggattggcccagtgcgctcaggtgatgagtctgagcacaattttggcggctattgtgaatcacctccaaaattctatccaggaggataaattatccggggaccgaattaagcaggtgatggaacacatctggaaattgcaggaattctgtaatagcatggctaagctggatatagacgggtatgagtatgcgtacctgaaggccatcgtactgttttcccctgaccacccgggtctgacatcaacttcccaaatcgaaaaatttcaagagaaggctcagatggaattgcaggactatgttcaaaagacatacagcgaggacacctaccgactcgctcgcatcctggtgcgcttacctgccttgagactgatgagctccaacattacagaggaactgttcttcacaggactgattggaaacgttagcattgattcaatcatcccctacatcctgaaaatggaaacagccgagtataatggacagattaccggggcatcattgtag

SEQ ID NO: 233143 - DNA, 111 bp, synthetic construct
  misc_feature 1..111: note = Description of Artificial Sequence: Synthetic coding sequence
  source 1..111: mol_type = other DNA
atgactagcccttcacccagaatccaaattatttcgaccgacagtgctgtggcatcaccacaaagaatccagggatcagagcccgcatccggacctctcagcgttttttag

SEQ ID NO: 233144 - DNA, 618 bp, synthetic construct
  misc_feature 1..618: note = Description of Artificial Sequence: Synthetic coding sequence
  source 1..618: mol_type = other DNA
atgacctctcctagccccagaatccagatcatctctaccgattccgcggtggctagtccgcagcgcattcaggggagtgagccagcctcaggccctctgagtgtttttacatccctaaacaaggaaaagatcgtaacagatcagcagacaggacagaaaatacagatcgtaactgccgtcgatgcctcaggctcccccaagcagcaattcatccttaccagccccgatggagccggtactggaaaagtaatcctggccagtcccgagacttcttctgctaaacagctgatcttcacaacatccgacaatttagttcctggacgcatccagatcgtcaccgactctgcttctgtcgagcggcttctaggcaaaaccgacgtgcaaaggccccaagttgtcgaatactgcgtcgtgtgtggggataaagccagtggaagacactacggcgcagtatcatgtgagggctgtaaggggtttttcaaacgcagcgttaggaagaatctcacctatagctgcaggagcaaccaggattgcattatcaacaaacatcatcggaaccgctgccagttttgtaggctaaagaagtgtctggagatgggaatgaagatggaatgctag

SEQ ID NO: 233145 - DNA, 1269 bp, synthetic construct
  misc_feature 1..1269: note = Description of Artificial Sequence: Synthetic coding sequence
  source 1..1269: mol_type = other DNA
atgtttcgagctggggctgagggagccgagaaagaaccttccccacggccagaatgccgggctgaccccggaccaggtctgggctttcctctggggtcagggctcccatggccatcccttttagaatcgccagggggtcggatactcgacattccttgcaaagtatgcggcgacagatccagcgggaagcattatggagtctacgcctgtgacggctgtagcgggttctttaagaggtccatcagacgcaacagaacgtacgtatgtaagagtggtaatcagggtggatgtcccgtggacaaaacccatcggaaccaatgccgggcttgccgtcttaaaaaatgtcttgaggttaacatgaataaggacgctgtccaacatgaacgcggtccacgcacttccaccatccgcaaacaggtggccttgtactttcgaggacataaggaggagaatggtgctgctgcgcactttccatctgctgccttgcccgcaccagccttctttaccgcagtgactcaacttgaaccccatggactggagttggccgctgtgagtacaaccccagaaaggcagactctggtgtctctggcgcaacccacccccaagtacccgcatgaggtcaatggcacccccatgtatctgtacgaagtggcaaccgagtctgtttgcgagtctgcagctagattgctctttatgtctattaaatgggcaaaatcggtgcctgctttctctaccctgagcctgcaggatcaacttatgctgcttgaggatgcctggcgggagttgttcgtgctaggcattgcccagtgggcaatcccagttgatgctaatactttgctagccgtcagcggaatgaacggcgacaatacagactcacagaagcttaataagataattagcgagatccaggccttgcaagaggtcgtcgccaggttcaggcaactgcgattagacgccacagagtttgcctgcctgaaatgcatcgtgacatttaaggccgtccccactcactcaggcagcgagttaaggagcttcaggaacgccgcagccatcgcagccttacaggacgaggcgcagctgactctcaactcctacattcacacccgttatcccacccagccgtgtcgctttggcaagctgcttttattactgcccgctttgagatctatcagcccaagtacaatcgaagaggtgttctttaaaaaaactatcgggaatgtcccaatcacacgtctgctcagcgacatgtacaaatcgtccgatatctag

SEQ ID NO: 233146 - DNA, 1158 bp, synthetic construct
  misc_feature 1..1158: note = Description of Artificial Sequence: Synthetic coding sequence
  source 1..1158: mol_type = other DNA
atgagtaaaccggctggaagcactagccggatcctggacattccctgcaaggtctgcggcgacagatcaagcggcaagcactatggcgtgtacgcttgcgacggctgttccgggttttttaaaaggagtatccggaggaatcgaacgtatgtgtgcaagtctggcaaccaaggtggctgcccggtggataaaacccacaggaatcagtgtcgagcgtgccgcctaaaaaagtgcttggaagtaaacatgaacaaggatgcagtacagcatgaaaggggtccccgaaccagcacaatccgcaagcaggtggctctgtatttccgaggtcataaggaagaaaatggggctgcggcacatttcccatccgctgctctgcccgcaccggctttctttactgccgttacacagctcgaaccgcacggactggaactggctgccgtgtccacaacccctgagagacaaacactggtaagcctcgcacagcccaccccaaagtatccacatgaagtgaacggtactcctatgtatttatatgaagtggccaccgagagcgtgtgtgagagcgccgcaagattattatttatgtcaatcaagtgggccaaaagcgttcctgcatttagcacacttagtctgcaagatcagctgatgttactggaagacgcctggagagagctattcgttctcggaatcgctcagtgggcgatacccgtagatgctaacacgctgctggccgtaagcggtatgaacggggacaacacagactcacagaaactgaacaagattatttccgagatccaggccttacaggaggtggttgccaggttcagacaactccggctggacgcaactgaatttgcctgcttgaagtgcatcgtgacattcaaggccgttcctacccactcaggatctgagttgcggagcttcagaaatgccgcagctattgccgcactgcaagacgaggcgcagctcaccctcaatagctacatccacacacggtaccctacccagccatgccggttcggtaagctcttactgctgctgccagccctgaggagcattagcccctccaccatcgaggaggtctttttcaaaaagacaatcgggaacgtgcctatcactaggctcctgtctgacatgtacaaaagctctgatatttag

SEQ ID NO: 233147 - DNA, 141 bp, synthetic construct
  misc_feature 1..141: note = Description of Artificial Sequence: Synthetic coding sequence
  source 1..141: mol_type = other DNA
atgaataaggacgccgtgcagcacgagcgaggcccaagaacatccactataagaaaacaagtcgctttatacttcaggggtcataaggaagagaacggcgctgctgcacactttcccagtgccgcattgcccgctccctag

SEQ ID NO: 233148 - DNA, 1272 bp, synthetic construct
  misc_feature 1..1272: note = Description of Artificial Sequence: Synthetic coding sequence
  source 1..1272: mol_type = other DNA
atggctatggtggtgagctcttggcgtgacccacaggacgatgtagctggcggaaacccaggtgggcctaatccagcagctcaagcagctaggggcggagggggaggtgccggagaacaacagcagcaggcagggtccggtgctcctcatacgccacaaacccccggacagccaggggctccagccacccccggtactgccggagataaaggacaggggcctcccggtagtgggcagtcacagcaacatatcgaatgtgttgtgtgtggcgacaaaagcagcgggaagcactacggccagttcacatgtgaagggtgtaagtcattcttcaagaggagcgttcggagaaacctgacttacacttgtcgggctaaccgaaactgccccatcgaccagcaccatcggaatcaatgccagtactgcagactcaaaaagtgcctgaaggtgggtatgcgccgagaggctgttcaaagaggcagaatgcctcctacgcaacccaaccccggacagtacgccctgaccaacggcgatccactgaacgggcattgttatcttagcggctacatttctttactgctgcgcgcagagccctatcccacttcacgttatgggtcacagtgcatgcagcccaacaatattatgggaatcgaaaacatttgtgaactggcagcccgtctgctgttttctgcagtcgagtgggcacgcaacataccctttttccccgaccttcaaatcacagatcaggtctccctgcttcgtctcacgtggtctgaactttttgtcttaaacgccgcacagtgcagtatgccattacatgtcgccccactgcttgctgcggcaggcctgcacgcctccccaatgtccgctgatcgtgtggtggcttttatggatcacatcaggatctttcaggaacaggttgaaaaactcaaggctctgcacgtggatagtgccgaatattcctgccttaaggccattgtgctcttcacctccgacgcgtgcggtttaagcgatgctgcccacatagaaagcctgcaggagaaaagccagtgcgcccttgaggaatacgtgaggtcccagtatccaaaccagccaagcaggtttggcaaactcttgctgcgcctgccttcactccgcacagtcagcagctcagtgattgaacagctgttctttgtgcggctggtgggcaagactccgatcgagactcttattagagatatgctgttgtccggctctagttttaactggccttatatgtccattcagtgctcatag

SEQ ID NO: 233149 - DNA, 1245 bp, synthetic construct
  misc_feature 1..1245: note = Description of Artificial Sequence: Synthetic coding sequence
  source 1..1245: mol_type = other DNA
atggcgatggttgtatccacctggcgcgatcctcaggacgaggtgcccggatctcagggaagccaagcaagccaggcccctcccgtacccggtccaccaccaggcgcacctcatacccctcagaccccagggcagggcggaccagcttctacccccgctcagactgctgcgggtggacagggaggccctggtggcccaggttcggataagcagcaacaacaacagcatatcgaatgcgtagtttgtggcgacaaatcttctgggaagcattacggtcaattcacatgtgagggctgcaaatctttcttcaagagatccgtccgtagaaacctctcctatacgtgcagggccaatagaaactgtcctatagaccaacatcatcggaaccagtgccaatattgtcggctcaagaaatgtcttaaagttggaatgaggcgcgaagccgtccagagagggagaatgcctccgactcagcccacccacgggcagtttgccctcaccaatggtgaccccctcaattgtcacagttacctgtccggctacataagcttgcttttgagggccgagccataccccacaagcagattcggttcacagtgtatgcagccaaataatattatggggatcgagaatatatgtgagctggccgcacggatgctcttcagcgctgttgagtgggccaggaacataccatttttccctgatttgcagattacagaccaggtggcactgctcaggcttacatggtctgaattgtttgtgctcaatgctgcccagtgtagcatgccattgcacgtggctcccctgctcgctgctgcaggcctgcatgcatccccaatgtccgccgaccgcgtcgtggccttcatggatcatatccgtattttccaagagcaggtggaaaagttgaaggccctgcacgtggattccgcagaatacagttgtctcaaggccatcgttttattcacgtcggacgcctgcggcttaagcgacgtggcacacgtcgagtctctgcaggaaaagtcacagtgtgctttggaagagtacgtgcgcagtcaatacccaaatcagcctactcggtttggaaaactgctcttgagactaccttcactgaggacagtgagctcaagtgtaatcgagcagctcttcttcgtacgcctggtgggaaaaacccctatcgagactctgatcagagacatgctcctgagcggaagctccttcaattggccatacatggcaatccagtag

SEQ ID NO: 233150 - DNA, 786 bp, synthetic construct
  misc_feature 1..786: note = Description of Artificial Sequence: Synthetic coding sequence
  source 1..786: mol_type = other DNA
atgcctcccacccaacctacccacggccagtttgccctgacaaatggcgacccactgaactgccactcgtacctgtctggctatataagtctcttgcttagggccgagccttaccctacatccagattcgggtcccaatgtatgcagcccaacaatattatgggaattgaaaatatttgcgagctggcggcaagaatgctttttagtgctgtggagtgggctagaaatataccattcttccccgacttgcagattacagatcaggttgcacttctgcgcctgacctggagcgagctttttgtgcttaatgcagcacagtgctctatgcccctgcatgttgcccctctgttggccgcagcgggactccacgcttcacctatgagtgcggaccgcgtagtggcttttatggaccatatccgcatcttccaggaacaagtcgaaaagctgaaggccttgcatgtagattccgctgagtactcatgtcttaaggctatagttttgtttacctccgacgcttgcggattgtctgacgtagcccatgtcgaaagcttgcaggagaagtcccagtgcgctcttgaggagtatgtgcgatcacagtatccgaaccagcccaccagattcggaaaactgctactacgcctcccatctctacggactgtttcctcatccgtgattgagcaattgttttttgtccgattggtgggcaaaacccccatagaaacacttatccgcgacatgctgttatcaggttccagtttcaactggccctacatggctatacagtag

SEQ ID NO: 233151 - DNA, 846 bp, synthetic construct
  misc_feature 1..846: note = Description of Artificial Sequence: Synthetic coding sequence
  source 1..846: mol_type = other DNA
atgcaggccgtgtgggatctggagcagggaaagtacggatttgcagtccagaggggtaggatgccaccgactcaaccaactcatggtcagttcgctctgactaatggcgatccactaaattgccatagttacctgtccgggtatatctctctcctgctgcgagccgaaccttatcccacctctcgtttcggctcacagtgtatgcagcccaacaacatcatgggtatcgaaaacatttgcgaactggcagccaggatgctgtttagcgctgttgagtgggccaggaatatccccttttttcctgatctccagatcacagatcaagtggcgttgttacgattgacttggagtgaactgtttgtgttaaatgccgcacagtgttcgatgccgctccacgtcgccccactgctcgctgcagccggtctgcacgcttcccccatgagcgccgatcgcgtcgtcgcatttatggaccacattagaatatttcaggaacaagtagagaagttaaaggcgttgcacgtcgactcagcagaatactcatgtctgaaggcaattgtcttatttacctcagacgcctgcggtctgagtgacgtggcccacgtggaaagcctccaggagaagagtcagtgcgctctggaggagtatgtaaggagtcaatacccaaatcagccaacaagattcggcaagctgttgctgagattgccctcacttcggacagttagtagttcagtcatcgaacagttgttcttcgttaggcttgtgggcaaaacgcctatagagactttaatccgcgatatgctgttgagcggttcctcttttaattggccctatatggccatacagtag

SEQ ID NO: 233152 - DNA, 786 bp, synthetic construct
  misc_feature 1..786: note = Description of Artificial Sequence: Synthetic coding sequence
  source 1..786: mol_type = other DNA
atgcctccgacgcaaccaacacatgggcaattcgctctgactaatggagatcctttgaactgccactcttacctgtccggatatatcagcctcctgctcagggcagagccttatcctacttccaggtttggttcacaatgcatgcaacctaacaacataatggggatagagaacatttgcgaactggcggctcggatgctcttcagcgctgtggaatgggccaggaacatcccattcttccccgaccttcagattactgatcaagtcgccctcttgcgtttgacctggagcgagctgttcgtcttgaacgcggctcagtgctctatgcctttgcatgtggcacccctgctggccgcagccggtctgcacgctagccctatgagcgcagatcgtgtggtcgccttcatggatcacatccggatcttccaggaacaggtggagaaactgaaggcattacacgttgactctgcagaatacagctgcctcaaggccattgttctgtttacttcggacgcctgtgggctgagcgatgtggcccatgtggaaagtttgcaggagaagtctcaatgtgctctggaggagtatgtgcggagccaatacccaaaccaacccacccgtttcggcaagctcctcctccgactgcccagtctgcgcacagtgtcaagtagcgtgatagagcagttatttttcgtgaggttggtgggtaaaacacccatcgagacgctgataagggacatgctcctgtctggtagctcttttaactggccatatatggctattcagtag

SEQ ID NO: 233153 - DNA, 1215 bp, synthetic construct
  misc_feature 1..1215: note = Description of Artificial Sequence: Synthetic coding sequence
  source 1..1215: mol_type = other DNA
atggccatggtgacgggtggttggggcggaccgggtggcgacaccaacggagtcgacaaagccggagggtaccccagagccgcagaggacgactctgccagccccccaggtgccgcaagcgacgccgagccaggcgatgaagaacggcctggcctccaagttgattgcgttgtatgcggagataaaagcagcggaaaacactacggagtcttcacttgtgaaggctgtaagtcattcttcaagcgatcaattagacgtaatctgtcgtacacgtgccgctccaatagggattgccagatcgatcagcaccaccgaaatcagtgccagtattgccgactcaaaaaatgcttcagggtcgggatgagaaaggaggctgtacaacggggaaggatccctcattcactgccaggagccgttgcggcaagttcgggtagccccccaggatccgcgttagcagctgtggcgagcggaggcgatctgttccctgggcaaccagtgtctgaacttattgcccagttgctgagagcagagccttacccagccgctgctggcagattcggtgcaggtgggggagccgctggcgctgtgctggggatagacaatgtttgcgagcttgcggctcgcttactgtttagcaccgtcgaatgggctagacacgccccattcttcccagagctgcctgtggccgatcaggtcgcgttactgaggctgagttggtcggagttgttcgttctaaacgccgctcaagcagctctccctctgcacaccgcacccctgttggccgctgccggtctgcacgctgctcctatggctgcagaacgcgctgtggccttcatggaccaggtgcgagctttccaagagcaggtggataaactgggtaggttacaagttgattctgcagagtacggctgcctgaaggctatcgccttatttacccccgacgcctgtggcctgagtgaccccgctcacgtggagagtcttcaggaaaaggcacaggtggccctgaccgaatatgtcagagcccaatacccatcacagccacagaggttcggcaggttgcttctgagactccctgcactgagggctgtgccagcatcattgatttctcagttattctttatgagattggtgggtaagacgccaatagagaccttgatccgtgacatgctgttatctggatctacatttaactggccatacgggagcgggcagtag

SEQ ID NO: 233154 - DNA, 1134 bp, synthetic construct
  misc_feature 1..1134: note = Description of Artificial Sequence: Synthetic coding sequence
  source 1..1134: mol_type = other DNA
atggctatggttaccggagggtgggggggaccgggtggggacgccgagcctggagatgaggagcgacctgggctccaggtcgattgtgtggtctgtggcgataagtcatctggtaagcactatggcgtgttcacgtgtgaaggctgcaaaagcttctttaagcgatctataagacgcaatctaagttacacctgccggtcaaacagagactgccaaatcgaccagcaccaccggaaccaatgtcagtactgtcgtctgaagaaatgtttcagagtgggcatgagaaaggaagcagttcaaagaggaaggatccctcactctctgcccggtgccgttgcggctagtagcggaagccctcctggttccgccctggccgcagtggcctccggaggtgacctttttcccggtcagcctgtaagcgaactcattgcgcagctgctgcgagccgagccatatccagcggcagccggaaggtttggagctggcggtggagcagccggtgctgtgctcggtatagacaacgtttgtgagctagctgcacgtctgctgttctctaccgtcgaatgggcaaggcatgccccttttttccccgagctacctgtcgccgaccaggtggctttgttgaggctgtcttggtccgagttatttgtgttaaacgcagcccaggccgctttacccctgcatacggccccactgcttgcggcagcaggtctgcacgcagcgccaatggctgctgagagagcagtcgctttcatggatcaggtgcgagcattccaggaacaggtggacaaattgggtcggttgcaggtcgattcagctgagtacggctgtctcaaggcaatcgctttgttcacacctgacgcatgcggcctctccgaccctgcacacgtagagtccttacaggaaaaggcccaagtggcgctcaccgagtacgtacgcgcacagtatccatcccagccacaacggttcggtcgcctactgttgagattacccgcacttagagctgtgcccgcttctctcattagccagctgttctttatgcgacttgtcgggaaaactccgattgaaaccctcattcgagacatgttactaagcggatcaaccttcaactggccctatgggtccgggcagtag

SEQ ID NO: 233155 - DNA, 2121 bp, synthetic construct
  misc_feature 1..2121: note = Description of Artificial Sequence: Synthetic coding sequence
  source 1..2121: mol_type = other DNA
atggagacaaagggttaccactcactgccggagggcttagacatggagcgcaggtggggacaggtatcacaagccgtggaacggtccagcctggggccaaccgaacgcactgatgaaaacaattacatggagatagttaacgtgtcctgcgtcagcggagctattccgaataattcaacccagggctccagcaaggagaagcaagaactccttccctgccttcaacaggataataacaggccgggtattttaacatcagacattaagacagaactggaatcaaaggaactgtcggccactgttgctgaaagcatgggcctgtatatggacagcgtgcgggatgccgattactcctacgagcagcagaatcagcagggcagcatgtccccggctaagatctatcagaacgtcgaacagttagtgaagttctacaaagggaatgggcatcgcccttccacacttagctgtgttaatacgcctcttaggtccttcatgtctgattccggctccagcgtgaatgggggagtcatgcgcgcagtggtaaaaagtccgatcatgtgtcacgagaaatctccatctgtgtgcagcccgctgaatatgactagtagcgtgtgcagccccgctggcatcaattcggtcagctcgaccacagctagcttcggcagttttcccgttcacagtcccattacccagggcaccccacttacatgtagccctaatgtggagaaccggggatcaaggtcacacagcccggctcacgcttcaaacgtcggaagtcctctctcctcccccctctcctctatgaaaagctctataagttcgccgccatcccactgctctgtcaagtcccccgtgtcctcgccaaacaatgtcaccctgaggtcctctgtgagtagccccgcaaatatcaacaatagcagatgcagcgtgtcttccccatcaaacaccaacaacaggagcaccctgtcttcgcctgcagctagtaccgtggggagtatatgttccccagtgaacaatgccttttcttataccgcctctggaacctccgccggtagctctactctgcgcgacgtagtgccaagcccagacacacaagagaaaggagcccaggaagtgccctttcctaagaccgaggaggtggagtcagccatttcgaacggggtaaccggacagttgaatattgtgcagtacattaagccagaaccagatggagcattttcttcctcttgcttgggcggaaattccaagatcaattccgatagcagcttcagcgtgccgattaaacaggagtcgaccaaacatagctgttcgggcactagtttcaaaggaaatcccacagttaatccttttccattcatggacgggtcttatttttcatttatggatgacaaggactattactctctctccggcatcctgggcccaccggtcccgggattcgacggaaattgcgagggttccggttttcccgtgggcattaagcaggaacctgatgacggatcttactatcctgaagcgtccatcccatccagcgctatagtaggggtaaactccggaggccaaagctttcactataggatcggggcacagggcacgatttcactgtcacggtctgcacgggaccagtcctttcagcaccttagcagcttcccccctgtgaatactcttgtagagtcctggaaatctcacggcgacctctcatctcgcagaagcgatggctaccccgtgcttgaatacattcctgagaatgtctcctcatcaaccctacgatctgtaagcaccggctcctctagacctagcaaaatttgccttgtctgtggcgatgaagcctccggatgtcattatggtgtggtgacctgtggatcatgtaaggtgtttttcaagcgtgccgtggaggggcaacataactacttgtgtgccggtcgaaatgactgcattatcgataaaattcgacggaaaaactgcccagcttgtagactccaaaagtgcctgcaggcaggcatgaatttgggggaacgcagatgtatttccctgccctgtatgaactatgctagaggctgcacaaaatcagcatttagctcattcgactgctcttccccgctcaagaataccccatcgtag

SEQ ID NO: 233156 - DNA, 2955 bp, synthetic construct
  misc_feature 1..2955: note = Description of Artificial Sequence: Synthetic coding sequence
  source 1..2955: mol_type = other DNA
atggagacaaagggttaccattctttgcccgaaggtctggatatggagcggcgatggggtcaggtttctcaggcagtggaaaggtcttctctggggccaacagaaagaacagacgaaaacaattacatggaaattgttaacgtgtcctgtgtctccggcgctattccgaacaactcgacccaaggaagctcaaaagagaaacaggagctgctgccctgtctgcagcaagataacaatcgtcccggaatcttgacaagcgacatcaaaaccgagcttgaaagcaaagaactgtctgctaccgtggctgagtctatggggctgtatatggatagcgtgagggatgcggattactcctacgagcagcagaaccagcagggaagcatgagccccgcaaagatataccaaaatgttgagcaactggttaagttctataagggcaacggacaccgccctagtaccttgagctgcgtcaatacccctcttcgctcattcatgtccgacagcggcagttcagttaacgggggagttatgcgcgctgttgttaaatctccaattatgtgtcacgagaaatctccatctgtctgcagtcctttgaatatgacgagctctgtgtgcagccccgctggcataaattcggtgtccagtaccactgcgagtttcggttcttttccggttcattctcccatcacacaaggcacccccctgacatgtagccctaacgtcgagaaccggggatcacgttcgcatagccccgctcacgccagtaatgtaggaagccccctcagttccccactgtcatccatgaagtctagcattagcagtccgcctagtcactgttctgtcaagagtcctgtctcatcacctaataacgtgacactgcgctcctcagtttcctccccagctaacattaacaatagcagatgcagcgtttcctctccctccaataccaacaaccgaagtacactttcttcaccggcagcttctacggtcggaagcatttgtagtccggtgaacaatgctttttcttatactgcctccggcacttccgcgggttcgtctactcttcgcgacgtagtgcctagtcccgatacccaagaaaaaggcgctcaggaagtgccttttcctaaaactgaggaagtggaatcagctatctccaacggcgtgacaggccagctaaacatcgtacaatacatcaagcctgagccggacggcgctttttccagctcctgtctggggggaaactccaaaattaatagcgactctagtttcagcgtgccaatcaaacaggagagtaccaagcacagctgtagcggaacctcctttaagggcaatcctacagtgaacccatttccattcatggatggctcttatttctcctttatggacgacaaggattactacagccttagcggaatactcggccctcccgtccccggtttcgacggcaactgtgagggctcaggtttcccagtaggaatcaaacaggagcccgatgatggaagctactaccctgaggcaagtattccatcatccgccattgtcggagttaactcgggaggacagtcttttcattaccggataggagctcagggaacaatttctctgagtcgaagtgcgagagaccagagcttccagcacctgtccagttttcccccagtgaacactctggtggaatcatggaagtctcatggggaccttagttcaagacgctccgacgggtaccctgtgctcgagtacattcccgagaacgtttcctctagtaccctcagatctgtgtctacggggtcctcccggccatccaagatctgtttggtgtgtggtgacgaggcaagcggctgccactatggcgtcgtcacatgcggcagttgcaaggtgtttttcaaacgtgccgttgagggtcagcataattacctgtgcgccggacgcaacgattgtattattgataagatccgacgtaaaaattgtcctgcttgtagactccagaaatgcttgcaggccggtatgaacctgggtgcacggaagtcaaaaaaactggggaagctaaaagggattcatgaagagcagcctcagcagcaacagccccctccaccaccaccccctccccaatcccccgaggaaggaactacttatatagccccagccaaggaacccagcgtgaataccgcactggttccccaacttagtacaatttcacgagcgctcaccccctcacctgtgatggtccttgagaacattgagccggagatcgtgtacgccggttacgactcaagcaagcccgacacagcggagaatttactctctactcttaatcggcttgccggaaaacagatgatccaggtcgttaaatgggctaaagtgttgccaggattcaagaatttgccacttgaggatcagattactttaattcagtattcctggatgtgtcttagcagcttcgccctgagctggcgcagctataagcacacaaattcacagtttctgtatttcgccccagatttagtattcaatgaagaaaaaatgcaccagagcgccatgtacgagctgtgccagggaatgcaccagattagcctgcaattcgtgaggttacagctcactttcgaagaatatactatcatgaaggtgctgctgctcctaagcaccatccccaaggatggtctcaaatcgcaagctgctttcgaggaaatgcgcacaaactatatcaaggagcttaggaagatggtgacaaagtgccctaataattcgggccagagttggcagcggttctatcagctgaccaagctgctagactccatgcatgacctcgtcagcgatcttctagaattctgtttctacacttttagagagagccacgctcttaaggttgagtttcccgcaatgctcgttgagatcatctcagatcagctacctaaagtggaatcagggaatgccaagcccctgtacttccaccgcaagtag

SEQ ID NO: 233157 - DNA, 2967 bp, synthetic construct
  misc_feature 1..2967: note = Description of Artificial Sequence: Synthetic coding sequence
  source 1..2967: mol_type = other DNA
atggagacgaaaggttaccatagcctgcctgagggcttggatatggaaagacgctgggggcaggtttcacaggcggtagaacgatcgagtctcggccctactgagcgaactgacgaaaataactatatggagattgtcaacgtctcttgcgtaagcggcgctattcccaacaattccacacagggctcaagtaaagagaaacaggagctcctgccttgtttgcaacaggacaataatcggccagggattctgaccagcgacataaaaaccgagctcgagtctaaggagctatccgcgactgtggccgaaagtatgggactgtatatggattccgtgagggacgctgactactcctacgagcagcagaaccagcagggaagtatgtctcctgccaaaatttaccagaacgttgagcagctggttaaattttataagggcaatggacacaggccgtcaacactaagctgcgtcaacactcctttgcgctcttttatgtctgattcaggcagttccgtgaacggaggcgtgatgcgagcagtagtcaagtccccaatcatgtgccacgagaaatctcctagtgtgtgctctccattgaatatgacctcctcagtatgttctccagccggtattaacagcgtcagttctaccactgcaagcttcggttccttccctgtgcattcccccattacacagggaactccccttacgtgctcgccaaatgtcgagaaccgcggatcgcgaagccattcccctgcgcacgcgtctaatgtgggcagcccacttagctctcccctcagctcaatgaagtcttccatttctagtcctccatcccactgtagcgtgaagagtcctgtctccagcccaaacaatgtaacactcaggtctagcgtctcaagtcccgcaaatatcaacaacagccgctgttccgtatcctccccgtccaacaccaacaatcgctccacactttctagccctgctgcctctacagtcgggagcatatgttctcccgtcaataacgcattttcatacactgcctctggcacctccgctggctccagcaccctccgcgatgtggtgcccagtcccgatacacaggagaagggcgctcaggaggttccttttccaaagacggaggaagtcgaatctgccattagcaatggggttactggccagcttaatattgtgcagtatatcaagccggaaccagatggggctttcagctcttcctgcctcggcggtaattccaagattaacagcgactcatcatttagtgtaccgatcaagcaggagagcactaagcacagctgctccggcacaagcttcaaaggtaacccaaccgtgaatccattcccatttatggacgggagctatttcagcttcatggatgataaagactattactctctgtccggcattctgggaccccctgtgcctggcttcgacggtaactgcgaggggtcaggttttcctgtcggaatcaagcaggagccagatgacggctcatattatcccgaggcatcaatcccttcatctgccatcgtcggagtgaattcggggggacagtcgtttcattataggatcggcgcacagggaaccatatcactctcgcggagtgctcgggatcagtcctttcagcacctcagttcattccctcccgttaacactctcgtggaatcctggaagtcccatggagatctctcttctcgtagaagcgacggttacccagtccttgagtacatccccgaaaacgtttccagcagtactctgcggtctgtgtcaaccggaagctcgcgacctagtaagatctgcctggtctgtggcgatgaagcgtccggctgccactacggcgtcgtgacgtgtgggagctgcaaagtcttcttcaagagagcagtggaagggaaatgcagctggcagcacaattatctttgcgccggtcggaacgattgtataatcgataaaattagaaggaaaaactgtccagcttgtagattacaaaaatgtcttcaagctggaatgaatctgggggctcgcaagtctaagaagctgggcaagctaaaaggcatacacgaggagcagccacagcagcagcaacctcccccacccccaccacctcctcaatcacccgaggagggaacgacttacatcgcgcctgctaaggagccttcagtcaacacggccctggtcccacagcttagtaccatttcgcgcgctttgaccccatccccggtaatggtcctggagaacattgaacccgaaatcgtgtacgccggttacgattcttcaaagcccgatacagccgaaaacctattgtccacactcaaccggttagctggcaagcaaatgattcaggtggtaaagtgggccaaggtcctaccaggattcaagaacctgcctctggaggatcagataacactgattcagtacagctggatgtgcctctcatcatttgccctgtcctggcgatcatataagcatactaatagccaattcctgtattttgccccagacctcgtgtttaatgaggagaagatgcatcagtccgccatgtatgagctgtgccagggcatgcaccagatctctctgcagtttgtgaggctccagctcacgtttgaggagtacactattatgaaggttctgttactgctgtctactattccgaaagatggactcaagtcgcaggccgcatttgaggaaatgaggaccaactacattaaagaactgaggaagatggtgactaagtgccccaataactccggccagtcatggcagcgcttttaccaattaactaagttattagattcaatgcacgacctggtgtccgacctgctcgaattctgcttctataccttcagggagtcccacgcactgaaggtagaatttcctgccatgctcgtggagatcatctccgatcagctaccgaaggtggagagcggcaatgcaaaacccttgtatttccatcgcaaatag

SEQ ID NO: 233158 - DNA, 2955 bp, synthetic construct
  misc_feature 1..2955: note = Description of Artificial Sequence: Synthetic coding sequence
  source 1..2955: mol_type = other DNA
atggagaccaaagggtaccacagcttgcctgaaggactcgacatggagcggagatggggccaggtatctcaagcggtggaacggtcttctctaggtcctactgaacgcaccgatgaaaataactatatggaaatcgttaatgtttcatgtgtgagcggggcaatcccgaataactctacgcagggttctagcaaggaaaagcaggaactgctcccatgtctgcaacaggataacaatagacctgggatcctcacatctgacattaagactgagctcgagtccaaggaactcagtgctacggtggccgagagtatgggtctttacatggacagcgtgagggacgccgattacagctacgagcagcagaatcagcagggctctatgtctcccgcaaaaatctaccagaatgtcgagcagttagtgaaattctacaaaggaaatggccaccgacccagcaccctgagctgcgtcaacacccctctccgttcattcatgtccgatagtggatcctcggtcaacggaggcgtcatgagagccgttgtgaagtcccctatcatgtgccacgaaaagtctccatctgtgtgctcacctctgaacatgaccagtagcgtgtgctctccggcaggaatcaattctgtaagctcaaccacggcttcctttgggtcttttcctgtacactccccaataacacaggggacacctctcacgtgctccccgaacgtggagaatagaggttctcggtctcactccccggcacacgcttccaatgtgggtagcccactgagttcaccattgtcatctatgaagtcctcaatttcttctcccccttcgcactgttccgtgaaatcgcctgtgtcctcaccgaataatgtcactctgaggtccagtgtctcttcacccgctaacatcaacaattcccggtgctctgtgagttccccttccaacactaacaatcgatcaactctctcctcgccagccgcttcaaccgtgggatcaatctgttcccccgttaataacgctttctcctacactgcctctggcaccagcgccggatcttccactctgagggacgtagtcccatccccagatacccaggagaagggcgctcaagaggtgccattccccaaaacagaggaagtggaatcagcaatctcaaacggagtaaccggacagttgaacatcgtgcagtatatcaagcctgagccagacggagccttttctagctcttgtctgggaggtaattccaaaatcaattcagattccagcttcagtgttccgataaagcaggaaagtacaaaacactcctgtagcgggacctccttcaagggcaaccccaccgtaaacccattcccattcatggatgggtcttatttttcttttatggacgacaaggactattattcactgtccgggattttgggcccaccagtacccggatttgatggcaactgcgagggttcaggcttccctgtcgggataaagcaggagcccgacgatgggtcctattatcctgaagcctctatcccttcttctgctattgttggcgtcaactcagggggacaatcgtttcactaccggataggggcacagggtactatctctctgtcccggtccgctcgtgaccagtcctttcagcatctgagctctttccccccagtgaacaccttggtggaatcttggaaaagtcacggcgacctgagctccaggcgaagcgatggttatcccgtgcttgaatacattcctgaaaacgtgagctccagcaccctacgttcagttagtacggggtcctccaggccatccaagatttgtctggtgtgtggcgatgaggcatccggctgccactatggggtcgtcacctgtggatcatgtaaagtattcttcaagcgagccgttgagggtcagcacaattacctgtgcgctggacgcaacgattgtatcattgacaagatcaggagaaaaaactgccccgcatgcaggctgcaaaagtgtttgcaggctggcatgaacttgggggcaaggaagtcgaagaagttgggaaagctcaaaggcatccacgaggaacagccgcagcagcagcagcccccaccccctccccctccgcctcagtcccctgaggagggcaccacgtacatcgccccagccaaggagccttcagttaataccgccctggtgcctcagctcagtactatcagcagagccttgaccccaagtccggtcatggtgctggagaatatcgagccagaaatcgtgtacgcgggttacgactcctctaagcctgacaccgccgaaaatcttctgagcaccttgaacaggttggccggaaaacagatgatccaggtagtcaagtgggccaaggttttgccaggtttcaaaaacttgccattggaagatcaaatcactctaattcaatattcctggatgtgcctttcttctttcgctctgtcatggcggtcctacaaacataccaatagtcaatttctctactttgcaccggacctcgtttttaacgaggaaaagatgcatcagagtgcaatgtatgagttatgccagggaatgcaccagattagtttacagtttgttaggctgcagctcacctttgaagaatacaccatcatgaaagtgctcctgttactctccaccatcccaaaggatggtctgaagtctcaggcagcgttcgaggaaatgaggacaaattacataaaagaactcagaaaaatggtgaccaagtgccctaataactccggccaaagctggcagcgtttctatcagctcacaaagctgttggattccatgcatgacttggtgtccgatctgttagaattttgcttctataccttccgagagagccatgcccttaaagtcgagttccccgctatgctggttgaaatcatatcagatcagttgcctaaagtggaatctggaaatgcaaagcccctgtatttccatcgaaagtag

SEQ ID NO: 233159 - DNA, 2967 bp, synthetic construct
  misc_feature 1..2967: note = Description of Artificial Sequence: Synthetic coding sequence
  source 1..2967: mol_type = other DNA
atggaaactaagggttatcattctctgcctgaggggctggacatggagcgacgctggggtcaggtttctcaggccgtggaacgctcctccctcggcccaaccgagcgcacagatgaaaacaactatatggaaatcgtgaacgtgagttgcgtttctggcgctatcccaaataactctacacagggatcttccaaagaaaagcaagagcttcttccctgcctgcaacaggataacaaccgaccgggtattctaacctcagacattaaaacggagctcgagtccaaggagttgtccgctaccgtagccgagagcatgggcttgtatatggatagcgtgagagacgcagattactcttatgaacagcagaatcagcagggctccatgtctcccgcaaagatctaccagaatgttgagcagctggtgaagttttacaagggcaacggccacaggccatccacgttgagctgcgtgaacactcccctgaggagctttatgtcagacagcggatctagcgttaacggtggggtgatgcgggcagtcgtgaaaagcccgattatgtgtcacgagaagagtccctccgtttgctcacctttgaacatgacctctagtgtgtgtagcccggctggaataaacagcgtgagctcaaccacagcgtctttcggctcgtttcccgtgcacagcccgattactcaggggaccccacttacatgttcaccgaacgttgaaaacaggggctccaggtctcactctccggcacacgcgtctaatgtcggatcccccctgtcaagcccactgagtagcatgaaatcctcaataagctccccaccttcacactgcagcgttaagtcgccagtgtcaagtcccaataacgtaacactccggtcatctgtctcatcccctgccaacatcaacaattctcgatgtagcgtgtcctcccccagcaatacgaacaacagatcaaccctgagcagccccgctgcaagtacggtcggcagtatatgctccccagtcaacaacgcattctcctacacagcatcagggacatctgctggcagtagtacactgcgagacgtggtgcctagcccggatactcaagaaaagggcgctcaggaggtgccttttcccaaaacagaggaagttgagtcggcgatatcaaatggcgtgactggccaattgaacatagtgcagtacatcaagcccgagccggacggggcattcagtagcagctgccttggcggaaactcaaagataaatagcgattcgtctttttctgtccccataaaacaagagagcacaaaacattcctgcagcgggacatctttcaaagggaaccctactgtgaatccttttccgtttatggatggttcctacttctcattcatggacgataaggactattacagtctgagtggtatcctggggcctccagtgcctggctttgatgggaactgcgaaggcagcggtttccctgttgggattaaacaagagcctgacgatggatcatattaccccgaagccagtattccctcctccgccatcgtgggtgtgaacagcggtggtcagtcttttcattatagaattggtgcacagggcaccatctcactgtcaagaagtgctcgtgaccagagcttccagcacctctcttctttccctccagttaataccttggtagagtcttggaaatcgcacggggacctcagttccagaaggtccgatgggtatccagtcctagagtacatcccagaaaacgtctctagctccaccctacggagcgtatctacaggcagctctcggccaagtaaaatttgcctcgtgtgcggcgatgaggcctcaggttgtcactatggagtcgttacctgcggttcatgtaaggtcttttttaagagagccgtggagggaaaatgctcctggcaacacaattatttgtgcgcgggtcgcaacgattgcatcatagataagatcagaagaaagaactgtcccgcttgtcgcctccagaagtgtctacaggccggaatgaaccttggggctcgaaaatctaaaaagttgggcaagctcaagggcattcacgaagagcagccacagcaacagcagccaccgcctccaccaccccctccccagtctccagaagaaggcaccacatacattgccccagccaaggagccttctgtgaataccgccctggtgccacaacttagcactattagcagagcgttgactcctagcccagttatggtgctagagaatattgagcctgagattgtgtatgccggttacgattcctcgaagcccgataccgcggaaaacctgctttcaaccctaaacaggctggcaggcaagcagatgatacaggttgtgaaatgggccaaagttttgccaggcttcaagaatttgcccttggaagaccaaatcacgcttatccagtactcctggatgtgcttgtctagctttgccctgtcttggaggtcatacaaacacaccaattctcagttcttatatttcgctcctgacctggtgtttaatgaggaaaagatgcatcagtccgcaatgtacgagctgtgccagggtatgcaccagatcagtctgcagttcgtaaggctgcagctcacatttgaagaatataccataatgaaggttttgctgctgctttcaacaattccaaaagacgggctgaaatcacaggccgctttcgaggaaatgagaacaaactacataaaagagctgagaaagatggtcactaagtgtcctaataactccgggcagtcctggcaaagattctatcagcttactaagctgctggactcaatgcatgatctcgtgagtgatctgctggagttttgcttttacacattcagagaatcacatgccctgaaggttgagtttcccgctatgctggtcgagataattagcgatcagctgcctaaagtcgagagtgggaacgctaagcccctgtatttccaccgcaaatag

SEQ ID NO: 233160 - DNA, 2604 bp, synthetic construct
  misc_feature 1..2604: note = Description of Artificial Sequence: Synthetic coding sequence
  source 1..2604: mol_type = other DNA
atggagaccaaaggatatcattctttacccgaaggcctggacatggagcggcgatggggccaagttagccaggcggtggaaagaagcagcctgggacccactgagaggaccgatgaaaataactacatggaaattgtgaacgtttcctgcgtgagcggtgcaattcccaataattcgactcaggggagtagcaaagagaagcaggaacttttaccatgtctgcagcaggataataatcggccaggaatcctgacatccgacattaaaacggagctggagtctaaagagttatccgccaccgtcgccgagtctatgggcctgtacatggactcagtaagggatgccgattatagctacgaacagcaaaatcaacagggttccatgtcacctgccaagatttatcaaaatgtagaacagttagtcaaattctacaagggaaacggtcatagaccaagtaccttatcttgtgtcaacacaccactgcgatcttttatgagtgacagcggtagttcagtgaatggaggcgtgatgagagcagtggttaagtcgccaatcatgtgccatgagaaatcgccgtcggtctgttccccattgaatatgacttcctcagtgtgctctcctgccggaatcaactccgtgagttccaccaccgcgtccttcgggagctttcccgtgcacagtcccatcacccagggaactccgcttacttgttcccccaacgttgaaaaccgcggatctcggagtcacagccccgctcacgcttcaaacgtggggtcccccctttctagccccctgtccagtatgaagtcttccatttctagtcccccaagtcattgttcagttaaatcacccgttagttcacctaacaatgttaccctgagaagttcagtgtcgagtcctgcgaacataaataacagccgatgctctgtgtctagcccctccaacactaacaacagaagcaccctgtccagcccagccgcttcaacagtgggctcaatctgcagtcctgtcaataacgcttttagctatactgcatccgggaccagtgccggttcaagcaccttgagagacgtggttccatctcctgacacccaggaaaagggggcacaagaggtaccattccccaaaacagaggaagtggaatctgccatttctaatggcgttaccggccagttaaatattgtgcagtacatcaagcctgagccagatggcgcattcagttctagctgtcttggaggcaatagtaagatcaacagcgattcctcgttctccgttcctattaaacaggagtccactaaacacagctgcagcggcacatccttcaaggggaaccctaccgttaaccccttcccgtttatggacggaagttatttttcattcatggatgataaggattactactcactgagtggcatcctgggacctccggtgcctgggtttgatggcaactgcgagggaagcggcttcccggtgggaattaaacaggagcccgatgacggcagctactaccccgaggccagcattccttcatctgccatcgtgggagtgaacagtggcggacaatctttccactaccgcattggcgctcaggggaccatttccctgtctaggtccgctcgagaccagtcttttcagcacctttcgagtttcccgcctgtaaacaccctcgttgagtcttggaagtcccatggcgacctgtctagccgcaggagcgatggctatccggtgctggagtacatccccgaaaatgtatcttctagtacactacggtccgtgtctaccggttcctcaagaccaagcaagatttgcctagtgtgtggcgacgaagctagtgggtgccactatggtgtggtgacgtgtgggtcttgtaaggtttttttcaagcgcgcagtggaaggccagcacaattacttgtgcgcagggagaaacgattgtatcattgataaaatacgcaggaaaaactgtcctgcttgccggctccaaaaatgtttgcaagcgggaatgaatctgggcggattcaagaatctcccattggaggaccaaattacactgattcagtattcatggatgtgcctgtcaagctttgccctgtcttggcgaagttacaagcataccaattcacagtttctctatttcgcgcctgacctggttttcaatgaggagaagatgcatcaatccgctatgtacgaactttgccagggaatgcatcagattagtctccagtttgtccgtttgcagctcacattcgaggaatataccattatgaaggtcctgctgttactgagtacgatcccaaaggacgggcttaagagccaggctgcattcgaagagatgagaacaaattacatcaaggaactcaggaaaatggtaaccaaatgcccaaataactctggccagtcttggcaacggttttatcagctgaccaaactgctggactctatgcatgatctcgtgtccgacctcctcgagttttgcttttacaccttccgcgaaagccacgcattgaaggtggaattccctgccatgctcgtggagatcatcagcgatcagctcccaaaagtggagtcaggcaatgctaaacccctgtacttccacaggaagtag

SEQ ID NO: 233161 - DNA, 1920 bp, synthetic construct
  misc_feature 1..1920: note = Description of Artificial Sequence: Synthetic coding sequence
  source 1..1920: mol_type = other DNA
atggaaacgaagggctatcacagtctgcctgaaggcctggacatggagcgcaggtggggacaagtatcccaggccgtcgagcgttcctctttaggcccaacagagcgtaccgatgaaaataactacatggagattgtaaacgtgagctgtgttagcggtgccataccgaataactctacacaaggatcctccaaggaaaagcaagagctgctgccttgcttacagcaagacaacaacagacccggtatactcacatcagacataaagacagagctcgagagtaaagagctgtctgcaacagtcgccgaaagtatgggcctttacatggattcggtgagggatgctgactactcctatgaacagcaaaatcaacaaggttccatgtccccggctaaaatttaccaaaatgtcgagcagcttgtcaaattctataagggcaatggacatcgtccctctactcttagctgcgttaatactccactgagatcctttatgagcgatagtgggtcatcagtcaatggcggtgtgatgcgggcagtcgtgaagtcaccaattatgtgtcacgaaaaatccccgagcgtgtgtagccccctgaatatgacctcatctgtgtgtagccctgccggaatcaattcagtgtccagtaccactgcgtctttcggcagttttccagttcacagcccgattacccagggcacgcctctgacctgctctcccaacgtggaaaataggggttctagatctcactcccccgctcatgcatccaacgtggggagccccctgagttcaccactctcatcaatgaagagctccataagcagcccaccttctcactgtagcgtcaaatcacctgtcagtagccccaacaacgtcactctgaggagctccgtctcgtctcccgcaaatatcaacaactcgcggtgctctgtgagctccccatccaatacaaataaccgcagtaccctctcatcaccggctgcatccaccgtgggttctatttgctcacccgttaataacgctttctcttacactgcttcagggacctccgcaggctcttccaccttaagagacgtcgtgccttctccggatacgcaagaaaagggcgctcaggaggtccctttcccaaagaccgaagaagttgagagtgcaattagtaatggtgtgacaggccaacttaatattgttcagtacatcaaacctgagccggacggtgctttcagtagctcatgccttgggggaaactcaaaaataaactccgactccagctttagcgtcccaattaaacaagagtctaccaagcacagttgtagcgggacctccttcaaggggaatcccacggtgaacccattccccttcatggacggctcctactttagctttatggatgataaggactactactctctctccggcatcctagggccaccggtcccgggtttcgacggcaattgtgaggggagtgggttccccgttggaatcaaacaggaaccagacgacggctcctattaccccgaagcgtccatcccttctagtgccattgtgggtgttaacagtggtggacaatcttttcactaccgtatcggcgcacagggcaccatcagtttgtcccggagcgccagggaccagtcatttcagcacctcagtagcttccccccagtcaacacactagtcgaaagctggaaatcccacggggatttgtcatctagaagatccgacgggtaccctgtactggagtatatccccgaaaacgtctcaagctccactctgaggtcggttagcactgggtcctcaagaccatccaaaaaaaacatctataggttcctgctgtgcaataaccgcacccgaggagtgggccagcagctgcctctgtctccccgatccagtaccgtgttctgtattactggaattcacactcgttag

SEQ ID NO: 233162 - DNA, 1797 bp, synthetic construct
  misc_feature 1..1797: note = Description of Artificial Sequence: Synthetic coding sequence
  source 1..1797: mol_type = other DNA
atgccatgcattcaagcgcagtacgggacccctgcaccctcacctggacctcgcgaccatttggcctctgacccattgactccggagtttataaaacctaccatggacctggcatcccccgaagccgctccagccgcacccactgcacttccctcattctcaacattcatggatggttacacgggggagtttgatactttcctgtatcaactaccaggaacagtccagccctgctctagcgcctcctcttctgcttctagcacgtcaagcagtagtgccacatccccggcaagcgccagcttcaaattcgaggattttcaggtttatggatgttatccaggacccctctctggtcccgtagacgaagctctctcttccagcggatctgattactacggatctccgtgttccgctcccagcccctcaacccccagcttccagccccctcagctgagtccctgggatggaagctttggccacttctctcccagtcagacctacgagggcttgcgcgcttggacagaacagctaccaaaagccagcggtccaccacagccccctgcatttttctctttttctccacccactgggccatccccatccctggcacagtcccccctaaaactcttccccagtcaggcgacccatcagcttggtgagggcgaatcatactcaatgcctacggcatttccagggctcgctccaacatcccctcatctcgaaggctccgggatactggatacacccgtcacaagtacaaaggctagaagtggggctccgggtggctcagagggccgttgcgccgtctgtggagataatgcctcttgccagcattacggcgtgaggacgtgtgaggggtgtaagggattctttaaacggactgttcagaagaatgccaaatatatttgtctggccaacaaggattgcccagtcgataagcgcaggcgcaaccgctgccagttttgccgatttcagaagtgtctggccgtaggaatggttaaggaggttgtccggaccgacagcctgaagggcagaagggggagattgcccagcaagcccaaacagccgccagacgcttctcctgccaatttgcttactagcctggtaagggcacatctggacagcgggccatctacagcaaaactcgactatagcaagttccaggaactagtgttgcctcatttcgggaaagaggatgctggagatgtgcagcagttttacgacctgctcagtgggtcgcttgaagtgattagaaaatgggctgagaaaatcccaggatttgccgaactttcccccgcagaccaggacctattgttggaaagcgcgttcctggagctgttcatcctgaggctcgcttaccgctccaagccaggggagggcaaactgattttctgctcgggcttagtactgcacagactgcagtgcgctcgcggatttggtgattggattgacagcatcctagcatttagtaggtccctgcacagcttgcttgtcgacgtccctgcctttgcctgtttgagtgcactcgtactcatcaccgatcgacatgggctccaggaacctcgcagagttgaggaactccagaatcggattgcttcctgccttaaggaacacgtggccgcagttgctggggagccccagcctgcttcttgcttatcccggctgttaggaaagttacccgaattgcgcacactgtgcacacagggcctgcagagaatcttttacttgaagctggaggatcttgttcctcccccaccaatcatcgataaaatttttatggacacactgcccttctag

SEQ ID NO: 233163 - DNA, 1836 bp, synthetic construct
  misc_feature 1..1836: note = Description of Artificial Sequence: Synthetic coding sequence
  source 1..1836: mol_type = other DNA
atgtggctggccaaggcttgttggtctatccagtccgagatgccctgtatccaggcccagtatggtaccccggcaccttcgcctggtcccagggaccacctcgccagcgatccccttacacctgaattcatcaagcctacgatggatctggctagccccgaggcagcccctgccgctcccactgctttgccctctttctccaccttcatggacgggtacacaggcgaattcgatacctttctctatcagctgcctggaacagttcagccctgttcatccgcttcgagtagcgcctctagcacatctagctctagcgccacatctccagcctcagcgtctttcaagtttgaggacttccaggtctacggatgttatcctggaccgctttcaggtcccgtggacgaggccctctccagtagcggttcagattattatggttcaccctgtagtgctccctccccaagcactccgtcgtttcagccaccacagttaagcccatgggacgggagtttcggccatttctcgccttcgcagacctatgaagggctgagagcctggactgaacagttgcctaaagcgtcggggcctccccaaccccctgccttcttttctttctctccccctactggcccaagtcccagcctggcacagtctcctctaaagttgttcccctcccaagcaacccatcagctcggtgagggggagagctatagtatgcccactgcatttcccggtttggctcccaccagcccgcatctggaggggagcgggattttggacactcctgtgacaagcaccaaagcgcgttctggcgctcccggaggaagcgagggtaggtgtgctgtctgcggtgataatgcatcatgccaacattacggggtgcgcacctgcgagggatgcaagggtttttttaagcgcactgttcagaaaaatgctaagtatatttgtctcgctaacaaggactgccccgtcgataaacgcaggcggaataggtgccagttctgcaggttccaaaaatgcctggccgtgggaatggtgaaagaagtagtgcgtaccgattctcttaaggggagaagggggagactaccatccaagcccaaacaaccgcctgacgcctctcccgctaacttgctgacctctctcgtcagggcacatctcgacagtggccctagtactgccaaactggattatagtaagtttcaggagctggtgctcccacactttggcaaagaagatgcaggggatgtgcaacagttttacgatctgttatccggatctctggaggtgatccgtaagtgggccgaaaagatcccagggttcgccgagctttcccccgcagaccaggatctgctgcttgagagcgcttttctagagcttttcatactacgtctggcttatcgatccaagcccggagagggtaaactcatattctgcagcggcctggtgcttcaccgattacagtgcgctcgaggctttggtgactggatcgactctatacttgcattctcccgctcactgcatagtttgcttgtggacgtcccagctttcgcctgtctctcagcgctggtcctgataacggaccgccatggattgcaggaacctcgccgagttgaagaattgcagaaccgaatcgcaagctgcctcaaggagcacgtggccgctgttgcgggagagcctcagcccgcttcctgcctatcccggctgctaggcaagctgcctgagctgcgtactttgtgcactcagggcctgcagcgtattttctacctgaagctggaggacttggtgcccccaccgccaattatcgataagatctttatggatacacttccattctag

SEQ ID NO: 233164 - DNA, 1797 bp, synthetic construct
  misc_feature 1..1797: note = Description of Artificial Sequence: Synthetic coding sequence
  source 1..1797: mol_type = other DNA
atgccttgcattcaggcccaatacggtacgccagcaccctcaccagggcctagagaccatttggcatccgaccctctgacaccagagtttattaagccaacaatggatcttgccagcccggaagcagctcctgcagctcctacggctctgccatcgttttccactttcatggatggctacacaggagagtttgacacctttctataccagttacctgggacagttcaaccttgttcatcagctagctcttccgcctcttcaacgtctagcagtagtgcgacctcgccagcttccgccagttttaaatttgaggactttcaagtgtacggctgctatcctgggcctctctccggtccagtcgatgaagctctctcttcttctgggtccgactactacggatctccatgctcagccccttcaccctcaactccaagttttcaaccacctcagctgtccccctgggatgggtcctttggtcatttctctcctagccaaacatatgagggcctgagggcgtggacagagcagctgcccaaggcttcaggaccacctcagccgcctgccttcttcagctttagcccgccaaccggaccctccccctctctcgcccagtctccgctgaagttgttcccctctcaggcaactcaccagctaggggagggcgagagctatagcatgcccaccgccttcccgggtctggctccgacatccccacacctggagggttcaggaattctggacactccggttacttccacgaaagctcgcagtggagctcccggagggtctgagggtcgctgtgcagtgtgtggagacaatgcaagctgccagcattacggggtccgaacctgtgaaggctgcaagggatttttcaaacgcacagtccagaagaacgccaaatacatttgcctcgccaacaaagattgcccagttgataagcgcagacgcaaccgatgccaattctgtcgctttcagaagtgtctggccgttggcatggtgaaggaagttgtgaggacggactccctcaagggtaggcgcggtaggcttccttccaaacctaagcagcctccagacgcatcacccgcaaatttacttaccagccttgttcgcgctcacttagatagtggtccatctactgctaagttagactattcgaaatttcaagaacttgttcttccacatttcggaaaggaggacgctggtgatgtccagcagttctatgatctcctgtccggctccctcgaagtcattcgcaaatgggcagagaagatcccaggcttcgccgaattgtcacccgcagaccaggatctgctcctggaatccgcctttctcgagttgttcattctaagactcgcctaccgttccaagcctggagagggaaaactgatcttttgcagtgggctagttctgcatcgcctgcagtgcgccagagggttcggcgattggattgactcgatactggcatttagtaggagcctgcactccctgttagtcgacgttcccgcttttgcgtgcctgtcagctcttgttcttatcactgaccgtcatggactgcaagaacccagaagggtcgaagaattgcagaacaggatcgcctcatgcttgaaagaacacgtggccgcagtggccggtgaaccccagccggcatcatgtcttagccgactgctcggaaagttgcccgagctgcggaccctttgtacccaggggttgcagcgaattttctatctcaaactcgaggatctcgtgcccccaccgcctattatcgataaaattttcatggatacgctgcctttttag

SEQ ID NO: 233165 - DNA, 1797 bp, synthetic construct
  misc_feature 1..1797: note = Description of Artificial Sequence: Synthetic coding sequence
  source 1..1797: mol_type = other DNA
atgccctgcatccaggcccagtatggcactccggctccaagcccagggccacgggatcacctggcctcggacccgttgacgcccgaattcatcaagccaaccatggaccttgcttcacctgaagctgctcctgccgcacccaccgcccttcccagcttctccaccttcatggacgggtacaccggtgaattcgatacgttcctataccaacttccaggaacagtgcagccatgctcttccgcatctagtagcgcatcttccacaagctcatcaagcgcgaccagccccgcttcagcgtcttttaaatttgaggattttcaagtgtatggttgttacccaggaccactctcaggcccagtggacgaagcattgagctcaagcggatctgactattacggtagcccgtgttccgcgcctagcccgagcacaccttccttccagccccctcagctcagtccctgggatggaagctttgggcacttcagtccaagccagacatatgagggtttaagagcttggactgagcaacttcccaaggcctcaggccctccgcaaccccctgcctttttttccttcagccctccgacggggccttccccatcactcgcgcaatcaccgctcaagctgttccccagccaggctacccatcaactgggcgagggtgagtcgtattccatgccaactgcatttcccggactcgcccctacctctccacacctggaaggttccggaattcttgacactcccgttacttccaccaaggcccgtagtggcgctcccggagggagcgaagggaggtgtgctgtctgcggggataatgcgagctgtcagcactatggagtgcgtacctgtgaaggctgtaagggcttttttaaaagaaccgtacagaaaaatgcaaagtacatctgtctcgcgaacaaggattgtccagttgataagagaagacgcaatcggtgccaattttgcagattccagaaatgcctggccgtcggcatggttaaagaggtggtgcgtacagacagcctgaagggtagacggggacgactcccttccaagccaaaacagccgccagatgcctctcctgccaacttactaactagtctggtgagggcccatctggatagcggcccatccactgcgaagctggattattccaagttccaggagctagtgctcccccatttcggaaaggaggacgcaggtgatgtgcagcagttttacgacctcctgtctgggtcactggaggtgatccgtaagtgggctgaaaaaatccccggatttgctgaactgtcacccgcagaccaggacctcttgctggaatccgcctttctggaactgttcatccttcggcttgcgtatcgctccaaacccggtgaagggaaactcattttctgtagcgggctggtgcttcatcggctgcaatgtgccaggggcttcggggactggattgacagcatactcgcgtttagccgtagcctccatagtctcctcgttgatgttcccgcattcgcctgtttaagcgcactcgttctgatcactgaccgacacgggctccaagaacccaggagagtggaagagcttcagaatcgtatagcaagttgtctgaaggaacatgtagcagctgtagccggtgagcctcaaccagcatcatgcctttcacgcctccttggcaagcttccagaactgcggaccctgtgcacccagggtctgcagaggattttttatctgaagttggaagacctggttcccccacccccaataattgacaaaatcttcatggatactctgcccttctag

SEQ ID NO: 233166 - DNA, 1959 bp, synthetic construct
  misc_feature 1..1959: note = Description of Artificial Sequence: Synthetic coding sequence
  source 1..1959: mol_type = other DNA
atgactagtgcacagtataaaatcaagattttaatcgagggtctgcaccacggccagaggcctggtccagccccacccaggcagccgggatcattttgttgggcactcaaggccgacgggatcatgtggctggcaaaagcttgctggtctatccaaagcgagatgccatgcattcaggcacagtatggcaccccagccccttctcctgggcctagggatcacctcgcctccgaccccctgaccccagagttcataaagccaaccatggacttggcctcccctgaagctgcccctgctgcacctacagcattaccatccttcagtaccttcatggacggctatacaggcgaattcgacacctttttgtaccaactacctggcacagtgcagccatgcagttccgccagcagcagtgcttcatccacgagttcatctagcgcaacctctccagcctcagcttctttcaagtttgaggacttccaggtctacgggtgctacccaggacctctgtctggccctgtggatgaggccctgagttcttccggaagcgactattacggtagtccatgctctgcacctagtccttctaccccaagcttccagcccccacaactgagcccttgggatgggtccttcgggcacttttcgccatcccaaacttacgaaggcctgagagcctggactgagcagctgcctaaagctagtggtcctccccagccccctgccttcttctcattttctcccccaactgggcctagccccagcctggcacagagcccactgaagctgttcccttctcaggcaacccatcagctgggcgaaggcgaaagctattcgatgcctacagcttttcccggactggctcctacctctcctcacttagaaggctcaggtatattagacactccagttacctcaaccaaagccaggtccggcgcacccggaggaagtgaaggaagatgtgccgtgtgtggcgataatgcctcatgtcagcactacggagttcggacttgtgagggctgtaaaggattctttaaacggacagtccagaagaatgctaagtacatttgcctggctaacaaggactgccctgtagacaagaggcgacgcaatcgctgccagttctgcaggttccaaaagtgcttggccgtcggaatggtgaaagaggtagtcagaaccgactcgctgaaagggagacggggacggttgccatcaaagccgaaacagcctcccgacgccagccctgcaaatttacttacaagcttagtgagggcacatctggatagcggcccaagcacagcaaagctggactactccaagttccaggaactggtcctaccacacttcggtaaggaagacgccggagacgtccagcaattctatgacctgcttagcggatcgttggaagtaataaggaagtgggccgagaagatacctgggttcgctgaattgagccctgctgaccaggacctcctcctcgaatctgccttccttgaactgtttatcctgcgtttagcctatcggtctaagcccggagaagggaagctgatcttttgctcaggccttgtacttcaccgactccaatgcgcccgaggtttcggagattggatcgatagtatcctggcattcagtagaagtttgcactccctgctcgtggatgttcccgcattcgcttgcttgagcgccctggtgctcattaccgacagacacggccttcaggagccgagaagggtggaggagctgcagaacagaatagccagttgcctcaaagaacatgtcgcggcagttgcaggtgaaccccagccagcctcctgtctttctagattgttaggtaagcttccggagctacgtacgctgtgtacacaagggctgcagcggattttctacctgaagctggaggatcttgtgccgcctcccccaataatcgataaaatatttatggataccttacctttctag

SEQ ID NO: 233167 - DNA, 978 bp, synthetic construct
  misc_feature 1..978: note = Description of Artificial Sequence: Synthetic coding sequence
  source 1..978: mol_type = other DNA
atgccttgcattcaagcccagtatggcacccccgcaccttctccaggtccccgtgaccatctggccagcgatcccctgaccccagaatttatcaagcctactatggaccttgccagtcccgaggctgccccagcggctcctacagcgctcccttctttttctactttcatggacggttacaccggggagttcgacacattcctttatcaacttcctggaacagtacagccttgctcttcagcatccagctccgcaagctcaaccagtagttccagcgccacctcacctgcttctgcttctttcaagtttgaggacttccaggtgtatggatgctacccaggtccactttctggaccggtcgacgaagccctaagcagcagcgggtccgattactacggaagcccctgttctgctcccagccccagcaccccttcatttcaacctccacagctctcaccgtgggacggaagttttgggcacttctcccccagccagacatatgagggcctaagagcttggactgaacagctgcctaaagctagcggcccaccccagccaccagccttcttcagttttagcccgcctacaggcccatcaccatccctcgcacagagtcctcttaaattgtttccttcgcaggcgacgcatcaactcggcgagggcgagtcctacagcatgccaactgcattcccgggactcgcacccacgtctccacacctggaggggagcgggatcttggatacccccgtgacgtcaaccaaagctcggagcggtgcccctggagggagcgaaggcagatgtgcggtgtgtggcgataacgcgagctgtcagcattacggcgtacgcacttgtgaggggtgtaaaggattctttaaggttcctcgatctccacgctggggccttctgctcgaaatggagaggggctggccccaccctattggcacctgtgggctccctctgggaagccctcctagctag

SEQ ID NO: 233168 - DNA, 1836 bp, synthetic construct
  misc_feature 1..1836: note = Description of Artificial Sequence: Synthetic coding sequence
  source 1..1836: mol_type = other DNA
atgtggttggcaaaagcatgctggagcatccaatcggaaatgccctgcattcaagcccaatacgggacaccagccccatcacctggacccagggaccatctggcttccgaccccctgacgcccgagttcataaaaccgacaatggatcttgccagccctgaggctgcacctgccgcacccacggccctcccatccttttctactttcatggatggatacacgggagagttcgacaccttcttataccagctccccggtaccgtccaaccatgcagtagtgcatccagcagcgcctcttccactagtagcagcagcgccacctcccccgcttctgcgtcattcaaattcgaagatttccaggtgtatggctgttacccgggtcctttatcgggaccagtggatgaggctctgtcatcttccggctccgattactatggatccccctgttccgctccatctcccagtacaccgagctttcagccccctcagttatccccctgggatgggagttttgggcactttagcccttctcagacctacgaggggctgcgcgcatggactgagcagttgcccaaagcttctgggcctcctcagccgcctgcgtttttctctttttctccacccaccggcccaagcccttctctcgctcagtcccccctgaagctgttcccttcccaggccacacaccagctgggtgagggcgaaagctactccatgccaaccgcgtttccaggtcttgctcctacttcaccgcacctggagggatccgggattctcgacacacccgtgacttccactaaggccagatcaggggctcctggtgggtccgagggccgttgcgctgtatgtggggataatgcttcttgccagcactacggggtgaggacttgcgagggttgcaagggcttctttaagcgaaccgtccaaaagaacgccaagtacatttgccttgccaataaggactgccccgtggataagcggagacgcaaccgctgccagttctgcaggttccaaaaatgcctagccgtcggcatggtcaaggaggtggtgcggacagacagcctgaaaggaagacgcggtcgcctcccttccaaaccgaagcagcctccggacgcctccccagcgaacctgctaactagtctcgttagagcccatcttgactcagggccttccaccgccaagctggattactctaagtttcaggagttggttctgccccactttggtaaagaagacgctggcgatgtgcagcagttttatgatttgctgtctggaagcctagaagtgatacgcaagtgggctgagaagattcctggatttgcggagctctctcctgctgatcaggacctgctcttagagagcgcatttcttgagttgttcatcctgcgcctcgcctacaggtccaagcccggtgagggtaaactgatattttgtagtgggttggtactacacagactccagtgcgccagaggttttggcgactggattgactccatccttgccttttctcggtctctccacagcctgctagttgatgtgcccgcattcgcctgtctgtccgccttggtgctaatcacagacagacacggccttcaggaacctcgcagagttgaggagttacagaatcggattgcctcctgtctgaaggaacacgtggccgctgtagctggggaaccgcaacccgcaagctgtttaagccgactgctcggaaagctgccagagctccggacattgtgcactcagggattgcagaggatcttttacttgaaactcgaggacctggtgcctccaccaccaatcattgataaaattttcatggatactcttccattttag

SEQ ID NO: 233169 - DNA, 1797 bp, synthetic construct
  misc_feature 1..1797: note = Description of Artificial Sequence: Synthetic coding sequence
  source 1..1797: mol_type = other DNA
atgccatgtgtccaggcgcagtacggtagcagcccacaaggcgcatccccagccagccagtcttatagctaccattcatcaggtgaatattcttccgactttctcaccccagagttcgtgaaattttccatggacttaacaaatacagaaattaccgccactacaagtctgccgtcattctctactttcatggacaattattctaccggctatgatgtgaaacccccatgcctctatcagatgcctctcagcggccagcaaagcagcatcaaggttgaagatattcagatgcacaactaccagcagcacagccacctgcccccacagtctgaggaaatgatgccccattccgggtctgtgtactacaaaccctccagcccaccgaccccaacgactcctggttttcaggttcagcatagccctatgtgggatgaccccggtagtctgcacaattttcaccaaaattatgtagcaacgacacatatgatcgaacagagaaaaacacccgtctcccgattgtcattgttctctttcaagcagagcccacccggaactccagtgtcctcttgccaaatgcgatttgatgggcctctgcatgtgcctatgaaccctgagcccgcaggctctcaccacgtggtggacgggcagacgttcgccgtgccaaaccccatccgaaagccagcttccatggggtttccaggcctgcagattggacatgcctctcaactcctggacacacaggtgcctagcccaccatcccgcggtagtccctctaacgagggcctttgcgccgtttgcggagataacgcagcgtgtcagcattatggagtacgcacttgcgagggatgtaaaggattctttaaaagaacagttcagaagaatgccaagtacgtgtgcctcgctaacaaaaattgccccgtggataagagaagaagaaaccgctgtcagtattgccggtttcaaaagtgtctggccgtggggatggtgaaagaagtggtccgaactgattcccttaaaggcaggagaggcagactcccaagtaagcctaagtctccccaggagccctcgcccccttccccccctgtgtccctgattagcgctctcgtacgcgctcatgtggattccaacccggctatgacctctctcgattactctcggttccaagcaaacccagattatcagatgtcgggggacgatacccagcacattcagcaattttacgacttgctgacaggcagcatggagatcattcgtgggtgggccgaaaaaatccccggatttgccgacctgccgaaagcagaccaggatctgttatttgagagcgcttttctggaactattcgtacttcgactggcctataggagcaatcccgtagagggaaaattgattttctgcaatggcgtggtcttgcatcgcttacagtgcgtgcggggattcggagaatggatcgactcgattgtcgagttctcctcaaacttgcagaatatgaacatcgacatcagtgctttttcctgtatcgcagccctagcgatggtgactgagcgccatggactgaaagaaccaaagagagtggaagagctgcagaacaaaatcgtaaattgcctgaaggatcacgtcacattcaataacggtggcctcaacagaccaaattacctctctaagctcctaggtaaattgcccgagttaaggacactgtgcacacaagggttacagcggattttttacttgaaactggaagatttggtgccaccacccgcaatcatcgataagttatttctggacactttgccattctag

SEQ ID NO: 233170 - DNA, 1797 bp, synthetic construct
  misc_feature 1..1797: note = Description of Artificial Sequence: Synthetic coding sequence
  source 1..1797: mol_type = other DNA
atgccctgtgtccaggctcagtatggcagtagcccacagggggcttctccagcctcacagagttactcctatcattcatctggggagtattcctctgacttcctgaccccggagtttgtgaaatttagtatggacctcacaaacaccgagatcactgcaacaaccagcctgccatcattttccaccttcatggataactactccaccggatatgacgtgaaacccccatgtctctaccaaatgcctcttagtggacagcagtcttccatcaaggttgaggatatccagatgcacaactaccagcagcacagtcacctccctccccagagtgaggagatgatgccacactcggggtctgtttattataagccttcctcaccacctacgcctaccacccctggattccaggtgcagcattcgccgatgtgggacgaccccggttccctacacaacttccatcaaaattacgtggccaccacgcatatgatagagcaaaggaaaacaccagtctccagattatcacttttctcattcaaacagtcaccccctggcacccccgtgagttcctgtcaaatgcgattcgacgggccattacacgttccaatgaacccagaacccgctggatcccatcacgtggttgatggccagacttttgccgttccaaatccaattcgaaaacctgccagtatgggtttccccggactgcagatagggcacgcgtcacagctgcttgatactcaggtgccaagccccccaagtcgtggttcgccaagcaatgaagggctgtgtgctgtctgcggggataacgctgcctgccagcactatggagtccgcacatgcgaaggatgcaaaggattcttcaagcggaccgtgcagaagaatgccaagtacgtttgccttgccaataagaattgtccagtcgacaagcgcaggcgcaacagatgtcagtattgtagatttcagaagtgtctcgcagtggggatggtgaaagaagtcgtgcgtacagacagcctcaaggggcgtagggggcgtctcccctctaagccaaaaagcccacaggaacccagtcccccatccccccctgtgagccttatatcagccttggttcgcgctcatgtggactctaatcctgctatgacttcactggactattccaggttccaggcgaacccagactaccagatgtccggcgacgatacacagcacattcaacagttctacgaccttctcaccgggtctatggagatcatccgcggttgggcggaaaaaatcccgggattcgcagatttacccaaggccgatcaggatcttctctttgagtccgcctttttggagttattcgtcctccgcctggcttacaggagcaacccagtggagggcaaattaatcttctgcaatggcgttgtacttcatcgccttcaatgcgtcagaggtttcggcgagtggatcgacagtattgttgagttcagttcaaacctgcagaatatgaatattgacattagcgcattcagctgcatcgctgccctagctatggttacagaaagacacggcttgaaagagcccaagagagtcgaagagttgcagaacaaaatcgtgaattgcctgaaggatcacgttactttcaacaacggcggactcaacaggccgaattacctttcaaagctgctcggaaagctgcctgagctgcgcacactctgtacccaaggactgcagaggatcttctacctaaaattagaggatcttgtgccgccaccagcaatcatcgacaaactgtttctagacactctccctttttag

SEQ ID NO: 233171 - DNA, 1179 bp, synthetic construct
  misc_feature 1..1179: note = Description of Artificial Sequence: Synthetic coding sequence
  source 1..1179: mol_type = other DNA
atggacaattattcaaccgggtacgatgtgaagcccccttgcctgtatcagatgcctctatccgggcagcagtccagtatcaaggtggaagatattcagatgcacaattaccaacagcacagccacctgccccctcaaagcgaagaaatgatgcctcactctggttctgtctactacaagcctagctctccgccaaccccaactactccaggcttccaagtgcaacatagccctatgtgggatgatcccggatccctgcacaacttccatcagaattacgtggctacgacccatatgatcgagcaacgcaagacacctgtctcacgactctccctattttcttttaaacagagccccccaggcacccctgtatcgtcttgtcagatgcgtttcgacggaccattgcatgttcccatgaaccctgaaccagccggttctcatcacgtggtggatggccagacattcgctgtccctaatcccatacgaaaacccgcatctatggggttcccaggcctgcaaatcggccatgcttcccaactcctggacactcaggtaccctcccccccttctagaggaagcccttctaacgaaggactgtgtgccgtctgcggcgacaacgctgcttgtcaacactatggagtgcggacctgtgagggctgcaaaggcttttttaagagaacggtgcaaaagaatgccaagtacgtgtgcttggcaaacaagaactgtccagtggacaagcgacggaggaaccgctgtcagtactgcaggtttcagaaatgcctggctgtgggtatggtgaaggaggtggtacgaacagattctttaaagggacgcagaggcaggctgcccagtaagcccaagagcccgcaggagcccagtcccccaagtccccctgtttctctgattagcgctctggttcgtgcccacgtagactcgaatccagcgatgacttctctcgattactcacggtttcaggccaatcctgattatcagatgtccggagatgacacacaacacatccagcaattctacgatctgctaaccgggtctatggagatcatacggggatgggcagaaaagatccccggatttgctgaccttcctaaagccgaccaggacctgctcttcgaaagtgcatttcttgagctgtttgtcctgcgtctggcatatagaatctag

SEQ ID NO: 233172 - DNA, 1179 bp, synthetic construct
  misc_feature 1..1179: note = Description of Artificial Sequence: Synthetic coding sequence
  source 1..1179: mol_type = other DNA
atggataattactcaactggatacgacgtaaaacctccctgcctctaccagatgcccctgagcggtcagcagagttccataaaggtggaggacatccagatgcataattatcaacaacactctcacctgccacctcaatctgaggaaatgatgcctcattccggatccgtctactataagcctagttcccccccaacacccaccacacctggattccaggtgcagcatagccccatgtgggacgaccctgggtctttgcacaactttcaccagaactatgttgcgacaacccacatgattgagcagagaaaaacgccagtaagtcgacttagtttgttttctttcaagcagtctccacctggcaccccagtgtcttcctgtcagatgcgcttcgacggacctctgcacgtgccgatgaacccagagcctgcaggatctcaccatgtggttgatgggcagaccttcgccgtgccaaatcccattagaaagccagcaagtatgggatttcctgggctgcagattggccatgccagccagctgctagatacacaggtgccatcacccccaagccgtggcagcccgtctaatgagggactttgcgccgtctgcggagacaatgccgcatgtcagcattacggcgtcaggacatgcgaaggttgtaagggttttttcaaacggactgtgcaaaaaaatgccaaatacgtgtgtctggcgaacaagaattgtcccgtcgataaaagacgacggaatcgctgtcagtactgtcgcttccaaaaatgcctcgccgtgggcatggtaaaggaggtcgtccgaacggactctctgaaagggcgtcggggaagattaccatccaaaccaaaatctcctcaggaaccttcacctcctagcccccctgtgagcttaattagcgcactggtaagggcccacgttgactccaaccctgcaatgacctctcttgactactcacgcttccaggcgaatcccgattaccaaatgtcaggcgatgatactcagcacattcagcagttctatgacttgttgacagggtctatggaaattatcaggggctgggccgaaaagatcccgggatttgccgacctgcccaaagcggatcaggacctgctttttgaaagcgcctttctggaactgttcgtcctgcgtctggcataccggatatag

SEQ ID NO: 233173 - DNA, 777 bp, synthetic construct
  misc_feature 1..777: note = Description of Artificial Sequence: Synthetic coding sequence
  source 1..777: mol_type = other DNA
atgccttgcgttcaggcccagtacggatccagtcctcagggggcttctcctgcgagtcagtcctacagctatcattcctccggagagtacagttccgactttctaaccccggagttcgtcaagtttagcatggacttaacgaatacagaaataactgccactacttctctcccttcctttagcacctttatggataattattctaccgggtatgacgttaagccaccttgcctgtatcagatgccattgagcggccagcagtccagtattaaggtggaggatatacagatgcacaactaccagcagcatagccacctcccacctcagtcagaggaaatgatgccacattcgggctctgtttactataagccctcaagcccaccgacaccaacaaccccagggttccaggttcagcactctcctatgtgggacgatcctggcagcctccacaatttccaccagaactacgttgccaccacccacatgatagagcagcgaaagactcccgtgagcagactcagcctgtttagctttaagcagagcccccctgggacacctgtatccagctgccagatgagattcgacgggccactgcatgtgcccatgaatcccgagcccgctggatctcatcatgtggtggatggtcagacattcgccgtaccgaatcccatacggaagcctgcgagtatggggttccctgggctccagatcgggcacgcgtctcagttattagatacacaagtaccaagccccccaagtcgtggaagtcccagttag

SEQ ID NO: 233174 - DNA, 1608 bp, synthetic construct
  misc_feature 1..1608: note = Description of Artificial Sequence: Synthetic coding sequence
  source 1..1608: mol_type = other DNA
atggacaactattctacagggtacgacgtcaaaccaccatgcttgtaccaaatgcctctatcaggccagcagtctagcattaaagttgaggatattcagatgcataattaccagcagcacagtcacctgccacctcaatctgaagagatgatgccacacagcggctccgtgtactataaaccatcaagtccccctacccctacaacccctggcttccaggtgcaacattccccaatgtgggatgatccaggctcgctacacaatttccatcagaattacgtcgcgactactcacatgatcgagcagcgcaagactccagtgagccgtttgtcactgttcagcttcaagcagtctccgccagggacacccgttagctcttgccagatgcgttttgatgggcctttacacgtgcccatgaaccccgagcctgcaggatctcatcacgtcgtcgatggacagacttttgcagtccccaaccctattagaaaacccgcatccatgggctttccaggcctacagatcggccacgctagtcagctcctggacacacaggtcccatccccaccgagcaggggtagtccttccaatgaggggctatgcgcagtgtgtggagacaacgctgcatgtcagcactacggtgtgagaacttgcgaaggctgtaagggcttcttcaaaaggaccgtgcagaagaacgctaagtatgtgtgcttagccaacaaaaactgtccggtcgacaaaagacggcgtaatcgctgccagtactgcaggtttcagaaatgcctcgccgtgggaatggtaaaagaggtggtcagaaccgactccctgaaaggtcggaggggtaggctgccaagtaagccaaagtcaccccaggaacctagccctccatctcctccagtgtcacttatatcagccctcgttagggctcatgttgacagcaatcccgctatgaccagcctggactattctcgttttcaagccaaccctgactaccagatgagcggcgatgacacacagcacattcagcagttctatgacttgcttacgggtagtatggagattattagaggctgggctgagaagatccctggattcgccgacctgcccaaagcggatcaggacctgctctttgaatctgcattccttgagttatttgtattaagactggcctacagatcgaatccagtagagggaaaattaatcttttgcaatggcgttgtcttgcatcgcttgcaatgtgtcagggggttcggtgagtggattgattcaatcgtggagttctcaagcaacctacagaatatgaatattgacatctcggcattcagctgcattgcagcgctggctatggtgacggagcggcacgggctaaaagaacccaaaagggtggaggagcttcagaataaaatcgtcaattgcttaaaagaccatgtgaccttcaacaacggcggtctcaacaggcccaactatctgtcaaaactgctgggcaagctgccagaactgcgcacactctgcacccagggactccaaaggatcttttatctgaagctggaggacctggtacccccaccagcaatcatcgacaaacttttccttgatactctacctttctag

SEQ ID NO: 233175 - DNA, 1830 bp, synthetic construct
  misc_feature 1..1830: note = Description of Artificial Sequence: Synthetic coding sequence
  source 1..1830: mol_type = other DNA
atgaacgaggacaggcggggagagctcctgacaatgccttgtgttcaggctcagtacggctcgtctccccagggcgctagccctgcgagccagtcatactcctaccactcttctggagaatactcctccgacttcctgactccagaattcgtgaaattttcaatggatctgactaacaccgaaattactgctaccactagcctgccttccttctcgactttcatggataactactccacaggttatgatgtgaagcccccatgtctgtaccagatgcctctgtctgggcagcagtcatctatcaaggttgaggatatccaaatgcacaattaccagcaacacagccacctgcctccacagagcgaggagatgatgccccactctggctccgtgtactataaacccagttcaccccctactcccacaacaccaggctttcaggtgcaacatagcccaatgtgggacgaccccggatccctgcacaacttccatcagaactacgttgctacaacgcacatgatcgaacagcgtaagacacctgtgtcacgcttgtccttgttttcttttaaacagtctccccctggcacacccgtttcctcctgtcagatgaggtttgacggacctctgcacgtgcccatgaatcccgagccagccggaagtcatcacgttgtggacggacagaccttcgccgtgcccaaccctatccgaaaacccgcatcaatgggatttcccggactgcagatcgggcatgcgtcacagttactggatacacaggtgccatccccccctagtcggggatcccctagtaacgaaggactgtgcgccgtttgcggggacaacgccgcatgccagcactacggggtccgcacctgcgaaggatgtaaaggtttctttaagcgcaccgtgcaaaaaaacgccaaatatgtctgtctcgcaaacaaaaactgcccagtggataaaaggcgcagaaatcgatgccagtattgtaggtttcaaaagtgtctagccgtcggtatggtcaaagaagtcgtccggaccgactcccttaagggccgtaggggcaggcttccatccaagcccaagagcccccaagagccctcccccccatctccccctgtttccctcatttccgccctcgtcagggcccacgtggatagcaatcccgcaatgacctccctggactatagccgctttcaggcgaaccccgactaccagatgagcggagatgacacacaacacatccaacaattttacgacttgctgaccggatccatggaaatcattaggggctgggccgaaaagatccctgggtttgccgatctcccaaaggcggaccaggacctactattcgagagcgcttttctggagctttttgtgctgcgattggcctatcgctccaaccctgttgaaggaaagctgatcttctgcaatggtgtagtcctgcaccggctgcagtgcgtgagaggtttcggcgagtggatcgactctatcgtagagttctcctcaaacctccaaaatatgaacatcgatatcagcgccttctcatgcatcgctgctcttgcgatggtgaccgagagacacgggttgaaagaacctaagagagtggaggagctgcagaacaaaatcgttaattgcctgaaagaccacgtgactttcaacaacggtggcttgaataggcctaattacctgagcaaattattggggaagctgcctgaactccgtaccctatgcactcagggcctgcagcgaattttctatcttaagctggaggacttggttccccctcctgccatcatagacaaactgttcctggatacattgcccttttag

SEQ ID NO: 233176 - DNA, 738 bp, synthetic construct
  misc_feature 1..738: note = Description of Artificial Sequence: Synthetic coding sequence
  source 1..738: mol_type = other DNA
gttgaagaggagggggatgttagtaacaggggtgtagagttacttcaactcgagccggacgaggaccaagtacgagcaaggattctgggatgtctccaagaacctacaaaatcccgccctgatcagcccgctgccttcgggttgttgtgtagaatggccgaccagacatttatctccatcgtagactgggcacggaggtgcatggtttttaaagagcttgaagtggcagatcaaatgacactactgcagaattgctggagtgaattgctagtgtttgaccatatctacagacaggtccagcacggaaaagaaggaagtattctcctcgtcaccggacaagaagtcgagctgactaccgtcgccacccaggcagggtccttgctacattccctggtcttgcgtgcacaagagctcgtcctccaactgctggccctccagttggatcgccaggagtttgtttgtctcaagttcatcatcctgttttctctcgacctgaagtttctcaacaatcatattctcgtgaaagacgctcaggagaaggcaaatgctgcgctccttgattatactctgtgccattatccccattgtggagacaagtttcaacagctgcttctgtgcttggttgaagtgcgcgcactgagtatgcaggcaaaggagtacctgtaccacaagcatctgggcaacgaaatgcccagaaacaaccttttgattgaaatgctgcaggctaagcagacatag

SEQ ID NO: 233177 - DNA, 1386 bp, synthetic construct
  misc_feature 1..1386: note = Description of Artificial Sequence: Synthetic coding sequence
  source 1..1386: mol_type = other DNA
atggactactcttacgatgaggatcttgacgagctatgtccggtttgcggggacaaagtgtcgggctaccattacggactgttgacgtgcgagagttgcaaggggttcttcaagcgcacggtgcaaaataacaaacactacacctgtaccgaatctcagagctgtaaaattgataagacccagaggaagcgctgtccattttgtagattccagaagtgtttgacagtgggaatgcgccttgaagctgtccgcgcagaccgcatgcggggagggagaaacaagtttggacctatgtataagagggacagggcccttaaacagcaaaaaaaggcacagattcgggctaacgggtttaagcttgagactggacctcccatgggagtcccgcctcccccaccacctgccccagactacgtgctgcccccttccctgcatggtccagagccaaagggactggccgcaggaccgcctgcaggtcccttgggggatttcggagcccctgccctgcccatggctgttccaggcgctcatgggcctctggcagggtacctttatcccgcttttccgggtagagccatcaagtctgaatacccagaaccatatgcttctccccctcagcctggactaccttacggatatccagaacctttctccggcggtcctaacgtgcctgaacttattctgcagctgctgcagctcgagcccgacgaagaccaggtgagggcccgaatactgggatgtttgcaagaacctacaaagtccaggcctgaccaaccggcagcttttggcctgctatgtaggatggcagatcagacctttatcagtatcgtggattgggctaggaggtgcatggtgttcaaggaactcgaggttgctgaccaaatgacccttctccagaactgctggtccgagctcctggtctttgatcacatctacagacaggttcagcacggaaaggagggatctatcttgctcgtgactgggcaggaagttgaacttactacggttgccacccaggccggttctttgctgcacagcctcgttctgagagcgcaggagctcgtcctgcaacttctggcccttcagttggaccgacaagaattcgtttgtctgaaattcatcattctctttagtctcgacctgaagtttctgaataatcacatcttggtgaaagacgcacaagaaaaggccaacgccgcactgctcgactatacactctgccactatccacattgcggagataagttccagcagctcctcctgtgcttagtggaggtgagagcgctgtctatgcaagctaaggagtacctgtaccataaacatttgggcaatgaaatgcctaggaacaatttactcatcgaaatgctgcaggctaagcagacttag

SEQ ID NO: 233178 - DNA, 537 bp, synthetic construct
  misc_feature 1..537: note = Description of Artificial Sequence: Synthetic coding sequence
  source 1..537: mol_type = other DNA
atggattattcctacgacgaagacttagatgaactttgtcccgtctgtggggataaggtatccggctaccactatggacttctcacctgtgaatcatgcaaaggattcttcaaacgcaccgtacaaaacaataagcactatacctgtaccgagagccagagctgcaagattgacaaaacacagagaaagaggtgtccattttgtcggttccaaaaatgcctgactgttggcatgaggctagaggccgttagagctgataggatgagaggcggtagaaataagtttggtcctatgtataaacgcgatcgcgctctcaaacagcagaagaaagcccagattagagccaacggcttcaaattggaaaccggcccacccatgggcgtgccgcctcctccgcctccagctccggattacgtacttcctcctagtctgcatggcccagagccgaagggattagcagccggacctcctgctggtccattgggggatttcggtgcccctgccttgcccatggcagtgccaggagctcatggttag

SEQ ID NO: 233179 - DNA, 972 bp, synthetic construct
  misc_feature 1..972: note = Description of Artificial Sequence: Synthetic coding sequence
  source 1..972: mol_type = other DNA
gatctcgaggaactgtgccccgtctgcggcgataaggtcagcgggtatcactatggcctcctgacttgcgagagttgtaagggcttcttcaagagaaccgtgcagaacaacaagcggtatacgtgcatagaaaaccagaattgccagattgacaagactcagcgaaagaggtgcccctactgtcgattccagaaatgtttgagtgtcggcatgaagctggaggcagttcgggctgatcggatgcgtggaggtcggaacaagttcggtccaatgtataaacgggatagggcgctgaagcagcagaagaaggctctgataagggccaacgggctgaaacttgaggctatgagtcaagtcatccaggccatgcccagcgacctgactatctcaagcgccattcaaaacattcattccgcaagtaagggactgcccctaaaccacgccgcactgcctcccaccgattatgacagatctccgttcgtgacctctcccatttcgatgacaatgcctcctcacggtagtttgcagggataccagacttacggacattttccctcacgcgctatcaagtcagagtaccccgacccttacactagctcacccgagtccatcatgggctattcttacatggacagctatcaaacatcaagcccagcctccattcctcacctgatcctggagctcctgaaatgtgagcccgacgagccacaggtccaggcaaaaatcatggcgtacctccagcaggagcaggcaaaccgcagcaaacacgagaagctctctacattcgggctcatgtgtaagatggctgatcagaccctcttttcgattgtcgagtgggcacgtagttctatcttctttagagagctgaaggggctgaccctgagcccatcattggagtgcagcggaagctggctgatggctacatcaacctcatgcatacaggtgatacggttgccacagccacctgagtag

SEQ ID NO: 233180 - DNA, 1488 bp, synthetic construct
  misc_feature 1..1488: note = Description of Artificial Sequence: Synthetic coding sequence
  source 1..1488: mol_type = other DNA
atgagcagcaactccgatacaggcgatctgcaggagtcgctgaagcacggcttaacacccattgtgagccagttcaagatggtgaattattcatacgacgaagatctcgaggaattgtgccctgtttgtggcgacaaggtgtctggataccattatgggcttttaacatgtgaaagctgcaaaggtttttttaaaaggacagtccaaaataacaagcggtacacgtgcatcgagaatcaaaattgccagatcgacaagacccaacgcaaaagatgtccctactgtcgctttcagaaatgcctgagcgtgggtatgaaattagaagccgttcgtgctgacaggatgcggggagggaggaacaaattcggacccatgtacaaaagggatagggccctgaaacagcagaaaaaggcccttataagggctaatgggctgaagctcgaggccatgagccaggtgattcaggctatgcccagcgaccttacaatatcatccgctattcaaaatatccattcagccagcaaaggcctgccgctgaaccatgcagccttgcccccaacggactacgacaggtccccatttgtgacgagcccgatttcaatgactatgccaccacacggctctctgcaaggctaccagacttacggacacttccccagcagagccattaagtccgagtatcccgatccttatacctcatccccagagtcgatcatgggctattcctatatggactcataccagacttctagccctgctagtatcccacatctcattctcgagctgctgaagtgcgagccagacgagccacaggtccaagcaaaaatcatggcatatctgcagcaggaacaagcgaaccgttctaagcacgaaaagctaagcacatttggcctgatgtgcaaaatggctgatcagaccctgttttccattgttgagtgggcacggtccagcatctttttccgggaactgaaagtcgacgaccaaatgaaactactgcagaactgttggtccgaacttctgattctggatcatatctaccgccaggtggtacatggaaaagagggttcaatctttcttgtcaccgggcaacaggtggactactctatcatcgcctcacaggccggagccaccctcaataatctcatgtctcatgctcaggaactggtcgccaagttgcgatccctacaatttgaccaaagggagttcgtgtgtctgaaattcctggttctgtttagcctagatgttaagaacctggaaaacttccagctggtggagggcgttcaggagcaggttaatgctgcgctcctcgactacactatgtgcaactatccccagcagaccgaaaagttcggacaactgttgctccgcctgccagaaatcagggctatatctatgcaagcagaagagtacctgtattataaacatctgaacggcgacgtgccctacaacaatcttttgatcgagatgctgcacgcaaagcgtgcctag

SEQ ID NO: 233181 - DNA, 1134 bp, synthetic construct
  misc_feature 1..1134: note = Description of Artificial Sequence: Synthetic coding sequence
  source 1..1134: mol_type = other DNA
tgagacctcgaagaactttgccctgtgtgcggggacaaagtttctggctatcactatggtcttctcacatgcgagtcttgcaaaggcttcttcaagagaacggttcaaaataataagcgatacacatgtattgagaatcagaactgccaaatcgataaaacccaaagaaagcgttgcccatattgtcgattccagaaatgcctgtccgttgggatgaaattagaggctgtgagggcagaccggatgcggggagggaggaacaagtttgggccaatgtataagagagatcgcgctctgaagcagcagaagaaggcgttaatcagagctaatggcctcaaactggaagctatgtcacaggtgatacaggccatgcctagcgacctgactatttctagcgccattcagaacatccactcagctagcaaggggctacccctcaaccacgcagcacttcctcccactgattacgaccgctcccctttcgtgacatcacctattagcatgacgatgccccctcacggaagtctacaagggtatcagacatatggacactttccatcccgcgctatcaaaagtgagtatcccgatccttacaccagcagtcccgagagcataatgggctactcatatatggatagctatcagacaagctccccagctagtataccccatctaatcctggagttactcaagtgtgaaccagatgagcctcaagtgcaggcaaaaatcatggcctacctccagcaggagcaggccaaccggagtaaacacgagaagctgtcgacatttgggctcatgtgcaaaatggccgaccagaccctattttctattgtcgagtgggccaggtcctccatattttttagggagctgaaggggctcacacttagtccttctctggaatgcagcggtacaattctcgcccacggcaacttacatctgttacattcttccgatagtcctgcctccgcaagccgggttgctggtattacgggcgttcatcataacacgcacctgatttttgtgtttctggtggagatgggtttttgtcacgtgggccaggccggtctgaagacgccagatcttagagtgatctgcttgccgcgtcctccaaaagtgctggggctgtgggcatag

SEQ ID NO: 233182 - DNA, 1626 bp, synthetic construct
  misc_feature 1..1626: note = Description of Artificial Sequence: Synthetic coding sequence
  source 1..1626: mol_type = other DNA
atgtccagcaacagcgacacaggcgacctgcaggagagtctaaagcatggcctgacacccatcggggcaggattgccagataggcatggatcacctataccagcacgcggacgccttgttatgctgccaaaagtggaaacagaagcgctgggactcgcgcgatctcatggagaacagggccagatgcctgagaatatgcaagtatcccagttcaaaatggttaattactcctacgacgaggacctggaagagctttgtcccgtgtgcggggacaaggtgagcggctatcactacggactcttaacttgtgaatcttgcaagggcttctttaagcgaacggtgcagaacaacaaaagatacacctgtatcgagaatcagaattgccaaattgacaagacccagagaaaaagatgcccatattgtcgctttcagaaatgcctctcagtggggatgaagctcgaggccgttcgagcggaccggatgagggggggacggaataaatttggccctatgtataagcgggatcgcgcactgaaacagcagaaaaaggcactgattagagccaatggactgaagctcgaggccatgtctcaggtgattcaggccatgccgtctgatctgacaataagttccgccatccagaacattcactcagcctccaaaggacttcccttgaaccacgctgccctgcctcctacagattatgatcggagcccgttcgtgacaagccccatttctatgacaatgccccctcatggttctctccaggggtatcagacctacggtcattttcctagcagagcgatcaagagcgaatatccagacccctacacatcgtcccccgaatccatcatggggtactcatacatggatagttaccagacgtcctcccctgcttcaattccccaccttatcctggaactgttgaaatgcgagccagacgagccgcaggtgcaggcgaaaataatggcttacctccagcaagagcaggccaatagatctaagcatgagaaacttagtacctttggattgatgtgtaaaatggccgatcagactctgttcagcattgtcgagtgggcacgcagttccattttttttagggagctgaaggtcgacgaccagatgaagctgctgcagaactgctggtcagagctgctcatcctggatcacatctaccgacaggtcgttcacgggaaagagggctctattttccttgtgacaggacaacaggtagattatagtatcattgctagtcaggctggcgctacgctcaacaacttgatgagccatgcccaggagctggtagccaagttgcgatctcttcaattcgatcagagggagttcgtgtgcttgaaattcctggtgctgtttagcttggacgtcaagaatcttgagaacttccagctcgtggaaggggtccaggaacaagtaaatgccgctctactggactacactatgtgcaattatccccagcagaccgagaagtttggccagttgctgctccgcctgccggagatccgggctatatcgatgcaggccgaagaatatctctattacaagcacttgaatggcgatgtaccctataataaccttctaatcgagatgctccacgccaaacgggcttag

SEQ ID NO: 233183 - DNA, 216 bp, synthetic construct
  misc_feature 1..216: note = Description of Artificial Sequence: Synthetic coding sequence
  source 1..216: mol_type = other DNA
taatccctaaagcatgggctaaccccaatcgatcgtggtaattgtcggagcggatgcttctcctttgcagccactctgagacagcggtcactgctgacatcttgtgcgggactcccagaccggcatggaagccctatcccagccaggggtagattggtgatgctgcccaaagtggagaccgaggctctgggactcgcccgttcccatggagagtag

SEQ ID NO: 233184 - DNA, 66 bp, synthetic construct
  misc_feature 1..66: note = Description of Artificial Sequence: Synthetic coding sequence
  source 1..66: mol_type = other DNA
atgtctagtaatagcgataccggcgacctacaagagtcactcaagcacgggttgactcccatttag

SEQ ID NO: 233185 - DNA, 249 bp, synthetic construct
  misc_feature 1..249: note = Description of Artificial Sequence: Synthetic coding sequence
  source 1..249: mol_type = other DNA
atgtcttccaactccgatactggagacctgcaggaaagtcttaagcatgggttgacaccaattgataggggaaattgcaggtccgggtgcttcagcttcgcagccacactgagacagcggtccctccttacatcctgcgcaggcctaccggacaggcacggctcaccaatcccagcccgtggcagactcgtcatgcttccgaaggtggaaactgaggctctgggattagcacgcagccatggggagtag

SEQ ID NO: 233186 - DNA, 1410 bp, synthetic construct
  misc_feature 1..1410: note = Description of Artificial Sequence: Synthetic coding sequence
  source 1..1410: mol_type = other DNA
atggtgaactattcatatgacgaggacctggaagagttgtgccctgtgtgcggagacaaagtgtccggctatcactacggcttgttgacatgtgaatcctgtaagggctttttcaaacggaccgtccaaaacaataaacggtacacgtgtattgagaaccagaattgtcaaatagataagacccaaaggaagcggtgtccttactgccgctttcaaaagtgtctctcggtggggatgaagcttgaagccgttcgtgcagaccgcatgagggggggaaggaataagttcgggccaatgtacaagcgggaccgcgctctcaaacagcagaaaaaggctctcatccgcgctaacggactgaaattggaagcaatgtcccaggtaattcaggccatgccaagcgatttgacaatttcaagcgcgattcagaacattcattccgcttccaagggtctccccctgaatcacgcggcactcccccctaccgactacgatagatccccctttgtgacaagtccaatctcaatgactatgccccctcatggaagcctgcagggttaccagacttatgggcacttcccaagtcgcgctattaaatcagagtatcctgacccttatactagctcacctgagagcataatgggatactcctacatggattcttatcagaccagcagcccagcgtccatcccacacctcatcctcgaactgttaaaatgcgagccagatgaaccgcaagtacaagcaaaaatcatggcctatctgcagcaggaacaggccaatcggagcaaacacgagaagcttagcacctttggcctcatgtgtaaaatggccgaccagaccctgttttctattgtcgagtgggcgcgaagttccatcttcttccgggagttaaaagtggatgatcaaatgaagctcctgcagaattgctggtccgagctcctgatcttggatcacatatatagacaagtggtccatgggaaggaaggttccatctttctcgtgactggccagcaggtcgactactccatcattgctagtcaggccggagcgacgctgaacaacctgatgtcgcacgcccaagaacttgtagcaaaactgcgatccctacagttcgaccagcgagagttcgtgtgcttgaagttcttagtgctgttttccctggatgtaaagaatctggagaactttcagctggtggagggagtgcaggaacaggttaatgcagcattattagactacaccatgtgcaactatcctcagcaaaccgaaaaatttgggcagcttttactcaggctccctgaaatccgcgcaatctcaatgcaagcagaggagtacctgtactacaagcatctgaacggggacgttccctacaacaacttactgatcgagatgctgcatgcgaagagggcttag

SEQ ID NO: 233187 - DNA, 681 bp, synthetic construct
  misc_feature 1..681: note = Description of Artificial Sequence: Synthetic coding sequence
  source 1..681: mol_type = other DNA
atgttgctccgtctcgtctcaaacagctggccccaggttattctgccccctaggcctccaaaagtcctggggctccaggcccctagaagggccaggaaacgagctgagggcacagctagctcaaacgtcttctctatgttcgatcagtcacagatccaggaatttaaggaatcactcgctctgagtcctaggctggaacgtaacggcatgatctccgctcactgcaacttatgcctgaccggcagctccaatagtccagcctctgcctcccaggctttcaccataatggaccagaaccgggacggattcattgacaaggaggacctcagagatacttttgctgcacttggtagaattaatgtcaagaatgaggaactggaagctatggttaaggaagccccagggccaatcaacttcaccgttttcctgaccatgtttggcgagaagctcaaggggaccgaccccgaggagaccattctccatgcctttaaagtcttcgataccgaaggcaagggatttgttaaagccgatgtgataaaggaaaagcttatgactcaggccgacagattctcagaggaagaggtcaagcagatgtttgcagctttccccccagatgtgtgcggtaacctagactacaggaatctttgttatgtcattacccacggtgaggaaaaggactag

SEQ ID NO: 233188 - DNA, 1569 bp, synthetic construct
  misc_feature 1..1569: note = Description of Artificial Sequence: Synthetic coding sequence
  source 1..1569: mol_type = other DNA
atggaagagcacggcgtcacccaaactgaacacatggcaacaatcgaagcccacgcagtcgcccagcaggtgcagcaggtacacgttgcgacttatactgagcattccatgctctcagctgacgaagatagccctagcagccctgaggatacttcctatgatgactccgacatactcaattccaccgctgccgacgaggtgacagctcaccttgctgcggcagggcctgttggcatggccgcagccgcagccgttgcgacgggaaagaaacgcaaaaggccccacgtcttcgagagtaacccttcaattcggaagcgccagcaaacccgcctgcttcggaaactccgcgctacgcttgacgagtacactacccgcgtcgggcaacaggccatcgtcctgtgcatttctccttccaagccaaatcccgtgtttaaagtgtttggcgctgcaccgctggaaaacgttgtacgaaaatataaatccatgatcttagaagatctagaatcagcccttgctgagcacgccccagcgccacaggaagtaaactccgagcttcctcctctcactatcgacggaattccagtgagtgtggataaaatgacccaggcccagctgcgggctttcatccccgaaatgctgaagtactctacaggcaggggaaaacccggatggggtaaggagtcatgtaaacctatctggtggccagaagacattccttgggcaaatgtacgatctgatgtgcgcaccgaagagcagaagcagcgagtatcctggactcaagccctgcggaccatagtgaagaattgttataagcagcacggtcgtgaggacttgctatacgcctttgaggaccaacagacacagacacaggcaacagccacacatagcatcgcacatctggtcccttcacagacggtcgtacaaactttctccaatcctgatggcacagtcagcctgatacaggtgggtacaggagcaacagtcgccacactggcagacgcgagtgagctgcctactactgtgaccgtcgcccaagttaattacagtgctgtcgctgacggagaggtggagcaaaactgggctactctgcagggaggagagatgactattcagactacacaagcctcagaggcgacgcaggccgtagccagcctggcggaggccgcagttgccgcttcacaagagatgcagcaaggggctaccgtgaccatggcactcaacagcgaagccgctgcccacgccgtggccactctggccgaagctactttacagggcggtggacagatcgtactgtccggcgagaccgcggcagccgtcggcgcactgacaggggtgcaggacgccaacgggctatttatggctgaccgggcagggaggaagtggatcctcaccgataaggccactggcctcgtgcagataccagtttccatgtatcaaacagtcgtcacatcactggcacagggcaatggaccagtccaggtggctatggccccagtgaccaccaggatcagtgattcggctgtgacaatggacggacaggccgtggaggtcgtaaccctcgagcagtag

SEQ ID NO: 233189 - DNA, 1314 bp, synthetic construct
  misc_feature 1..1314: note = Description of Artificial Sequence: Synthetic coding sequence
  source 1..1314: mol_type = other DNA
atggaagagcacggcgtgacacagaccgagcatatggctaccatcgaagcacacgctgttgcacagcaggtgcagcaggttcatgtcgcaacatataccgagcactcaatgttatcggccgatgaggactctcccagctcacccgaggacacctcatatgacgatagtgacatcttgaactctacagctgctgatgaggttacggcccacctcgcagctgcaggccctgtagggatggccgcagccgctgctgtggccaccgggaaaaagaggaaacgacctcacgtgttcgagagcaatccttcgattaggaaacggcaacagacacgcttactcaggaagttgagagccacgctcgatgagtataccacccgagttggacagcaggccattgttctgtgtatctctccctccaagcccaaccctgtatttaaggtcttcggcgctgcccctctggaaaatgtggtaagaaagtacaagtccatgatccttgaagacctggaatcggcgctggccgagcacgcacctgcccctcaggaggtcaactccgagctgccccctctcactattgacggaatacccgtgtcggttgataaaatgacccaagcccagcttcgcgcattcattccagaaatgctgaagtactccaccggtcggggtaagccaggttgggggaaggagagctgcaagcctatctggtggcctgaagatatcccttgggcaaacgtacggtctgatgttcgcaccgaagaacagaagcagcgcgtcggtaccggtgcaaccgtggccactctggccgatgcctctgagttgcccacgacagtgaccgtggcgcaggtaaattattccgccgtcgccgatggggaggtggagcaaaactgggcgacgctgcagggaggggaaatgacaattcaaaccactcaggcaagcgaggctacgcaggccgtggcctccctcgccgaggccgctgtggctgcctctcaagagatgcaacagggagcaactgtgaccatggccctcaatagcgaggcagccgcacacgcagtggctacactggccgaagctacactccagggtggcggacagatagtgcttagcggggagaccgccgctgctgtgggcgctctgactggcgtgcaggatgctaacgggttggttcagattcctgtctctatgtaccaaactgtggtaactagcctggctcaggggaatgggcctgtgcaagtggcgatggccccagttacaaccaggattagtgactccgcagtaactatggatggtcaagccgtcgaagttgtcacattggaacagtag

SEQ ID NO: 233190 - DNA, 1512 bp, synthetic construct
  misc_feature 1..1512: note = Description of Artificial Sequence: Synthetic coding sequence
  source 1..1512: mol_type = other DNA
atggaagaacatggggtaacccagaccgagcacatggcaaccattgaggcacatgcggtagctcagcaggtgcagcaagttcatgtcgccacttacaccgagcactctatgctctccgctgatgaggacagcccgagctcccccgaggacaccagctatgacgactccgacatcctgaacagcaccgccgcagacgaggtgacagctcacctggccgctgccggacccgttggcatggctgccgcagccgcagtggctacaggcaagaaaaggaaaaggccgcatgtgtttgagagcaaccccagcatcaggaaaaggcagcaaacacgcctcttgcgtaagttacgggcaaccctagatgagtacacaacccgggttggccagcaggcaatcgttctctgcatttcgccctccaaaccaaatcctgtgtttaaggtgtttggggctgctccactggagaatgtagtgcgaaagtataaatccatgattctcgaagacttggaaagcgcactggcagaacacgctcccgcacctcaagaggtgaatagcgaattgcctcccctcaccatagatggaattccggttagcgtcgataagatgacccaagcccagctgagggcatttatccccgagatgctcaaatactccactggacggggaaagcctggatggggtaaggagagctgcaaacctatctggtggccagaggacatcccctgggcaaatgtgcgctctgacgtgcggacggaggaacaaaagcagcgggtgagttggacccaggccctgcgcactatagtgaagaactgctacaagcagcacgggagggaggatctgctgtatgcatttgaggatcagcagacgcagacccaagctacggctacccactctatcgcccacttggtgccatctcagaccgtcgtgcagactttctccaaccctgacgggacagtgtctctgatacaggtgggtaccggcgcaaccgtggccacattggccgacgcaagcgagctacctaccacagtcacagtcgctcaggtgaattatagcgccgtggccgacggcgaggtggagcaaaactgggccacactccagggtggggaaatgaccatacagaccacccaggcctccgaagccacccaggccgtggcctccttagctgaagctgcagttgccgcttcacaggagatgcagcagggtgctacagtaaccatggccctaaattctgaggccgcagcccacgcggtcgccactctggccgaagctactctgcagggcggtggccagatcgtcctgtctggcgagacagccgcagctgtgggggctctgacaggcgtgcaagatgcaaacgggttagttcagatccctgtatccatgtaccagaccgtcgttacatcactggcccaagggaatggcccagttcaggtcgctatggcaccagtgacgactaggatcagtgattctgctgttaccatggatggccaggccgttgaggtggtcaccctggagcagtag

SEQ ID NO: 233191 - DNA, 1569 bp, synthetic construct
  misc_feature 1..1569: note = Description of Artificial Sequence: Synthetic coding sequence
  source 1..1569: mol_type = other DNA
atggaagagcatggggtcactcagacagaacacatggccaccattgaggctcatgctgtggcccaacaggtgcagcaggtccatgtggcgacctacacagagcactctatgctgagcgcagatgaggacagcccatcttctccagaagacacctcctatgatgatagcgatatactaaactccacggctgctgacgaagtgactgctcatctggccgctgctggtcctgtgggcatggccgcagcggctgctgtagccacgggtaaaaagcgaaagcgccctcacgtgtttgagtcaaatccatccatacgcaagcggcaacagaccaggcttttacgcaagttacgcgctacgttagacgagtataccacgagagtggggcagcaggccattgtcctctgcatcagtccttcgaagcccaaccccgtgttcaaggtgtttggtgcagcacccctggagaatgtggttcgaaagtataagtctatgattctcgaagacctggaaagtgctctcgcagagcacgccccagcaccccaagaggtgaattcggaactaccccctctgacaatagatggaataccggtgtccgtggataagatgacccaggcccaactgcgtgcttttattcctgagatgcttaagtactccaccgggagaggcaagcctgggtggggcaaagagagctgtaaacccatttggtggccagaggatatcccctgggcgaatgtgcgtagcgacgtgcgcacagaggagcagaagcagagagtgagttggacccaggcactgcgaacgattgtcaagaattgctacaagcagcatggcagggaagacctcctctacgcattcgaagatcagcaaacccagacccaggcgaccgctacacactccattgcccatttagtcccgtcacagaccgtggtgcaaacattctccaaccctgatggaacagtgtccctcattcaggtcggaacgggtgcaaccgtggccactttggctgatgcttctgagctgccaaccactgtgacggttgcccaggtgaactattcggcagtggcggacggagaagtggagcagaattgggctacgctccagggcggtgagatgactatccaaacgacccaggcatcagaggccacacaggctgtggcatccttagccgaagccgctgtggccgcttcccaggagatgcaacagggcgctaccgtgactatggccttgaattccgaggctgcagcgcacgctgttgccactctagctgaggctactctgcaaggaggcggtcagattgttctcagcggagaaaccgctgccgctgtcggtgcacttactggcgtgcaggatgctaatggtttattcatggcagatagggctgggagaaagtggatactgactgacaaggctacaggactggtccagatcccggtcagcatgtatcagacagtggtcacttccctggctcaaggcaatggcccagttcaggttgccatggcgcctgtgactacgcggatcagcgatagcgctgtcacgatggatggacaggcagtagaggtagtcacgctggagcagtag

SEQ ID NO: 233192 - DNA, 1512 bp, synthetic construct
  misc_feature 1..1512: note = Description of Artificial Sequence: Synthetic coding sequence
  source 1..1512: mol_type = other DNA
atggaggagcacggcgtaactcagactgagcacatggctacaattgaagcgcatgccgtggcacaacaggtgcagcaggtgcatgtggcaacgtataccgagcattcgatgctgtcggcagacgaagacagtcccagttcaccagaggatacttcgtacgacgatagcgatattcttaattctacagctgccgacgaggttactgctcatctggctgcagccggacccgtgggcatggccgctgctgcggcagtggctaccggcaagaagagaaagcgtcctcatgtgtttgaatctaatccttcaattcggaaacgccagcagacccggttacttcggaagctgcgggctacattggacgagtacacgacaagggtgggccaacaagcgatagttctgtgcatatcccctagcaaacctaacccagtcttcaaggtgtttggagccgctcccctggaaaacgtggtcaggaaatacaagtctatgattcttgaagacctggaatcggctctggcggaacatgcgccagcccctcaggaagttaactcggagctcccaccgctgactattgatggaatccctgtcagcgtggacaaaatgacacaagcgcaattaagagcgttcatccccgagatgctcaagtattcaacgggtcgtggcaagccaggctggggtaaggagagctgtaaaccaatctggtggcctgaagacattccctgggcaaacgtgaggtcagacgtaagaaccgaggagcagaagcaacgcgtgtcctggacccaagcactcagaaccattgtgaagaactgttacaagcaacacggccgagaggatttgctgtatgcgtttgaggaccaacagacacagacccaggctaccgcaacccattctattgcacacctcgttccatcccagacggtggtgcagacattttcgaaccccgatggcaccgtaagcctgattcaggtgggcacgggtgctactgtagccaccctggccgatgctagtgagctgcctacgacagtgactgtggcccaagtgaattactcggccgttgccgatggcgaggtggagcagaactgggccactctgcagggtggggaaatgacgatccaaactactcaggcatccgaggcaacacaagcagtagcctctttggctgaggctgccgtcgcggcttcccaggaaatgcagcagggagctactgtaaccatggccctcaatagtgaggctgctgctcacgccgtggccactctggctgaggccaccctccagggcggtgggcaaatcgttctgagcggcgagactgcagccgcagtgggcgctttgaccggcgttcaggatgcaaatggtctagtacagatcccggttagtatgtaccaaactgtagtgacaagcctcgcccaggggaatggccctgttcaagttgccatggcacccgtaacaacccgaatcagcgattccgcggtgacaatggacgggcaggctgttgaagtggtgacactggagcagtag

SEQ ID NO: 233193 - DNA, 633 bp, synthetic construct
  misc_feature 1..633: note = Description of Artificial Sequence: Synthetic coding sequence
  source 1..633: mol_type = other DNA
atggaggaacatggcgtcacccagacggagcatatggcaactattgaggcccacgctgtcgctcagcaggtacagcaagtgcatgtggctacctacaccgaacactcaatgttgagcgccgatgaagactcaccatcctcacccgaagatacatcatatgacgactccgacattctcaactcaacggctgccgatgaggtgaccgcgcatcttgcagcagcagggccagtgggtatggccgcagccgcagctgtggccaccggcaaaaagcggaaaaggccccacgtgttcgagtccaatcctagcatccggaagagacagcagacacgcctgctgagaaagctgcgtgcaactcttgacgagtacacgactcgtgtagggcagcaagcaattgttctgtgtatatctccgagtaaacctaatcccgtgtttaaggtgttcggggcagccccacttgaaaacgtggttcggaagtacaagagtatgatccttgaggatcttgaatctgccctggcagaacatgcccctgctcctcaggaagtcaactctgaactcccgccattgaccatcgacgggatcccggtgagtgtagacaagatgacccaggcccagctgcgcgcatttataccctag

SEQ ID NO: 233194 - DNA, 1029 bp, synthetic construct
  misc_feature 1..1029: note = Description of Artificial Sequence: Synthetic coding sequence
  source 1..1029: mol_type = other DNA
atgattctggaagatctagagagcgccttagctgaacacgctccagctcctcaggaggtgaattcggagctccccccattgacaatcgatgggatccctgtgagcgttgacaagatgactcaggctcaactgcgcgcttttatccccgaaatgctgaagtattccaccgggagaggcaagcccggatggggcaaagagtcctgcaagccaatctggtggccagaagacatcccctgggccaacgtgcgcagtgacgtgcggaccgaggaacaaaaacagcgcgtatcttggacccaggctctgagaaccattgttaagaactgctacaagcaacatggcagagaagaccttctgtacgctttcgaggaccagcagacacagacacaggctacagccacacactctattgcacacttggtcccctcacagacagtggtgcaaaccttctccaatcccgatgggactgtcagccttattcaggtgggcaccggcgctaccgtggccaccctggccgacgcctccgagctgcccacaacagtgaccgtggcacaggttaattactcagcagtcgcagatggcgaggtggagcagaactgggccacgctgcagggaggagaaatgactatacagaccacccaagcttcagaggcgacgcaggcggttgcaagcttagccgaagccgctgtggcagcctctcaggaaatgcagcagggcgctaccgtcactatggcactgaacagtgaggctgctgcccatgctgtcgccacactggccgaagcaaccctgcaagggggagggcagattgtactgtccggcgaaactgccgctgcggtgggtgcacttaccggggtgcaggacgccaatggcttagtgcaaattccagtttccatgtaccagactgtcgtgacctccctggcgcagggcaacggaccggtgcaggtggcaatggctccagtgaccactaggattagcgacagcgccgtgacgatggatgggcaggccgtggaagtggtcacactggagcagtag

SEQ ID NO: 233195 - DNA, 1860 bp, synthetic construct
  misc_feature 1..1860: note = Description of Artificial Sequence: Synthetic coding sequence
  source 1..1860: mol_type = other DNA
atggccgacgagggtaagtcatacagtgagcacgatgatgagcgggtcaacttcccacagagaaaaaaaaaaggacggggaccgttcaggtggaagtacggggaaggcaacaggcggtccgggagaggcggttctggcataagatcctctcggcttgaggaggacgacggcgacgtcgccatgagtgatgctcaagacggaccgcgtgtacggtataatccctatacgacacgccctaacagacgtggtgatacatggcacgacagagatcgtattcacgtaactgtgcgacgagacagagccccacctgaacgcggaggggcaggtacgtctcaagacggcacaagtaagaactggtttaagatcacaattccatatgggaggaagtatgacaaagcctggctgctctcgatgattcagagtaagtgctcggttcctttcacgcctattgagttccactatgaaaacacaagagcccaatttttcgttgaagatgcctcgacagcctcagccctgaaggcagtcaactataagatcctcgacagggaaaacagacgcatatctataatcataaacagttcagcccctcctcatacaatcttgaacgaacttaaaccagagcaggtagagcagttaaaactgattatgtctaaacgctatgacggctcacagcaggccctcgatctgaagggcctgcggagcgaccccgatctggttgcacaaaatatagacgtggtcctgaaccgtcggagctgcatggcagctactttgagaatcattgaagaaaacatacccgagctgctctctctgaatcttagcaataaccgactataccgcctggatgacatgagttcgattgtgcagaaggctcccaatctgaaaattctgaacctgtcagggaacgagcttaaatctgagcgtgagctggacaaaatcaaagggttgaagctcgaggaactttggttagatggcaattccctgtgtgacacctttcgggaccagagtacctatatctcggccatcagagaacggttccccaagttgctgaggctcgacggccacgagcttccaccccctatcgcattcgacgtcgaagcccctacaaccctccctccttgtaagggtagttatttcggaacagagaacctgaaatcattggtgttgcattttctccaacagtattatgccatctacgactctggggaccgccagggactgctcgacgcttaccatgacggggcatgttgctcattgtctatcccattcatccctcagaaccccgctaggtcatctctggcagagtacttcaaagactcacgcaacgttaagaaactgaaagatcccaccctgaggttccgtctgttgaagcatacacggctgaatgtagtggctttcttgaacgagctgccgaaaacccagcatgatgttaacagtttcgtggtagatattagcgcacagacttccaccctattatgtttcagcgtgaacggcgtctttaaagaggtggacggcaaatcaagggatagcttgcgagcattcacgcgcacatttatcgccgtacccgcttcaaattccgggctgtgcattgtgaatgacgagctttttgtcaggaacgcctccagcgaagagatacagcgcgcttttgccatgcctgcccctacacctagctcgtcccctgtccccacgctgtctccggagcagcaggagatgctccaagccttctctacccagtccggaatgaatttggaatggtcccagaaatgcttgcaggataataattgggactatacaagatcagcccaagcattcactcacctgaaagcgaagggagagatccccgaagtagccttcatgaagtag

SEQ ID NO: 233196 - DNA, 1071 bp, synthetic construct
  misc_feature 1..1071: note = Description of Artificial Sequence: Synthetic coding sequence
  source 1..1071: mol_type = other DNA
atggccgacgagggaaaaagctactctgagcacgatgacgaacgagtcaatttcccgcaaaggaagaagaaagggaggggcccatttcggtggaagtatggcgagggtaatcgtcggagtgggaggggcggaagcgggatccggtcctcccggctggaggaagacgacggggacgtggccatgtctgacgctcaggacggtccaagggttaggtacaatccctacaccacaagacctaacagacgcggtgacacctggcacgatagggacagaatccatgtcactgttaggcgggatcgggctcccccagagaggggcggagcaggcacctcccaagatggcacgtcaaagaattggttcaagattacaattccctatgggaggaaatatgataaagcttggctcctttcgatgatacagagcaagtgctctgtgccttttaccccgatagagtttcactacgagaatacaagggctcagttcttcgtggaagacgcgtcaactgcaagtgccctgaaagctgtaaactataaaatactggatcgtgagaaccgcaggatttccatcatcatcaattcttccgccccaccacataccattctcaacgaattgaagccagagcaagtggagcagctgaagctgatcatgtctaagcgttatgatgggtcacagcaggcactggaccttaagggcttgcgatcagatccagacctcgtagctcaaaatattgacgtcgttttgaacagacgctcttgtatggcagctacactgcgcattattgaggagaatattcccgaactgcttagtctcaatctctcaaataaccgcctgtatagactggatgatatgtctagtatcgttcaaaaagccccaaacctaaaaattttgaacctctctggcaacgaactgaaatccgaacgcgagctcgacaagattaaaggcctcaagctggaagagctgtggcttgacgggaattctctttgcgataccttccgcgatcaatctacatatatacgctccgtggtggcctgcgtctccccgcctggcgacctgcacccgctggggggatag

SEQ ID NO: 233197 - DNA, 1071 bp, synthetic construct
  misc_feature 1..1071: note = Description of Artificial Sequence: Synthetic coding sequence
  source 1..1071: mol_type = other DNA
atggcagatgagggcaaaagctacagtgaacacgatgatgagcgagttaattttcctcaacgcaaaaagaagggcaggggccctttccgttggaaatacggagagggcaacagacgaagcggacgcggaggctctgggatccggtcatctaggcttgaggaagacgacggagacgttgctatgtcagacgcacaggatggacccagggtaaggtacaacccatatactaccagacctaataggcgcggtgacacatggcacgatagagatagaatccacgttactgtgcggagggatagagcgccaccagagagaggaggtgctggcaccagtcaggacggaacctctaaaaattggtttaagatcactattccttacgggagaaagtatgataaagcctggctattatctatgatacagtctaagtgtagcgtgccattcactcctatagagttccactatgagaataccagggcgcaattttttgtggaagatgcatccacggcatccgccctgaaagccgtgaattataagattctcgaccgtgaaaatcggaggataagcatcatcatcaactctagcgcgcctccccatacaatcctcaatgaactcaaacccgaacaggtggagcagctcaaactgatcatgagtaaacgctacgacggatcgcagcaggctctcgatttaaaaggcttgaggagcgatcctgacctcgtcgctcaaaatatcgacgttgttctcaaccggaggtcttgcatggcagctaccctgcgcataatcgaggagaatatccctgaactcctcagcttaaatttatctaataacaggttgtatcggctggacgacatgagttccattgttcaaaaggcccctaacctgaagatcctgaatttgtccgggaatgagctaaaaagtgagcgagaacttgataaaatcaaaggactcaagcttgaggagctctggctcgatggaaacagtctttgcgataccttccgggatcagtctacgtatatcaggtctgtcgtggcgtgtgtctcccctccgggtgatctgcacccgctcgggggttag

SEQ ID NO: 233198 - DNA, 1860 bp, synthetic construct
  misc_feature 1..1860: note = Description of Artificial Sequence: Synthetic coding sequence
  source 1..1860: mol_type = other DNA
atggccgatgaaggaaaatcctacagcgagcacgatgacgagcgtgtcaacttcccccagagaaaaaagaaaggcagaggacccttcagatggaagtacggagagggcaaccggaggtcagggaggggcggatcagggatccgcagttccaggctcgaggaggatgatggtgacgtggctatgtcagatgcacaggatgggccacgtgtgcgttataatccttacacaacacgcccaaaccggaggggcgatacatggcacgatcgggatagaattcacgtcaccgtaaggcgggatagagccccaccggagcgcggaggagcgggtacatcgcaggacggcacatcaaagaattggttcaagataactatcccatacggcaggaagtacgataaggcttggctgctcagcatgatccagtcaaaatgcagtgttcctttcaccccaatcgagtttcattacgagaacaccagagcgcagttttttgtcgaagatgcaagcactgcatcagcactgaaggcagtcaactacaagatcttggatagggaaaataggcggatatccattattattaatagtagtgcccctccccataccatcctgaacgagctgaagcctgagcaggttgaacagcttaaactgattatgagcaagcgatatgatggttcgcagcaggctctggatctaaaaggcttgaggagcgatccagatctggtggcacagaacatcgacgttgtactgaacagaaggagctgcatggctgcgactctcagaataatagaagagaacatcccagagcttctgagcttaaacctaagcaataaccgtctgtatagactggatgatatgtcctcaattgtgcagaaagcaccaaatctcaagatccttaacctctctgggaatgagctcaagtctgagagagaactggacaaaatcaaggggcttaagctggaggagctgtggctggatgggaacagcctgtgcgacaccttccgagaccagtctacatacatttctgccattcgagagcgattcccgaaactgctgagattggatggacatgaacttccaccccctatcgcgtttgatgtagaagctcctacaaccctccccccttgcaagggctcttattttggcaccgagaacttgaagtctctagtgctgcatttcctgcaacaatattatgccatctacgatagtggggaccgtcagggcttactggacgcataccacgatggagcgtgctgttcacttagcatcccttttataccccagaatccagcccgatcctcacttgctgagtattttaaggattcaaggaatgtaaaaaaactgaaggacccgaccctgcgattcaggctgttaaagcacacgcgcttaaatgtggttgcgtttttaaacgagcttcctaaaacgcagcacgacgttaatagctttgtggtcgacatctctgcccaaacttccacgttgctgtgcttttcagtgaacggcgtctttaaggaagtagacggcaagtccagagattcccttcgggctttcacccgcacctttatagccgtccccgcttctaacagcggactctgtatagtgaacgatgagctgttcgtaagaaatgcaagcagcgaggagatacagcgggcattcgccatgcctgccccaacaccaagtagtagtcccgtgcccaccctttcccccgagcagcaggagatgctccaggccttctctacacaatccgggatgaatcttgaatggagtcagaaatgcctgcaggacaacaattgggactacacacgttctgcccaggcctttacacatctaaaggctaagggcgagatccctgaggtcgccttcatgaaatag

SEQ ID NO: 233199 - DNA, 1881 bp, synthetic construct
  misc_feature 1..1881: note = Description of Artificial Sequence: Synthetic coding sequence
  source 1..1881: mol_type = other DNA
atgtgtagcactcttaaaaaatgcgggacctatcgcaccgaggtagctgagtgtcacgatcatggttcgacgtttcagggccgaaaaaaaggcggaagctctttccgcgacaacttcgacaagaggtcttgtcattacgagcacggcggatacgagcggccaccatcccactgtcaggagaatgatggctcagtcgagatgagggacgtgcacaaagatcagcagctcaggcacaccccctactctatcagatgcgaacgcaggatgaaatggcactcggaggacgaaataagaattactacctggcggaatcggaaacctcctgagcggaagatgtcccagaacactcaggatggatatactagaaactggtttaaggtgactattccctacgggattaaatatgacaaggcatggctgatgaactctattcagagtcattgctccgaccgcttcacacccgtggacttccactacgtgaggaacagagcgtgcttcttcgtgcaggacgcttcggccgctagcgccctcaaagacgtgtcgtataagatctacgacgacgagaatcagaagatctgtattttcgtgaaccacagcacggcaccctatagcgttaaaaataaactcaagccaggacagatggagatgctgaagctcactatgaacaagagatacaacgtatcccaacaggccctggaccttcagaatctgcgctttgatccagacctaatgggaagagatattgacataattctcaaccgtcgaaattgtatggctgccactctgaagatcatagagcgtaattttcccgaactgctgtcccttaacctgtgtaataacaaactgtaccagctggacgggctctccgatataacagagaaagcccctaaagtaaagacattgaacctgagcaagaataagttggagtccgcttgggagctcggcaaagttaaagggttgaagttagaagaattgtggctggaaggcaatcccttgtgctctaccttcagtgatcagagtgcatacgtatcagcaatcagggactgctttccaaaattgcttcgactggacggaagagagctcagcgctccagttatcgtggatatcgattcaagcgaaacaatgaagccctgcaaggagaattttacaggcagtgaaacgctgaaacaccttgtcctgcagtttctgcaacaatactacagcatttacgatagcggagatcgccagggcctgcttggagcctaccacgacgaggcctgcttctcactcgcgatcccattcgacccgaaggactcggcaccgtcctccctgtgtaaatactttgaggatagccgaaacatgaagaccttgaaagatccatacctgaagggggagctcctacggcgaactaaacgggacatcgtggattccctcagtgccctgcctaaaactcagcatgacctgtcatctattctggtggacgtttggtgccagacagagcgcatgctgtgtttctccgtgaacggtgtgttcaaggaagtcgaaggacagagccagggttcagtgttggcattcacccgcaccttcatcgctacccctgggagttcctcttcactgtgcattgtgaatgatgagcttttcgtgcgagacgcttctccccaggaaacccagagcgcttttagcattcccgtgagcacactgtcgtcctccagtgagccaagtctcagtcaggagcagcaggaaatggtccaggccttttccgcacagtcaggcatgaaactagagtggtcccaaaaatgtcttcaagataatgagtggaactataccagggccggtcaagccttcacaatgctgcagaccgaaggaaagatacctgcagaggctttcaagcagatatcctag

SEQ ID NO: 233200 - DNA, 1881 bp, synthetic construct
  misc_feature 1..1881: note = Description of Artificial Sequence: Synthetic coding sequence
  source 1..1881: mol_type = other DNA
atgtgctccacgctgaaaaaatgtggtacctataggaccgaagtggcagagtgccacgatcacggaagcaccttccagggcaggaaaaagggaggatcctctttccgcgataattttgacaaaaggagttgtcactatgaacatggagggtacgagcgcccaccgagccactgtcaggagaatgacggatccgtggagatgcgtgacgtgcataaagatcagcaacttcggcatacaccttacagcatcaggtgtgagcgaaggatgaagtggcattccgaagacgaaatccgtattactacgtggcggaatcggaaaccgccagaacggaaaatgagccagaatacccaagacggctacacgagaaactggttcaaggtcactataccatatgggataaagtacgataaagcctggctgatgaatagtatccagtctcactgttcagaccgattcacccctgttgatttccattacgtccgaaaccgagcatgcttttttgtccaggacgcaagtgctgctagcgcacttaaagacgttagctataaaatttacgatgacgagaaccagaagatctgcatttttgtgaaccactccaccgctccctactctgtcaagaacaagctgaaaccaggccaaatggaaatgttgaaactcacgatgaacaagagatataatgtctcacaacaggcgttagatttacagaatctgaggtttgacccagatttgatgggacgggatattgacatcattctcaaccgacgcaactgcatggctgctacacttaagatcatcgagcgcaactttcctgagctcctatcattgaacctgtgcaataataaactctatcagttagatgggctgtcggatattacggaaaaggcacctaaggtcaagactttgaacctgagcaaaaataagctcgagtccgcctgggagcttgggaaggttaaaggactgaaactggaagagttgtggttggaaggaaatcctctgtgcagcacattcagcgatcagtccgcttacgttagcgccatccgagattgttttcctaagcttctgagactggacggcagggagctctccgcacctgtcattgtggacatcgatagctccgagactatgaagccctgtaaggaaaactttactggttcagagaccttaaaacacctcgtgctacagttcctgcagcagtactacagcatttacgacagcggcgacaggcagggcctccttggcgcttatcacgacgaagcttgtttctcactggcgattcctttcgaccccaaagacagcgccccaagcagtttgtgcaagtattttgaggacagtcggaatatgaagacacttaaagacccctatttaaaaggtgaattgctgagaagaactaaacgggatattgtggattcactttcggccctcccgaaaactcagcacgacttgtcatcaatactcgtggacgtctggtgccaaacagagaggatgctgtgcttttccgtgaacggagtgtttaaggaggtcgaggggcaatctcagggaagtgtgttagcctttactaggacctttatcgccacgcctggaagctcgagcagtctctgcattgtcaatgacgagttgttcgtacgggatgcatccccccaagagacacagagcgccttcagcatccccgtgagtaccctctccagttccagcgaaccaagtttgtctcaggaacagcaggagatggtgcaggcattttctgcacagtccgggatgaaattagaatggtcccagaagtgtctacaggataatgagtggaattatacaagggctggccaggcattcacaatgcttcagacggaggggaagattccagcagaggccttcaaacagatatcctag

SEQ ID NO: 233201 - DNA, 1881 bp, synthetic construct
  misc_feature 1..1881: note = Description of Artificial Sequence: Synthetic coding sequence
  source 1..1881: mol_type = other DNA
atgtgcagcaccctaaaaaaatgtggcacctaccggacagaagtcgccgagtgccacgaccacgggagcactttccagggaaggaagaagggcggtagcagctttagagacaatttcgacaaacgcagctgtcattacgagcacggcggatacgaaagacccccttctcactgtcaggagaatgatggatctgtagagatgcgggatgtgcataaggaccaacagctccgacacaccccttacagcatccgctgcgaacgaagaatgaaatggcacagtgaggatgaaattcgcatcactacatggaggaacaggaaaccacccgagaggaaaatgtctcaaaacacgcaggatggctatacccggaattggttcaaggtcacaataccctatggaatcaaatatgacaaggcatggctcatgaactctatccagagtcattgttccgacagattcacgcccgtagacttccattacgtgagaaatagggcgtgcttctttgtgcaggatgccagcgctgctagcgcgctgaaagacgtcagttacaaaatctatgatgatgaaaatcaaaagatctgtatctttgtgaatcattctacagccccatacagtgtcaagaacaaactgaagcccggtcagatggagatgttgaaacttacgatgaacaaaagatataacgtcagccagcaggccctggacctccaaaatctgaggttcgatccagatctgatgggcagggatattgatataatcctgaataggagaaattgtatggccgctacattaaagattatcgagagaaacttccctgaactcctcagcctaaatctctgcaataataagctttaccaactcgacggcttgagtgacatcaccgagaaggctccaaaagtaaagactcttaacctttcaaaaaacaaactcgaatccgcttgggagctgggaaaggtgaagggactcaaactggaggagctgtggttggagggcaaccccttgtgctccactttttcagatcagagcgcctacgtgtccgccatcagggattgctttcccaaactgttacgacttgacggaagggaactatcagctcctgttattgtggacatagatagctccgagaccatgaagccctgtaaggagaatttcacagggtcagaaactctcaagcacctcgtactgcagttcctacagcagtattactccatctacgattccggcgataggcagggactactcggcgcatatcacgacgaggcttgcttctcattggccattccttttgaccctaaggatagtgctccaagcagtctctgtaagtacttcgaggactcgcgaaatatgaagaccctaaaagatccttacttgaagggtgagctgttaagacgtacaaagcgagacatcgttgactctctgtctgcactgcccaagacccagcacgacttgtcttccatcctcgtggatgtatggtgtcagacagagcggatgctgtgcttctcagttaatggcgtatttaaggaggtagagggccagtctcaggggtctgtcttggcgttcacacgaacctttattgccacccccggtagttcttcgtcgctctgcatcgtcaacgatgaactgttcgtccgcgacgcaagcccccaggagactcagtccgcctttagcatacccgtgtccacactttccagctccagcgaaccatcactgagccaggaacagcaagagatggtgcaggcatttagtgcacagtccggcatgaagctcgagtggtcacagaaatgcctgcaggacaatgagtggaattatacaagggccggacaggcctttaccatgctccagaccgaaggaaagatacctgctgaagcattcaagcagatatcctag

SEQ ID NO: 233202 - DNA, 1230 bp, synthetic construct
  misc_feature 1..1230: note = Description of Artificial Sequence: Synthetic coding sequence
  source 1..1230: mol_type = other DNA
atgaaatggcattccgaggatgagattcgcattactacgtggaggaatcgaaaaccaccagagaggaagatgagtcagaacactcaagacggatacacccgtaactggtttaaggtcaccatcccctacggcatcaagtacgacaaagcttggctcatgaacagtattcaatcacactgttccgaccggtttacacctgtggattttcactatgtcagaaacagagcgtgctttttcgtgcaagacgcgtccgccgcttctgctttaaaagatgtgtcctataagatatatgacgacgagaaccaaaagatttgtattttcgttaaccactccacggctccctactccgtgaaaaataaactcaagcccggtcagatggagatgctgaagctgacgatgaataagaggtataatgtcagtcagcaggctttggacttgcaaaatctgcgtttcgatccagatttgatgggcagagatatcgacatcatccttaaccggcgaaattgtatggctgctacacttaagattattgaaagaaactttccagaactactgtcgctcaatctgtgcaacaataagttgtaccagctggacgggctgtctgacatcactgaaaaagcccctaaggtaaaaacactgaacctctctaagaacaaactggagtccgcctgggaactgggtaaggtgaagggcctgaaattggaggagctctggttggaggggaaccccctgtgtagcacatttagcgatcaaagcgcctatgtctccgcaattagagattgttttcctaaactcctgagacttgacggcagagaattgtcagcaccagtgattgtcgacattgattctagcgagactatgaaaccctgcaaggagaattttacgggttctgagacgctgaagcatctggtgctccagttcttgcagcaatattacagtatttatgactcaggtgaccgtcaggggctgctcggagcctaccacgacgaggcctgtttctcactggccattccttttgaccccaaggactcagcaccttcctccctctgcaaatatttcgaggattctcgaaacatgaaaacgctcaaagatccgtatctcaagggggagctgctgagacgcaccaaacgcgatatcgttgattctttatccgccttgccaaagacccagcatgatctcagctctattttggtggacgtctggtgccagactgttcccagtggacaatag

SEQ ID NO: 233203 - DNA, 1881 bp, synthetic construct
  misc_feature 1..1881: note = Description of Artificial Sequence: Synthetic coding sequence
  source 1..1881: mol_type = other DNA
atgtgctccacgcttaagaagtgcggaacatacagaacagaagtggctgaatgtcacgatcatggcagcacctttcaaggaaggaagaagggtggcagcagctttcgcgataacttcgacaaaaggagctgccactatgagcacggtggctatgagcgcccacctagccactgtcaagaaaatgatgggtctgtcgaaatgcgcgacgttcataaggatcagcagctgcggcacacaccttactctatacggtgtgaaagacgaatgaaatggcattcagaggatgaaatcaggataacaacatggaggaaccgcaagcccccagaaagaaagatgtctcagaatacacaggacggatatacacgtaactggttcaaggtcaccataccttacggcatcaagtatgacaaggcttggctcatgaattctatccagtctcattgttccgatcggttcactcccgtggatttccattacgttagaaacagagcgtgcttctttgtccaggacgcatccgccgctagcgccctgaaggatgtgagctataaaatttatgatgatgaaaaccagaagatttgtatctttgtgaaccatagtaccgctccttactcagtgaagaataagttgaaaccgggacagatggagatgctgaaacttaccatgaataagagatataacgtgtcccaacaggctctcgacctccaaaacctccggttcgatccggatctgatgggcagagatattgatataattttgaacaggagaaactgcatggcagcaaccctcaagatcattgagcgaaatttccccgagctgctgagtttgaacctgtgtaataacaagctctatcagcttgacggcctgtcagacatcaccgagaaagctcctaaggtgaagacactgaaccttagtaagaataaacttgagtctgcctgggagctgggcaaggtcaagggcctcaaacttgaggagctctggctcgaaggtaatcccctctgtagtactttcagcgatcagagcgcgtacgtgtctgctatccgagactgcttccccaagctcctgcgcttggacgggagggagctcagcgctccagttatcgtcgacatcgatagctctgagaccatgaaaccttgtaaagaaaattttacgggctcagaaactctcaaacacctggtcttgcagtttctgcagcagtactactcgatttacgatagcggtgatcgtcaaggactgctgggcgcttatcacgacgaagcatgtttctccctggccatcccctttgatcccaaggattccgcccctagctctctttgtaagtattttgaggacagtcggaacatgaagactctgaaagatccctatctcaaaggagagttgctacgcaggactaagcgtgacatcgtcgattcacttagcgccctgcccaagactcagcacgacctgtctagcatccttgttgacgtttggtgccagacagaaagaatgctgtgtttcagtgtaaatggcgttttcaaggaagtggagggccaatctcagggttccgtcctcgcttttacacggactttcatcgcaactcctggctcctcaagctcactttgcattgtcaatgacgagctgttcgtccgcgatgcctccccacaggaaacccagagcgccttttccattccggtcagcaccttgagctcatctagtgagccctcactctcccaggagcagcaggaaatggtccaggcattcagcgcccagtccggcatgaaactcgaatggtcacagaagtgtctgcaggataatgagtggaactacactagagccggtcaagcctttaccatgctccagacagagggcaagatcccagcggaggcttttaaacagattagctag

SEQ ID NO: 233204 - DNA, 1596 bp, synthetic construct
  misc_feature 1..1596: note = Description of Artificial Sequence: Synthetic coding sequence
  source 1..1596: mol_type = other DNA
atgtctctcccttcaggccataccaccggacatactgatcaggtcgtgcagaggcgcgcacgctgctgggatatctatcaacgtaggttctcttcccgatccgaacccgtcaaccccggaatgcactccagctcccaccaacaacaggatggagacgccgctatgcacggagcccacatggattctcctgtccggtacaccccttataccatctctccttacaataggaagggctcgttccggaagcaggatcagactcatgtaaacatggagagagagcagaaacctccagagcggcgaatggagggcaatatgcctgatgggaccctggggtcatggttcaagataaccgtaccgttcggcatcaaatacaacgagaagtggctcttaaaccttatccagaacgagtgctctgtgccctttgtgccggtcgaatttcattacgagaacatgcacgcatccttttttgtcgagaatgcctccatcgcctacgccctcaagaatgtatcaggtaagatatgggatgaggacaacgagaaaattagcatctttgttaatcctgccggaattccacatttcgtccatagggagctgaagagcgaaaaagtggagcagattaaattggccatgaaccagcagtgtgacgtatctcaggaagctcttgacatccagaggttacccttttaccccgatatggttaaccgagacacaaaaatggcgagcaaccctaggaaatgcatggccgcatcactcgacgtccatgaggagaacattcctactgttatgagcgccggtgagatggacaagtggaaaggcatcgaacctggcgagaaatgtgctgaccgatccccagtttgtaccaccttcagcgatacctccagtaatattaatagcatattagagctgtttcctaagctgttgtgtttggacggccagcagagcccaagagccactctttgtggaaccgaagcccataaaagattacccacctgtaagggttcgtttttcggaagcgaaatgctgaagaatctggtcctccagtttctgcagcagtattatttgatctacgactcgggcgatcggcagggactgttgagcgcataccatgacgaggcttgcttttcactgtctattccttttaatcctgaagatagcgcccctagctctttctgtaagttcttcaaagacagtcggaacattaagattcttaaggatccctatctccggggagagctcctgaagcataccaagttggacattgttgatagtctgtcggcactcccaaaaactcagcacgacctttcatcttttttggtggacatgtggtatcagaccgaatggatgctttgtttttcagtgaatggcgtgttcaaggaagtagaagggcagagtcagggctccgttctggcgtttacccggaccttcattgcaacccccggtagctcttctagtctctgtatcgttaatgacaaactctttgtgcgcgacacctcacaccaaggcactcagtctgccctgttcacacttgtgccaaccgctttttccagtagtgtgcccgcattctcccaagaacaacagaaaatgttgccatcatag

SEQ ID NO: 233205 - DNA, 702 bp, synthetic construct
  misc_feature 1..702: note = Description of Artificial Sequence: Synthetic coding sequence
  source 1..702: mol_type = other DNA
atggaacgcgaacagaagccaccggagcggcgaatggaagggaacatgcccgacgggacgctggggagttggttcaagattaccgtaccattcggtattaaatacaatgagaagtggctcctcaacttaatacagaacgaatgttccgtgccttttgtgccagttgaatttcactatgaaaacatgcatgcctctttttttgtggagaatgcttcaattgcctacgcgctgaagaatgtgagcggcaaaatttgggatgaggacaacgaaaaaatttccatcttcgtaaaccctgccggaattccacattttgtccatagggagttgaaatcggaaaaggtcgaacagatcaagctcgctatgaaccaacaatgcgatgtgtcacaagaggctttggacatccagcgtctgcccttctaccctgatatggtaaatagagatacaaaaatggcttctaatcccaggaaatgcatggctgccagcctagatgtgcatgaggagaacatccccacagtgatgtctgcaggagagatggacaagtggaaaggcattgagcctggcgagaagtgcgccgaccgctcccccgtgtgcaccacttttagcgatacatctagtaatattaaatctgtggtgcccagcgtgactacctgggatcccgacctgtgcttgattgccccattttgtcggcgtcggcaacattag

SEQ ID NO: 233206 - DNA, 612 bp, synthetic construct
  misc_feature 1..612: note = Description of Artificial Sequence: Synthetic coding sequence
  source 1..612: mol_type = other DNA
atggcgtcttcccatccagaacagctatacgtggttctcaaacccactcgcggttaccagcccgtgcggtattacctaatctatgatagcggagacaggcaaggtcttctttccgcgtaccatgatgaagcctgcttttccctaagcatcccattcaatccagaagactcggcaccctcttcattctgtaagttctttaaggatagcagaaatatcaaaatattgaaagatccttatctccgaggggagctgttgaagcataccaagctggacattgtagacagtctgagtgcacttcccaaaacccagcatgacttgagttcattcctggtagatatgtggtaccagactgaatggatgctctgcttcagcgtgaacggtgtttttaaagaggtcgagggtcagagccaggggtctgtgctggccttcactcggacttttattgccactccagggtctagctccagtttgtgtatcgtgaacgacaagctgttcgtcagggatacctcgcatcaagggacccagagtgcccttttcactctggtcccaacggccttcagctcgtccgtgccagccttcagccaggaacagcagaagatgctgccctcgtag

SEQ ID NO: 233207 - DNA, 1086 bp, synthetic construct
  misc_feature 1..1086: note = Description of Artificial Sequence: Synthetic coding sequence
  source 1..1086: mol_type = other DNA
tgaaacgagaagtggctacttaacctgatccagaatgaatgcagcgtgccctttgtgccggtcgaattccactatgagaatatgcacgcaagcttcttcgttgagaatgcgagcatcgcctatgcactgaagaacgtgagcggaaaaatttgggacgaggataatgagaaaatctctatctttgtgaatccagccggaattccgcattttgtgcacagagaactgaagagtgagaaggtcgaacaaattaaactggcaatgaaccagcagtgtgatgttagtcaggaagctttagatatacagaggctccccttttatcctgatatggtcaacagagacacaaagatggcaagtaatcctagaaagtgtatggccgcatcccttgacgtacacgaagagaatatacccaccgtgatgagcgctggcgagatggacaagtggaaaggcatcgaacctggggagaaatgcgctgacaggagtcctgtctgtacaactttcagtgacacaagctcaaatattaatagcattctggaattgttcccgaaactgctatgtctcgatggccagcagagccccagggcaacattgtgcggcacggaagctcataaaagactgcctacatgcaaggggagcttttttgggagtgagatgcttaagaatctggtcctccagttcttgcagcagtattatttgatatatgacagcggcgatcgccaaggcctcctcagcgcttaccacgatgaagcttgttttagcctgtctattccttttaacccggaggactccgcgccatcttctttctgcaagtttttcaaagattccaggaacataaagatccttaaggacccctacctgcgcggagaattacttaagcacaccaaattggatattgtcgattctctgagtgccctcccgaagacgcagcacgacctttcttcgttcttggtagacatgtggtatcagacagagtggatgctgtgcttcagcgtcaacggagtttttaaggaagttagtggattttgcagcaggctgcatccggacctccactgctacccatggcagcagttccagagcgtgcacagatag

SEQ ID NO: 233208 - DNA, 1194 bp, synthetic construct
  misc_feature 1..1194: note = Description of Artificial Sequence: Synthetic coding sequence
  source 1..1194: mol_type = other DNA
atgcgccgaaacacacaggacgagaatatgagaaaatggttcaaagtcactattccttacggcatcaaatacgataaagcgtggcttatgaatagcatacaaagcaactgtagcgtaccctttacccccgttgactttcactacatcaggaaccgggcttgttttttcgtgcaagtggcctccgccgcttccgccctgaaggacgttagttataagatctacgatgacgaaaaccagaagatctgtatctttgttagtcacttcacagccccttatagcgtcaagaataagctgaagcccggacaaatggaaatgctaaagctcaccatgaacaagcggtacaacgtctcacagcaggccctggacctccagaacctgcgctttgatcctgaccttatggggagggacatcgatatcatccttaataggcgaaactgcatggccgcaactttgaaaatcactgagagaaactttcctgaactgcttagcctgaatctgtgtaataacaagctgtatcagttggacggtctctctgacatcacagaaaaggcccctaaagtcaagacccttaacctgtctaagaacaaattggagagtgcctgggagctgggaaaagtgaagggcttgaagcttgaggagttatggctggaaggaaacccgctctgctcaactttttccgatcagtcagcctacgtgagtgccatccgagactgttttccaaaactgttgcggttagatggcagagagctgagcgccccagttatcgttgatattgactctagcgagaccatgaaaccttgcaaggaaaactttaccggaagtgagactctcaagcacctggttttgcaatttcttcagcagagtaatctgtgtaagtactttaaggatagccgtaacataaagattctcaaagatccatacctacagcgcaaactgttgaagcatactaagtgcccaagaaacgtcgactccttatcagcactgccagaaacccagcacgacttcacatcaatcttggttgacatgtggtaccagactgtgaacacgtgcttcttgcctagagccggacccgagtctcagaggtggtggtgcctgctatcgctgaaatggaaagacggattgagagttttgatcctgccctcctgcggcccatcttcgctacctttggcagcaatcccagtgtgcgctagctag

SEQ ID NO: 233209 - DNA, 1194 bp, synthetic construct
  misc_feature 1..1194: note = Description of Artificial Sequence: Synthetic coding sequence
  source 1..1194: mol_type = other DNA
atgcgaaggaacacccaggatgaaaatatgagaaagtggttcaaagtgaccatcccatatggcatcaagtacgataaagcatggctaatgaattcgattcagtcaaattgtagcgtgccatttaccccagtggatttccactatattaggaatagagcctgtttttttgtccaggtggcctcagctgcttcagccctcaaggatgtgagttacaaaatttacgacgacgaaaaccagaagatctgcatctttgtttcccacttcacagctccgtactccgtgaagaataagctgaaaccaggacagatggagatgttaaagctcaccatgaataaaagatataacgtgagccaacaggccctcgatttacagaacttgagatttgaccccgatctgatgggcagagacatcgatatcatactcaaccgcagaaattgtatggccgctaccctgaagatcacggaaagaaattttcccgaattgctgagcctcaatctgtgcaacaataagctttaccaactggacgggctgtcagacattacggagaaagctcccaaagtcaaaactctgaatttaagcaagaataagctggaatcagcatgggaactcggaaaggttaaggggctgaagctggaggagctttggctggaagggaatcctctttgttcaaccttttccgaccagtctgcttatgtttcggctattagggattgtttcccaaagctgctcagactcgatggtcgcgaactgagcgcccctgtcatagtggatatcgattcgtctgaaacaatgaaaccttgcaaagagaattttacaggcagcgagaccctcaagcatctggtactgcaattcttgcagcaaagcaacctgtgcaaatattttaaagacagccggaatataaaaattctgaaagacccttatctgcagcggaagttgctcaagcacaccaagtgcccaaggaatgtggattctctgagcgccctgcccgaaacacagcacgattttacatctatcttagttgacatgtggtaccaaacagtcaatacttgttttctgccgcgtgctgggcctgaatcccaacgatggtggtgtctgcttagcctgaagtggaaggatggcttacgcgtgctgatcctgccaagctgcggccctagcagcctgccactggcagctattcccgtatgtgcctcctag

SEQ ID NO: 233210 - DNA, 1098 bp, synthetic construct
  misc_feature 1..1098: note = Description of Artificial Sequence: Synthetic coding sequence
  source 1..1098: mol_type = other DNA
atgcgtcgaaatacacaggacgagaatatgcgaaagtggttcaaggtgactattccctacggcatcaaatatgacaaggcctggctgatgaatagcatacagtcgaattgttctgtccccttcactccagtggatttccactatattcgcaacagagcgtgtttcttcgtccaggtggcctcggcggcttccgccctcaaagacgtatcatataagatctacgatgatgagaatcaaaagatatgcatatttgtgtcgcacttcactgccccatactctgtgaaaaacaagctgaagcctgggcaaatggagatgcttaagttaacaatgaataagcgatacaacgtttctcaacaagctcttgaccttcagaaccttcgcttcgacccagacctcatgggccgtgatatcgacatcatcctgaatcgacggaactgtatggctgcaactctgaagattaccgagaggaacttccctgagctgctgtctcttaatctctgtaacaacaaactgtatcagctcgacggactttctgatatcacagaaaaggcaccaaaagtaaagacactaaacctgagcaagaacaaactagagtctgcatgggagctgggcaaagtcaagggcctcaagttggaagaactctggctcgagggcaaccctctgtgttcaacattcagcgatcagtccgcatatgtatccgcgatacgagactgcttcccaaaactgcttaggttggacggcagagagctttctgcgcctgtaatagtcgacattgattctagcgaaacaatgaaaccctgcaaggagaactttacgggttcagagaccctcaaacatctggttctccagttcctgcagcagtccaacttgtgtaagtactttaaggactccagaaatattaagatactgaaagatccctacctgcaaagaaagctgctgaagcacacaaaatgccctagaaatgtcgactccctgtctgccctgcccgagactcagcacgactttacctctattcttgtggatatgtggtaccagacggtcaacacatgtttcctgcccagggccggtcctgaatctcagtccctgcgcccactgtag

SEQ ID NO: 233211 - DNA, 1098 bp, synthetic construct
  misc_feature 1..1098: note = Description of Artificial Sequence: Synthetic coding sequence
  source 1..1098: mol_type = other DNA
atgagacgaaacacccaggatgagaatatgcgcaaatggttcaaggtcactatcccatatggcatcaagtatgataaagcatggttgatgaatagtatccaatctaattgtagtgtcccgtttaccccagtggatttccactatattaggaaccgggcttgttttttcgtgcaagtcgcatctgctgcttccgctctgaaagacgtttcctataagatctatgacgacgagaatcagaagatctgtatttttgtgagtcacttcaccgcaccttactccgtgaagaataagctaaagcccggacagatggagatgcttaagctcacaatgaataaacgctacaacgttagtcaacaggccttggacctgcagaacttgagatttgacccggacttgatgggtcgtgatattgatatcatcctgaacaggcgcaactgtatggccgctacactgaaaattacggagcgcaacttccccgaactccttagcctgaatctgtgcaataataaactgtaccagcttgatggtttgagcgacatcacagagaaggcaccgaaggtgaagactcttaacctatcaaaaaataaactcgaatcagcctgggaactaggcaaagtaaaggggctgaagcttgaggagctctggctcgaaggaaacccgttgtgttcaacgtttagcgaccagagcgcttacgtgtcagcaattcgggattgttttcccaaattgctgcggctcgatggacgggagctgagtgcacctgtgatcgtggatatcgatagcagcgagactatgaaaccatgtaaggaaaatttcaccggcagtgagactctgaaacatcttgtccttcagttcttacagcaaagcaatctgtgcaaatattttaaggatagcagaaatattaagatattgaaggacccctatctgcaacgcaaactgctcaagcacaccaagtgtcctcgaaatgtggattccttgagtgccctgccggagacccagcacgatttcacctctattctagtggacatgtggtaccagacagtgaacacatgttttctgccaagggccggaccggagtcacagtctctccgacctctgtag

SEQ ID NO: 233212 - DNA, 1044 bp, synthetic construct
  misc_feature 1..1044: note = Description of Artificial Sequence: Synthetic coding sequence
  source 1..1044: mol_type = other DNA
atggagcagtacacagcaaactccaactcctccacagaacaaattgtggtccaagccggacagatccaacagcagcagcagggtggagtgacggctgtgcagcttcagacagaggcccaggtggctagcgcctcaggacaacaggtgcagaccctgcaggtcgtgcaagggcagccactcatggtgcaggttagtggcggacagctgattacctctaccggacagccaatcatggtgcaggctgtgcctggcggacagggccagaccatcatgcaggtgccagtttccggtacccaagggctgcagcagattcagctggtgccaccagggcagatccagatacagggaggccaggctgtgcaagtgcagggacagcagggccagacccagcagattatcatccaacagccacagaccgcagtgaccgcaggacagactcagacacagcagcagatagcagtacagggtcaacaagtcgcccagacggcggagggccagacaatcgtttaccagccagtgaacgccgatggcactatcttacagcaggtgacagttccggtgtcaggcatgatcaccatacctgctgcgtcactggcaggtgcacagatcgtgcaaaccggcgctaatacaaatacaacctcctctggccaaggcaccgtaaccgtgactctgcctgtggcagggaacgtcgtcaattctgggggtatggttatgatggtgcctggagctggatccgtgccagccatccaacggatccccctaccaggggctgagatgctggaggaggagcccctgtacgtgaacgctaagcaataccacaggatcctcaagagaagacaggcccgagcgaagcttgaagccgagggcaagatccccaaggaacgcagaaagtacctccacgaaagtagacaccgtcatgccatggccagaaagaggggagagggaggtcgatttttcagtccaaaggaaaaggacagccctcacatgcaggatcctaatcaagccgacgaagaagcaatgactcagatcattcgggtctcttag

SEQ ID NO: 233213 - DNA, 957 bp, synthetic construct
  misc_feature 1..957: note = Description of Artificial Sequence: Synthetic coding sequence
  source 1..957: mol_type = other DNA
atggaacagtatacagccaattctaattcaagcacggagcagattgtggtgcaggcaggtcaaatccagcagcaggtccaaggtcagccgttgatggtgcaagtgtctggcggacaactcatcacttccacaggacagcctatcatggtccaggctgtgcccggaggacaggggcagaccattatgcaggtgcctgtgtcaggaactcagggcctacagcaaatccagcttgtgccccctggacaaattcagatccaggggggtcaggcagtccaggtacaggggcagcagggccaaacccaacagatcatcatccagcagcctcagactgccgtcactgcgggtcagacacaaacccagcagcagattgccgtgcagggacagcaggtcgcccagactgcagagggccagaccatcgtataccagcctgtgaacgcagacggtacaatccttcagcaggtgaccgtccccgtgagcggtatgatcactatccccgctgcttcccttgccggtgcccagattgtgcaaacgggcgctaacaccaacacaactagttccggtcagggcactgtgaccgtgaccctccccgtcgcaggaaatgttgtgaattcgggtgggatggtgatgatggtgcctggcgctgggtctgtgcctgccatacagaggatacctctcccgggtgccgaaatgctagaggaggagcccttatatgtgaatgccaaacaataccatcggattctcaagcgcagacaagcccgagcaaaactcgaggcagagggcaagattcccaaggagcgcaggaagtatttgcacgagtcaaggcacaggcacgctatggctaggaagagaggcgaggggggacgctttttcagccccaaggagaaagatagtccccacatgcaggatccgaatcaagcagacgaggaggcgatgacacagatcatcagagtgagttag

SEQ ID NO: 233214 - DNA, 624 bp, synthetic construct
  misc_feature 1..624: note = Description of Artificial Sequence: Synthetic coding sequence
  source 1..624: mol_type = other DNA
atgacaatggacggtgattccagcaccacggacgccagccaactggggattagtgctgactatatcggcggttcccactacgtcattcaacctcacgacgacacagaggactccatgaatgatcacgaggataccaacggctccaaggaatctttcagggagcaagacatctacctccctattgcgaatgtcgctcggataatgaaaaacgcgattccccagactggaaagatcgcgaaggacgccaaagaatgcgtgcaggaatgcgtgtcggagtttattagcttcatcacaagcgaggctagtgagcgttgtcaccaggagaaacgaaagacaatcaatggtgaggacatactgtttgcgatgtccactcttggttttgacagttacgtcgaacccctcaagctctacctccaaaagttccgagaagccatgaagggggagaaagggatagggggtgcagtgactgctactgatggcctatccgaggagctcacagaggaagcatttacgaatcagctgcccgctggcctgattaccactgacgggcagcagcaaaacgtgatggtatatactacctcctaccagcagatctctggcgtgcagcaaatccagttcagttag

SEQ ID NO: 233215 - DNA, 624 bp, synthetic construct
  misc_feature 1..624: note = Description of Artificial Sequence: Synthetic coding sequence
  source 1..624: mol_type = other DNA
atgacaatggatggcgactctagtacaacagatgcctcccagttaggcatcagcgctgattacatcggaggatcccactacgtgatccagccccacgacgacacagaagactcaatgaacgaccacgaggacactaatggaagcaaagaaagctttcgtgagcaagatatatacctccctatagcaaatgtggctcgcataatgaagaatgctattccccagacagggaagatcgctaaggatgccaaagaatgtgtacaggaatgcgtgtctgagttcatctccttcattacaagcgaagcaagcgaacgctgccaccaagaaaaacgaaaaaccatcaacggagaagacatcctgttcgcaatgtctactctaggatttgatagttacgttgagccactcaaactgtatctccagaaattccgcgaggccatgaaaggggaaaaggggataggcggtgcagtgaccgctacagatggcctatccgaagaactgaccgaggaagccttcactaaccagctgccagctggactcatcacaacggacggacagcagcaaaacgttatggtttacaccaccagctaccagcagatttccggtgtacagcagattcagttttcttag

SEQ ID NO: 233216 - DNA, 1377 bp, synthetic construct
  misc_feature 1..1377: note = Description of Artificial Sequence: Synthetic coding sequence
  source 1..1377: mol_type = other DNA
atgtctacagagggtgggtttggcggaacttcatcttctgacgcccagcagtccctgcagtctttctggccaagggtgatggaagagattaggaacttaactgttaaggatttcagagttcaggaactgcctctggccaggatcaagaagattatgaagctcgacgaagacgtaaaaatgatttcggccgaggcccctgtcctgtttgccaaagccgcacaaattttcatcaccgaacttacactgcgcgcatggattcataccgaggataataaaaggagaaccctccagcggaacgacatcgctatggccatcaccaaattcgaccagtttgacttcctaatagatatcgtgccacgcgacgaattaaagcctcccaaacggcaagaggaagtgagacagtcagtgaccccggctgaacccgtgcagtattacttcactctggcccagcagcctacggccgttcaggtgcaggggcaacagcagggacagcaaaccacttcctctacaaccaccattcaaccaggacaaatcataatagcccagcctcagcagggccagaccaccccggtgacaatgcaggtaggtgaaggtcagcaggttcagatcgtgcaggcacagccccaaggtcaggcccagcaggcgcagagcggcaccggccagactatgcaagtgatgcagcagatcatcaccaataccggagagatccagcagatccccgtgcagttaaacgctgggcagctgcagtatatccggttggcccagcccgtttctggtacccaggttgtgcagggccagatccagactcttgcaaccaacgctcagcagggacagcggaatgcaagccagggcaagcctcgcagatgtctcaaagaaacgcttcagattacccagacagaggtgcagcaggggcaacaacagttttctcagttcactgacggacagcgcaactcagtccagcaagcgagggtgagtgagcttacgggcgaagctgaacctcgagaagtcaaggccacaggaaactccacgccatgtacaagcagccttcctacaacgcatcctccttctcatcgggcaggcgcttcgtgcgtgtgttgtagccaaccccagcagtcctcaaccagccctccaccttctgacgcattgcaatgggtggtggttgaggtgagcgggacccccaatcagctcgagacgcatcgggagttacacgcgcctctcccaggtatgacctcactgtcacccctccatccgagtcagcagctgtaccagattcagcaggtaacaatgcctgccggtcaggacttggctcagcccatgttcattcaatccgccaaccagccatccgacggtcaggcccctcaggtcactggcgattag

SEQ ID NO: 233217 - DNA, 1008 bp, synthetic construct
  misc_feature 1..1008: note = Description of Artificial Sequence: Synthetic coding sequence
  source 1..1008: mol_type = other DNA
atgtccacggaaggtggctttgggggaacatcaagttcggatgcccagcaatctcttcagtctttctggcctagggtaatggaagagattcggaacctcactgtgaaggatttccgagtgcaggaactgcctctggccagaataaagaagatcatgaagctcgatgaggatgtgaaaatgatttctgctgaggccccagtgctgtttgccaaagccgctcaaatctttatcacagaactgaccctgcgcgcttggatccataccgaagataataaaaggagaacattacagagaaatgacattgccatggccatcacaaaattcgaccagtttgacttcctcattgacatcgtccccagggatgaactgaagcctcccaagaggcaagaggaagttcggcaatccgtgactccagccgagccagttcagtattactttaccttggctcaacaaccaaccgctgtgcaggttcagggccagcagcagggacaacaaaccacctcttctacaacaactattcagcccggacaaataatcatcgctcagccacaacagggtcaaacaactccggtgaccatgcaggttggagaagggcagcaagtgcaaatcgtccaggcacagccccaggggcaggcccagcaggcgcagtccggcacaggccagactatgcaagtgatgcaacagatcattacaaacacgggagagattcaacaaattccggtacagctgaatgcgggtcagctccagtatattagactcgcccagcctgtgtctggtactcaggtggtgcagggtcagatccagacattggccacaaatgctcagcagatcactcagacagaagttcagcaaggacagcaacagttttcacagttcacagacggacagcagctgtaccagattcagcaggtcacgatgccagctgggcaggacctggcccagcccatgtttattcagtctgcaaaccaaccctcggatggccaagctccgcaggtaactggcgattag

SEQ ID NO: 233218 - DNA, 1320 bp, synthetic construct
  misc_feature 1..1320: note = Description of Artificial Sequence: Synthetic coding sequence
  source 1..1320: mol_type = other DNA
atgtcgacagagggtggatttggaggtacctctagtagtgacgctcagcagagtctgcagagcttctggccccgagtgatggaggagatccgtaatctgactgttaaggacttccgggtgcaagagcttcctctggctcggataaagaagatcatgaagctggacgaagatgtgaaaatgatcagcgccgaggctccggtactgttcgcaaaggccgctcaaatattcattaccgagcttacactgcgcgcttggatccacaccgaagataacaagagaagaaccttgcagaggaacgatatcgctatggccattaccaagttcgaccagtttgactttttgatcgacatcgtgcctcgggatgaacttaagccgccaaaaagacaggaagaggttaggcagagcgtgacccctgctgaacctgttcagtactattttacacttgcccagcagcccaccgccgtgcaggttcagggtcaacagcaaggccaacagaccacatcctccaccacaaccattcagcccggtcagattatcattgcccagcctcaacaaggtcagaccacacctgtgaccatgcaggtgggcgagggccaacaggtccagatagttcaagcgcagcctcaggggcaagctcaacaggcacagagcggaacaggccaaaccatgcaggtgatgcagcagattatcaccaataccggcgagatccagcagattcccgtacagttgaacgctgggcagctccagtacattcggctggcccagccggtcagcggcacccaggtggtacagggccagatccagaccctggcaaccaatgctcagcagatcacccaaactgaggttcagcaaggacaacagcaatttagtcagttcaccgacggacagaggaattcagttcagcaagctcgcgttagcgaacttactggagaggctgaacctcgagaagtcaaggccaccggcaactccactccctgcacctccagcctccctaccactcacccgccaagccatagagcgggtgcgagttgtgtctgctgctctcaaccacagcagtcctccacatcccccccaccttccgatgcactgcagtgggtagtggtggaagtgagcggaacccctaaccagctggaaactcacagggagttgcatgcccctctcccgggaatgacctctctctccccacttcacccaagccaacagttgtaccaaatacagcaggtcacaatgcccgcagggcaggatttggcacaacccatgttcatccagagcgcaaaccagccaagtgatggccaggccccacaggtgacaggtgactag

SEQ ID NO: 233219 - DNA, 906 bp, synthetic construct
  misc_feature 1..906: note = Description of Artificial Sequence: Synthetic coding sequence
  source 1..906: mol_type = other DNA
atgagcaccgaggggggtttcggaggcacttctagcagcgacgcccagcagagtcttcagtccttttggcctagagtgatggaagagataaggaatctgactgtcaaggactttagggtccaggagcttcctctcgccaggatcaagaagattatgaagctggacgaggacgttaagatgatcagtgccgaagctccggtactgtttgctaaggcagctcagatctttatcaccgaattgactctgcgagcctggatccataccgaggacaacaagcgcaggactctgcaaagaaatgatattgcaatggccataaccaaatttgatcagtttgactttctcatcgacattgtgccaagggatgaactcaaaccacccaagcggcaggaagaggtgcgccagtcggtgacgccagccgagcctgtgcagtactatttcactcttgcccagcagccaaccgcagtacaggttcagggccaacagcagggacagcagaccacctcgtccaccaccactatccagccaggacagatcatcatagcacaacctcaacaagggcagaccatgcaagtcatgcagcagataatcacaaacacaggcgaaatccaacagatcccggtccagctgaacgccggtcaactgcagtatatccggcttgcccagccggtgtccggcactcaggtggttcagggacaaatccagaccttggccaccaacgcccaacagatcacccagactgaagtccagcaggggcagcagcagttctcgcaattcaccgatggccaacagctgtatcagatccagcaagtgacaatgcccgcaggtcaagatctagcccaacccatgtttattcagagcgccaatcaaccatccgatgggcaggcaccacaggtgaccggggactag

SEQ ID NO: 233220 - DNA, 1008 bp, synthetic construct
  misc_feature 1..1008: note = Description of Artificial Sequence: Synthetic coding sequence
  source 1..1008: mol_type = other DNA
atgtccactgaggggggattcgggggaactagttcttccgacgcccaacaaagtttgcagtcattctggcctagagtgatggaggagattaggaatctcaccgtcaaggattttcgggtgcaggaactgcctctagctcggattaaaaaaatcatgaagctggacgaagatgttaaaatgatatcagccgaagccccagtactgtttgccaaagccgctcaaattttcatcaccgaattaacactcagggcctggattcataccgaagacaataagcggcgtacattgcagcggaacgacatcgctatggcaatcacaaaattcgatcagttcgatttcctgatcgacattgtccctcgggatgaactgaagccgcctaagcgacaggaagaagttcgccaatctgtcactccagccgagccggtgcaatactacttcaccctggcacaacaacccactgccgttcaagtgcagggccagcagcagggacagcaaaccaccagctcaaccactaccatccagccgggtcaaatcatcatcgctcaaccccagcaggggcagaccacaccggttacaatgcaggtgggagagggtcaacaggtgcaaatcgtgcaggcccagcctcaaggacaggcccagcaggcccagtctggaacaggccagacgatgcaggtgatgcaacagattataaccaacacaggggaaattcagcaaatcccagtgcagctgaacgcaggtcagctccagtacattaggctcgcccagcccgtgtctggcacccaggttgtgcagggacagatccagactttagcaaccaatgcccagcagattacacaaacagaggtgcagcagggtcagcagcaattttcccagttcactgatgggcagcagctataccagatccagcaggtgactatgcccgctggccaggatttagctcaacctatgtttatccagtctgcaaaccagccctcagacggacaggcccctcaggtgacaggcgattag

SEQ ID NO: 233221 - DNA, 702 bp, synthetic construct
  misc_feature 1..702: note = Description of Artificial Sequence: Synthetic coding sequence
  source 1..702: mol_type = other DNA
atggccattaccaaattcgaccaattcgacttcttgattgacattgtgcctcgggatgaacttaagccacctaaacggcaggaggaggttcggcagagcgtgactcccgctgagcctgtgcagtactactttactctagcacaacagcccacagccgtccaggtgcaagggcagcagcagggccaacagacaacctcatcaacgaccactatacagcctggtcaaatcatcatcgcacagccacagcaaggccagacaacacccgtgaccatgcaggtgggcgagggccagcaggtccagatcgtacaggctcagccacaggggcaggctcaacaggcacagtcaggcacgggtcagactatgcaggtaatgcaacaaatcataacaaatacgggggaaatccaacagattcctgttcagcttaatgcagggcagttgcagtacatccggttagcccagccagtctccggaacccaggtcgttcagggccagatccagacactcgcgaccaacgcgcagcagattactcagaccgaggtgcagcagggccagcagcaattctcccagttcactgacggccaacaactctaccaaatccagcaagtgacaatgagggccagaaccagcccctccccctgttcatcttcccaacctacctcacctcctacaggcccacctggggacaggcgactccgtgcttag

SEQ ID NO: 233222 - DNA, 606 bp, synthetic construct
  misc_feature 1..606: note = Description of Artificial Sequence: Synthetic coding sequence
  source 1..606: mol_type = other DNA
atggctatcactaaattcgatcagtttgatttcctgattgacattgtgccacgggacgagctgaaaccccctaaacgacaagaggaagtgcgacagtccgtcacaccagccgagccagtgcagtactacttcactcttgcccaacaaccaaccgccgtacaggtccaaggacaacagcagggtcagcaaactacatctagcacaaccaccattcaacccggacagatcattattgcccagccccagcagggccaaactacccccgtcactatgcaggtaggagaggggcagcaagtccagatcgttcaggcccagcctcagggtcaggctcaacaagcccagtccggcaccgggcagacgatgcaagtgatgcagcagatcattaccaataccggggagattcagcagatccccgtccagctgaatgccggtcaattacaatacattcggttggcacagcccgtgagtggaacacaggttgtgcagggacagatacaaacccaggcaatggaaacattctttgcattcaagagacagatttatagcctctggagggtagggggtttcattgctactctgttctcaccacgtgacccaggaaattag

SEQ ID NO: 233223 - DNA, 942 bp, synthetic construct
  misc_feature 1..942: note = Description of Artificial Sequence: Synthetic coding sequence
  source 1..942: mol_type = other DNA
atgagcacagagggaggatttgggggaacatcgagctctgacgcgcagcagagtctgcagagtttctggccgagagtaatggaagagattcgcaacctgacagtgaaggactttagggttcaagagctccctctggccaggattaagaaaatcatgaaattggacgaggacgtgaagatgatctccgccgaggcccctgttctgttcgccaaggcagctcagatattcattacagagctgactctgcgagcctggattcacaccgaagataataagagaagaaccttgcagagaaatgatattgctatggctataacgaaatttgatcagtttgacttcttgatcgatatcgtgccacgggatgaactgaaaccacccaagcgccaggaggaggtgagacagagcgtcactcccgctgagcctgtgcagtactactttacgctcgctcagcagcctaccgcagttcaggtgcaggggcaacagcagggccaacaaaccaccagtagcaccacaacaattcaacccggtcagatcattatcgcccagccccagcagggacagacaactcctgtgaccatgcaggtgggtgagggtcagcaggtgcagatcgtgcaggcacagcctcagggacaggcccagcaggctcagagcgggacgggccaaactatgcaggtaatgcaacagatcatcaccaacacaggtgagattcaacaaattcctgagaccgggctcgcggtttctttacggctgatgaagtgctccggactcatctctgcgcactgcagcttccggctgcctggcagctccgacagccccgctagcgcaagccgggtggcaggcattattggagcagcagaatgtcgccctgcagccgtgtaccctctgagcccagcttgtatccgtcactcatcttgtgcaggtactgacccagacacatgttag

SEQ ID NO: 233224 - DNA, 543 bp, synthetic construct
  misc_feature 1..543: note = Description of Artificial Sequence: Synthetic coding sequence
  source 1..543: mol_type = other DNA
atgtccactgaaggtggcttcgggggtacatcgagctctgacgcacagcagagtctgcagagtttttggccaagagtaatggaggagataagaaacctcactgtgaaagatttccgggtgcaggagttgcctttagccagaataaagaaaataatgaagctcgacgaagacgtcaagatgatcagcgccgaggcaccggtgctgttcgccaaggccgctcagatatttataacagagctgactctccgggcatggatccataccgaggataacaaacggaggacactgcaggaagaggttagacagtccgtgacacccgctgagcccgttcaatactactttactctggctcagcaacctacagccgtccaggtgcagggccaacagcaagggcaacagacgacttcttctactacaacaattcagcccggtcagatcataatagcccagccacagcaaggccagaccacgccggttaccatgcaggttggcgagggacagcaggtacagattgtgcaggcacagccccagggacaggcatag

SEQ ID NO: 233225 - DNA, 1065 bp, synthetic construct
  misc_feature 1..1065: note = Description of Artificial Sequence: Synthetic coding sequence
  source 1..1065: mol_type = other DNA
atgtcaaccgaaggtgggtttgggggaacatcatcaagcgatgcgcaacagagtctgcaaagcttctggcctagagtgatggaggagatccgtaacctcacggtgaaggactttagagtgcaggaactccccctggctaggattaaaaagatcatgaagcttgacgaggatgtgaaaatgattagcgcagaagcccctgtgctgttcgcaaaagccgcacagatttttataaccgagctgacactgagggcatggatacacactgaagacaataagcggagaaccttgcagaggaatgatattgccatggctatcactaagtttgaccagttcgacttcttaattgacatcgtacccagggatgaactaaaacctcctaaaagacaagaggaggtcaggcagtctgtcactccagccgaacctgtacaatactattttaccctagcgcagcagccgacagccgtgcaggtccaagggcagcaacaggggcagcagactaccagcagcaccacaactattcagccaggacaaataatcattgcacaaccccagcagggacagacaacaccagtcacgatgcaggtaggggaaggtcagcaggtgcagatagtgcaagcacagccccagggccaggcccaacaggcccagagcgggacgggccagaccatgcaggtgatgcagcaaataattaccaacactggggaaattcagcagatcccagtacagttgaatgcgggacagttgcagtacattcggttggctcagccagtctcgggtactcaggttgtgcagggccagatccaaactctggctacgaatgcccagcaggggcaacgaaacgcttcccagggaaaacctagacgctgtcttaaagaaacactccaaatcactcagacagaggttcagcaggggcagcagcagttctcccagttcacagatggccagcaactctaccaaatccagcaggtaactatgccagcgggacaagacctcgcccagcctatgtttatccagagcgcaaatcaaccatcagatggacaggctccccaggttacaggggattag

SEQ ID NO: 233226 - DNA, 894 bp, synthetic construct
  misc_feature 1..894: note = Description of Artificial Sequence: Synthetic coding sequence
  source 1..894: mol_type = other DNA
atgagcactgaaggcggttttgggggaacttcctcttccgacgcccaacagtctctccaatcattctggcctcgagtgatggaagaaattcgtaacctcaccgtgaaggactttcgagtgcaagagttgccactggcccgtattaagaagataatgaagctggatgaagatgtgaagcgcaatgatatagctatggccatcactaagttcgatcaattcgattttttgattgatattgttccaagagacgagctcaagccccctaagaggcaagaagaggtgaggcagagcgtcaccccagctgagccagtgcagtactacttcacccttgcccagcagcccaccgctgtccaggtgcaggggcaacagcaggggcagcaaactacaagtagtacgacgacaatccagccaggacagataatcatcgcacagccacagcaggggcaaacgacacccgtaaccatgcaagtcggtgagggccagcaggtgcagatcgtgcaggctcagcctcagggtcaagcccagcaggcccagagcggaaccgggcaaacaatgcaagtcatgcagcagattatcactaacactggagaaattcaacagattcccgtgcagttgaatgccggacagctgcagtacataaggctggcgcagcctgtgtctggcacacaggtcgtgcagggtcagattcagactttggccaccaatgcccagcagataacccaaacagaggtccagcagggccagcaacagttcagccagtttactgacgggcagcagttgtaccagattcagcaggtgaccatgcctgcaggccaggacctcgcacagccaatgtttattcagtcagctaatcaaccttccgatggtcaggcaccccaagtaactggagactag

SEQ ID NO: 233227 - DNA, 1008 bp, synthetic construct
  misc_feature 1..1008: note = Description of Artificial Sequence: Synthetic coding sequence
  source 1..1008: mol_type = other DNA
atgtccactgaaggaggttttggcggaaccagtagctcagatgcgcagcagagtcttcaaagcttttggccaagagtgatggaggaaattcgcaatctgacggttaaggatttcagagttcaggaacttcccttagcaaggattaagaagattatgaaattggatgaggacgtaaagatgatttctgccgaggcccctgtgcttttcgcaaaagctgctcagatattcatcaccgaacttaccctcagagcctggattcatacagaggataacaagcgcaggactctgcagcggaacgacatcgctatggcaattacaaagtttgatcagttcgatttccttattgacatcgtccctcgagatgaactgaaacccccaaagcggcaggaggaggttcggcagtctgttactccagccgagcctgtgcagtactatttcacactggcccagcagccaaccgcggtgcaggtgcagggccaacagcaaggccaacagacaaccagctccaccaccactatccaacctggtcagatcattatcgcccagccgcagcaaggccagactacacccgtgaccatgcaggtgggagaaggccagcaggtccagattgttcaggcacagccccagggccaagcccagcaggcccagagcgggacgggccaaacaatgcaagtgatgcagcaaattatcacaaacaccggcgaaatacaacagattcccgtccagctgaatgcgggacagctgcagtacatcagactggctcagcccgtgtcaggcacacaggtggtgcagggacaaatacaaacactagccaccaacgcacagcagattacgcaaacagaagtccagcagggacaacagcaattctcccagtttacagacggccagcagctgtaccaaatccagcaagttaccatgcccgcaggccaagatctggcccagcctatgtttatccagtccgcaaatcagccctctgacggccaagctccacaggtgactggtgattag

SEQ ID NO: 233228 - DNA, 1008 bp, synthetic construct
  misc_feature 1..1008: note = Description of Artificial Sequence: Synthetic coding sequence
  source 1..1008: mol_type = other DNA
atgagcaccgaggggggatttggtggcacctcaagttctgacgcccagcagtctctgcagtccttctggccccgtgtgatggaggagatcaggaatctgactgtaaaagactttagggtccaggagctgcctctggcccgaattaaaaagattatgaagctggacgaagacgtgaagatgattagcgcagaagctcctgtgctgtttgccaaagctgcccaaatctttataactgaactgactctcagagcgtggatacatactgaggacaacaaaaggagaacgctccagagaaatgacatcgctatggccataactaaattcgaccagttcgattttttgatcgacattgtacccagagacgagctgaaacccccaaagcgacaggaggaggttaggcaatccgtaacacccgcagaacctgtgcagtactacttcaccctagctcagcagccgactgccgtacaggtgcagggacagcagcagggacagcagactacctctagtaccacaacaattcagccaggccagattatcatagctcagccacagcaagggcagacgacccctgtcacgatgcaggtaggagagggccagcaggtgcagattgtccaggcgcaaccacagggtcaagcgcagcaggcacaatcgggcaccggacaaaccatgcaagtgatgcagcagataatcaccaatacgggggagatccaacagattccggtccagttgaacgctgggcagctacagtacatccgcctggctcagcccgtgagtggaacacaggtggtccaaggacaaattcagaccctggcaaccaacgctcagcagattacgcagacagaagtccagcagggccagcagcaattctcccagtttacagacgggcagcagctgtatcagatccagcaggtcactatgcccgcaggccaggatctcgcccagccaatgtttattcagtctgcgaatcaacctagcgacgggcaagcgccacaggtgacaggtgactag

SEQ ID NO: 233229 - DNA, 390 bp, synthetic construct
  misc_feature 1..390: note = Description of Artificial Sequence: Synthetic coding sequence
  source 1..390: mol_type = other DNA
atgtccaccgaagggggattcggaggtacaagtagctctgacgctcagcagtctctgcagagtttctggcctagggtgatggaagaaatccggaacttgactgtgaaagacttcagggtgcaagaactgcctctcgctagaattaagaagatcatgaaactcgacgaagacgtaaagatgatttccgcagaggcgcctgtgctgttcgctaaagcagcacaaatctttatcacagagctcacactgcgcgcttggatccataccgaggacaacaagcggaggacccttcagaggaatgatattgccatggcaataacaaaatttgatcaatttgattttctgattgacatcgtgcccagagacgagctgaagccaccaaagcgccaatag

SEQ ID NO: 233230 - DNA, 1005 bp, synthetic construct
  misc_feature 1..1005: note = Description of Artificial Sequence: Synthetic coding sequence
  source 1..1005: mol_type = other DNA
atgagcacagagggcggtttcggcggaacatctagctcggacgcccagcagtcgcttcagagcttctggccacgtgtgatggaggaaataagaaatctgacagtgaaagactttagagtccaagagttgcccctggccaggataaagaagataatgaagctggacgaagatgtgaagatgatttctgctgaggctccagtgttgttcgccaaagccgctcagatttttatcacagagcttacattgagggcctggatacatacagaggataacaagaggaggacgctccagaggaatgacatagcaatggctatcacaaaatttgaccagtttgatttcttgatcgacatcgtgccacgcgatgagctcaagcctccaaaaaggcaggaagaagtaaggcagtctgtgacgccagccgagcccgtccagtattattttactctcgcacagcagccaacggccgtgcaggtgcaggggcaacaacaaggtcaacagaccacaagctctaccaccaccatccagcctggacagataatcatcgcccaaccccagcaggggcaaaccacacctgtcactatgcaggttggggaagggcaacaggtgcagatagttcaggcccagccacaggggcaagctcaacaagctcagagcgggaccgggcagactatgcaggtcatgcagcagatcattaccaataccggagagatccagcagatccccgtgcaactgaatgcgggacaactacagtatattcgattagctcagcccgtctccgggacgcaagtggtacaggggcagattcaaacgctggccaccaatgctcagcaaatcacacagactgaagtgcaacagggccagcagcaattctctcagtttaccgatggtcagctgtaccagattcagcaagtcacaatgcctgccggacaggatctggcccagcctatgtttatccagtcagctaatcagcctagcgacggacaggccccacaggtgaccggagactag

SEQ ID NO: 233231 - DNA, 426 bp, synthetic construct
  misc_feature 1..426: note = Description of Artificial Sequence: Synthetic coding sequence
  source 1..426: mol_type = other DNA
atgtctaccgaggggggtttcggtggtacatcgagcagcgacgcacagcaatccttacaatcattttggccccgtgtgatggaggagatcagaaaccttacagtgaaagattttcgagttcaggaactgccgctggctcggatcaagaaaattatgaagctcgacgaagatgtaaagatgatttcagcagaggctccagtgctcttcgcaaaggctgctcaaatctttattactgagctgacgttacgagcctggatacacacagaggataacaagcggagaaccctgcagagaaacgacattgctatggctatcactaaattcgatcagtttgactttcttatcgatattgtgcctagagatgaactcaaacctcccaaaagacaggaggtccggcagagcgtgacccctgctgaaccagtgtag

SEQ ID NO: 233232 - DNA, 288 bp, synthetic construct
  misc_feature 1..288: note = Description of Artificial Sequence: Synthetic coding sequence
  source 1..288: mol_type = other DNA
atgagtacagaaggcggatttggcggtacctcatcctctgatgcccaacaatcgctgcagtccttttggccaagggtcatggaagagatccggaacctgacagttatgatttccgccgaagcgccagtcctgtttgccaaagctgcccaaattttcattacagagctgacactccgggcatggatccatacagaagacaataaaaggagaaccttacagcggaatgatatagcgatggccataacgaaattcgaccagtttgacttcctgatagacatcgtaccttag

SEQ ID NO: 233233 - DNA, 183 bp, synthetic construct
  misc_feature 1..183: note = Description of Artificial Sequence: Synthetic coding sequence
  source 1..183: mol_type = other DNA
atgagtactgagggtggattcggtgggacatcctctagtgatgcccagcaaagccttcagagtttctggcccagagtaatggaggagattagaaatttaacagttaaggactttagggttcaagaactgccccttgcacgcatcaagaagatcatgaaattggacgaagatgtgaagatgtag

SEQ ID NO: 233234 - DNA, 159 bp, synthetic construct
  misc_feature 1..159: note = Description of Artificial Sequence: Synthetic coding sequence
  source 1..159: mol_type = other DNA
atgtctactgaaggagggtttggcggaacttcttcctcggatgcacaacagtctctgcaatccttctggcccagggttatggaggaaattaggaatctgaccgttaaggactttcgcgttcaggagcttcctctggctcgcattaaaaaaatcatgtag

SEQ ID NO: 233235 - DNA, 555 bp, synthetic construct
  misc_feature 1..555: note = Description of Artificial Sequence: Synthetic coding sequence
  source 1..555: mol_type = other DNA
atggctaggagtttggtccacgacacagtgttttactgcctgtccgtctaccaggtgaagattagtcccacccctcagcttggcgctgcttcgtcagctgaggggcacgtggggcaaggggcaccaggcctgatgggaaatatgaaccccgaagggggagttaaccacgagaacggcatgaacagggatggcggtatgataccggagggcggaggcggaaatcaagagccgcgacaacagcctcagccacctccagaggagcctgctcaggcagccatggaggggcctcaaccagagaatatgcagccccgaactcgccgtactaaatttaccctcctgcaggtggaagagctcgaatctgtgtttagacacacccagtaccccgacgtgcccactaggcgtgagcttgcggagaacctcggagttaccgaagataaggtgagagtctggttcaaaaacaagagggccagatgcagacgccaccagcgagaattgatgttagcaaatgaacttagggccgaccccgacgattgcgtttacatcgtggtggactag

SEQ ID NO: 233236 - DNA, 345 bp, synthetic construct
  misc_feature 1..345: note = Description of Artificial Sequence: Synthetic coding sequence
  source 1..345: mol_type = other DNA
atggacaagcgtagaagagccttaacacgtctgtacttggacaaggccacccttatctggaacggcaacgctgtctcaggattggatgcactgaacaattttttcgatactctcccatcttccgagtttcaggttaacatgctggactgccaacccgtgcatgaacaggctactcagtcacagaccaccgtactggtggtaacctctggcactgtgaaatttgatggcaacaagcagcactttttcaaccagaactttctgctaactgcacagtccactcccaacaacacagtttggaaaattgcaagcgattgctttagattccaggattggtcgagctcttag

SEQ ID NO: 233237 - DNA, 429 bp, synthetic construct
  misc_feature 1..429: note = Description of Artificial Sequence: Synthetic coding sequence
  source 1..429: mol_type = other DNA
atggctaccagcttagatttcaaaacatatgttgatcaggcctgtcgggctgccgaagagtttgtgaatatctactatgagactatggataagcgcagacgggctctgaccagattatatctggataaggctaccttaatttggaatgggaacgccgtctccggacttgatgcgctcaataatttcttcgacacgctgccaagttcagaatttcaggtaaacatgttagattgccagcccgttcacgaacaggcgactcaatctcagacaaccgttctggttgtaacatcaggtacagtgaaatttgacggtaacaagcagcactttttcaaccagaatttcttactgacagcccagtccactcctaataacactgtgtggaagatcgccagtgattgtttccgatttcaggattggagcagtagctag

SEQ ID NO: 233238 - DNA, 345 bp, synthetic construct
  misc_feature 1..345: note = Description of Artificial Sequence: Synthetic coding sequence
  source 1..345: mol_type = other DNA
atggataaacgccgaagggctctcacgcggttgtacctcgacaaggccacattgatatggaacggtaatgccgtttccggtctggatgctttgaataacttttttgacaccttgccatcctcagagttccaggtaaacatgctggattgccaaccagtacatgagcaggcaactcagtcgcaaactacggttttggtcgtgacaagcggaacagtgaagttcgacggtaataagcagcacttttttaatcagaactttctcctcaccgcccagtccacccccaacaataccgtatggaagatcgcttcagactgcttcagattccaggactggagttcctcatag

SEQ ID NO: 233239 - DNA, 882 bp, synthetic construct
  misc_feature 1..882: note = Description of Artificial Sequence: Synthetic coding sequence
  source 1..882: mol_type = other DNA
atgacaggcctgtacgagctcgtgtggcgagttctgcatgccctactttgtttacatcgtacgctgacgagttggctgcgggtcaggtttgggacctggaattggatctggcggaggtgctgtagggctgcatctgcagcggtgctcgcaccactcggctttactctgagaaaacctcccgctgtgggcaggaaccgccgacatcacagacaccctcggggtgggtcgtgcttagctgccgctcatcaccgaatgagatggagagcagatgggaggtctcttgagaaactgccggtgcacatgggcctggtcatcacagaggttgaacaggagcccagcttcagcgacatagcctctcttgtggtctggtgtatggccgtgggcataagctatattagtgtatacgatcaccaaggaatctttaagcgaaacaattcaaggctgatggacgaaattctcaaacaacagcaggaactgctgggactcgactgcagcaaatacagccccgaattcgccaacagtaacgacaaagacgaccaggtgttgaactgtcacctggcagtgaaggtcctttccccggaggacggaaaagctgacattgttcgcgcagcccaagatttttgccagttagtggctcagaaacaaaagcgccctacggacctggatgtcgataccctggcaagcctcctgtcgtccaatggctgtccagaccccgacctcgtactgaagttcggccctgtggacagcacactgggctttctgccttggcacatcaggctgaccgaaattgtgagccttccctctcatctcaatatttcctatgaggacttcttctcagccctgagacaatacgctgcatgcgagcagcgactaggcaaatag

SEQ ID NO: 233240 - DNA, 2571 bp, synthetic construct
  misc_feature 1..2571: note = Description of Artificial Sequence: Synthetic coding sequence
  source 1..2571: mol_type = other DNA
atgaagccaaggcccgctggcttcgtcgacaataagttaaagcagcgggtgatccaatacctgaccagtaataaatgtggtaaatacgtggacattggcgtcctggcctccgacttgcagagagtatatagcatagattacggccgacggaagaggaatgccttccgcatccaggtggaaaaggtgttttctattatcagctctgagaaggagctgaaaaatctgaccgaactggaagatgaacatctcgcaaaacgtgcaaggcagggagaggaagataacgagtacaccgaatcctattcagacgatgacagtagtatggaggactaccccgatccacaaagcgcgaatcatatgaactcatccctgctttctctgtatcgcaaaggcaaccctgattcagtgtcaaacactcctgagatggaacagagagaaactactagcagtaccccccgtatatcctcaaagaccggttctataccattaaagaccccggctaaggactcagagggtggctggttcatcgacaagactcctagtgttaagaaggacagcttctttttggatctgtcctgcgaaaaatctaacccaaagaaacctatcacagaaatacaggattccaaagactcctctctgttggagagcgatatgaagagaaaggggaagctgaagaataagggctccaaacggaaaaaggaagacctccaggaggtcgacggtgaaattgaggccgtacttcagaaaaaggccaaggcgaggggccttgaatttcagatctctaatgtgaagtttgaagatgtgggaggcaacgatatgacccttaaagaagtttgtaaaatgctgatccacatgaggcaccccgaggtttaccatcacctgggggttgtacctccaagaggggtcctcctacacggccctccaggctgcggaaaaaccctcctggcacatgccatagccggagaactggatctgcccatcctgaaggtcgcagctcccgaaatcgtgtccggagtcagtggcgagtctgaacagaaactgagagagttgtttgaacaggctgtctccaacgccccttgtattatatttattgatgagattgacgcgatcacaccaaaaagggaggttgcctcaaaggacatggaacgacgtatcgttgcgcaacttctaacttgtatggatgatctaaacaacgtggccgctaccgcacgcgtgcttgttatcggcgctaccaaccggccagatagcctcgaccccgcattacgacgagccggaaggtttgacagagaaatttgtttgggcatcccggacgaggcttccagggagcgcatccttcaaacactgtgtaggaaattgagactcccccaggcatttgatttctgccatcttgctcatctcacccccggatttgttggggcagacctcatggctctatgtcgagaagccgctatgtgcgcagtaaacagggtcttaatgaaattacaggaacagcagaagaaaaatcctgagatggaggaccttcctagtaagggcgtgcaggaagagcgccttggtaccgagcccacaagcgagacccaagatgagctgcagagacttctgggccttctgcgcgaccaggacccactgagcgaggagcagatgcagggactgtgtattgagctgaacgacttcattgtggcgttgagctctgttcaaccaagcgctaagagagaggggttcgtcactgtgcccaatgttacatgggccgatattggtgcattagaggacatccgcgaggagctgaccatggctattctcgctccagtgaggaaccccgatcagtttaaagcattgggactcgttaccccagccggagttctactggccggtcctccaggatgcggcaagacactgctagccaaagccgtcgctaatgagtctggcttaaacttcatttccgtcaaaggcccagagctgctcaacatgtacgtgggggagtcggagcgggcagtgcggcaggtgttccaacgcgcaaaaaactcagctccctgcgtgatattcttcgacgaagtggacgccctgtgcccccgtagatccgaccgggagacgggggcatccgtgagggtcgtgaaccagttgctcaccgagatggatggtttggaggctcgacagcaggtctttatcatggcggctactaacaggccagatattatagatcccgcaatcctgagaccagggagattggacaaaacgctcttcgtaggcctgccaccacccgctgacaggctcgccatcttaaagaccattacaaagaacggcacaaagccacccctcgacgcagacgtgaatcttgaggccatcgccggagacttgagatgcgactgctacaccggggcagacctttccgcactcgtgcgggaggcgtctatttgcgctctgcgccaggaaatggctaggcagaaatcaggtaacgaaaagggggagctgaaggttagccacaagcacttcgaagaagccttcaagaaggtgcgatcctccatatctaaaaaggatcagataatgtatgagcgacttcaggagtctctaagtcggtag

SEQ ID NO: 233241 - DNA, 2004 bp, synthetic construct
  misc_feature 1..2004: note = Description of Artificial Sequence: Synthetic coding sequence
  source 1..2004: mol_type = other DNA
atgaagcgcaaggggaagctaaaaaacaagggaagtaaacggaagaaagaggaccttcaggaagttgacggagagattgaggccgtgcttcagaaaaaagccaaagcacggggtctggagttccagatctctaatgtgaagttcgaagatgtaggaggcaacgatatgactcttaaggaggtttgcaaaatgctcatacatatgcggcaccctgaggtgtatcatcatctgggtgtggtgcctccacggggtgtgcttctgcatgggcctccgggatgtggcaaaactctgctggcccacgctatagctggggcagaatgctcaggaatgatcacggcacactgcagttttgacttttcaggtagcaacgaccccccagcaagcgcgagccaagagcttgatcttcctattctgaaagtcgctgctccagagatagtctccggggtgtctggtgagagcgagcagaagttgcgcgaactctttgaacaggctgtgtccaatgcaccatgtatcatcttcatcgatgaaattgacgccattactccgaagcgcgaagtcgcgtcgaaggatatggaacgtcgcattgtggcccagttactgacttgtatggacgatctgaataatgtggccgctaccgccagagtcctggtgatcggcgctacgaaccggccagatagcctggatccggcattgagacgggcaggcagatttgatcgggaaatctgtttagggattcccgatgaggcttctcgagagaggatacttcagaccctgtgcaggaaattgcggctgccccaagcatttgacttttgccacctggctcatcttacacccggatttgtgggagccgacctcatggcgctgtgtcgggaagcagcaatgtgtgcagtgaacagggtgctcatgaagctccaggagcagcagaagaagaaccccgagatggaggatctgccatccaagggggtgcaggaggaacgcctcggcacggagccaacctctgagacccaggacgaactccaacgccttttgggtctgttaagggaccaggaccctctgagcgaggaacaaatgcagggcttgtgcattgagctgaatgatttcatagtggccctcagctccgtccagcccagtgcaaaaagggaaggattcgtcaccgtgcctaacgtgacgtgggcagacattggagccctggaagatattcgtgaggaactgactatggcgatcctggccccagtgcgtaatcctgatcagtttaaggctttaggattagtcacaccagccggtgttctcctcgccggacctcctggatgcggtaaaaccctgctggcaaaggcagtagccaacgagtcaggcctgaatttcatcagtgttaagggccctgagttgctgaatatgtacgtgggggaatccgagcgtgctgtcaggcaggtttttcagcgggctaaaaatagtgctccatgcgtgatcttttttgatgaagtcgacgcactttgtcctagacgcagtgacagagaaaccggagcgtctgtgagagtggtcaaccagcttttgacggagatggacggtcttgaggccaggcagcaggtgtttattatggcagccaccaacagaccagatatcatcgaccccgctattcttcggccaggaagactggacaaaactttattcgtgggtctgcctccccctgctgacaggctcgccatcctgaaaacaatcacaaaaaatggcacgaagccaccattggacgcagacgtgaatttggaggccatcgccggtgatctgcggtgcgactgttatactggggcagacctctccgctttagtgagggaggcgtctatctgcgcgctcagacaggaaatggctcgacaaaaatctgggaatgaaaagggggagcttaaggtctcccacaaacactttgaagaggcattcaaaaaggtaagatccagcatcagcaagaaggaccagattatgtacgagcgtctgcaagaatctctctccagatag

SEQ ID NO: 233242 - DNA, 1770 bp, synthetic construct
  misc_feature 1..1770: note = Description of Artificial Sequence: Synthetic coding sequence
  source 1..1770: mol_type = other DNA
atggaagattatcccgaccctcagtctgctaaccacatgaatagttccttgcttagcctgtatagaaaaggcaacccagattcagtttctaatacgcccgagatggagcagcgcgagaccacaagttcaacacctcggatctcctctaagaccggctctattcctttgaagacccccgcaaaagacagcgaaggcggttggttcattgataagacccctagtgttaaaaaagattctttttttctcgacctgagctgtgagaagtctaaccctaagaagcccatcacggaaatccaggactccaaggattcctcactcttggaatcagatatgaaacgcaaggggaaacttaagaacaaaggcagcaagcgaaagaaagaagatcttcaagaagtggacggtgagattgaggcagttttacagaaaaaggctaaggcacggggacttgagttccagatttccaatgtgaaatttgaggacgttggaggaaatgacatgacccttaaagaggtgtgtaagatgctgatccatatgagacaccccgaggtctatcaccatctcggcgttgtgcctccccgaggcgttctgctccatggcccaccaggctgcggcaagacactgctggctcatgcgatcgcaggagaactggaccttcccatcctcaaggtcgctgctcccgaaatagtttccggcgtttccggcgagagtgagcaaaaactgcgtgaactgttcgaacaggcagtgagcaatgcaccatgcatcatctttatcgacgagatcgacgctattaccccgaagagggaagtcgcctcgaaggatatggagaggcggattgtagcccagctgctgacatgcatggatgaccttaacaatgtggccgcaaccgcgagggtgctggtcataggcgctacaaaccggccagacagtctagatcccgctcttcggagggcgggtagatttgatagagagatctgcttaggcattccagatgaagcgtcccgtgagcgaattctccaaaccctctgtcgtaagctgagattgccacaggcttttgacttctgccacctggctcacttaacccccggatttgttggagcagatctcatggctttatgccgggaggctgccatgtgtgccgtgaaccgagtcttaatgaagctccaggagcagcagaagaaaaatcccgagatggaggatttgccatccaaaggggtgcaagaagaacgtctgggaacagagccgaccagcgagactcaggacgaacttcagagactgttggggctcctgcgcgatcaggatccgttgtcagaggagcagatgcagggattgtgtatagagctcaacgactttatcgtggcactttcatccgtgcagcctagcgcaaagcgggagggctttgtgaccgtgccaaatgtcacatgggcagatattggagccctcgaggatattcgagaagagctgactatggcaatattagcacccgtccggaatcccgaccagttcaaagccctggggctcgtgacccctgccggagtcttattagccggacccccaggctgcggaaaaaccctcctggccaaggccgtggccaacgagtctgggctcaatttcatcagcgtgaagggacctgaactgttgaatatgtatgtgggcgagagcgagcgcgctgtccgtcaggtgttccagagggctaagaactcagccccttgtgttatctttttcgatgaggtagacgctctatgtccaagaaggagcgatagagagatttag

SEQ ID NO: 233243 - DNA, 2253 bp, synthetic construct
  misc_feature 1..2253: note = Description of Artificial Sequence: Synthetic coding sequence
  source 1..2253: mol_type = other DNA
atggaggactaccctgatcctcagagcgctaatcatatgaatagttctctgctgagcctgtatcggaaaggcaacccggattctgtttccaatacacctgagatggaacaacgcgagactacgagcagtaccccacgcatcagctccaaaaccggctctattcccctgaagacccccgcaaaggatagtgaagggggatggttcatcgataagacgccctccgtcaagaaagactctttctttctggatttgtcctgtgaaaaatccaaccccaagaagcccatcaccgagatccaggattcgaaggattcatcactcctggaaagtgacatgaagagaaaagggaagctgaagaataaagggtctaaacgcaagaaggaagatttgcaagaggttgatggtgaaattgaagccgtgctgcagaaaaaagctaaggcccgtggacttgaatttcagatctcgaatgttaagttcgaagatgtgggtggcaatgacatgaccttaaaggaagtgtgtaagatgctaattcatatgcgccaccctgaggtctaccaccacctcggtgtggttccaccccgaggggtcctactccatggaccccctggctgtggcaaaacacttcttgctcacgctatcgccggagagctcgacctgcccatcctgaaagtggcggctcccgaaatcgtatcaggagtatctggcgaatcagagcagaaactcagggaactgttcgagcaggctgtttccaacgctccctgtattattttcatcgatgaaatcgacgccataactccaaaaagggaggtggcttccaaggacatggaacgacgcattgtcgcgcagctgctgacttgtatggacgacctgaacaacgtggccgcaaccgctcgggtgctcgtcataggcgctactaacagaccggattccctcgatccagcgttgcgtagagccggtcggttcgaccgggagatctgcctcggtatcccagatgaagccagtcgcgaacgcattctgcagacactgtgcaggaagttgcgtttgccgcaagccttcgatttttgtcatctggcccacttgactcccggatttgtcggcgcagatctcatggccttgtgccgggaagctgcaatgtgcgcagttaatcgagtcttgatgaagctccaagagcagcaaaaaaagaaccctgagatggaggacctgccctccaaaggggtgcaagaagagagactcgggaccgagccaacgagcgagacccaggacgagttacagaggttgttaggacttttgcgtgatcaggatccgctaagcgaggaacagatgcagggcctgtgtattgagcttaatgacttcattgtggctctctccagtgtacagccgtccgcaaaacgtgagggattcgtaacagtgccgaacgtcacttgggcagatataggcgctcttgaagacattagggaggaattaactatggcaatcctggctcctgtgcggaacccagaccagtttaaggccttaggattggtcaccccagctggggtcctgctcgccggtcctccaggatgtggaaaaacgctgttggccaaggccgttgcgaacgagagtggattaaattttataagcgtgaagggtcccgaattgctaaatatgtatgtgggggagtctgagcgcgcagtgaggcaggtgttccagcgggctaagaattcagcgccttgtgtgatcttttttgatgaagtggatgccctgtgccctcgacggtcagaccgcgagaccggggcttctgtgagggtggtgaaccaactgttgacggagatggatggcctggaggctcggcagcaagtgtttataatggcagcaactaataggcccgatatcattgatccagcaatcctacgcccagggcgattggacaagacactcttcgtcgggcttcctcctcccgctgacaggctcgctattctgaaaaccatcaccaagaatggcactaagccaccgctggacgccgacgtgaatctggaagctattgctggagacctaagatgcgactgttatacaggcgcagatctgtccgccctagtgcgagaggctagcatctgcgccctgcgacaagaaatggctcggcagaaatcgggaaacgaaaaaggcgaactgaaagtgtcacacaagcatttcgaggaggccttcaaaaaggtcaggagttccatttcaaagaaggatcagattatgtacgagcggttgcaagaatctctgtcaagatag

SEQ ID NO: 233244 - DNA, 2298 bp, synthetic construct
  misc_feature 1..2298: note = Description of Artificial Sequence: Synthetic coding sequence
  source 1..2298: mol_type = other DNA
atgaaacctaggccagctggcttcgtcgacaacaaactaaaacagcgcgtcattcagtacctgacctctaataaatgtggcaagtacgtagacattggcgtcctggcctccgatctgcagcgagtgtactcaatcgactatgggcgtcgcaagcgaaatgcattccgaatacaggttgagaaagtgttcagcattatttcttctgagaaggaactgaaaaatttgaccgaattggaggatgaacacctggccaagcgcgctaggcagggggaggaagataacgaatacacggaatcatatagtgacgacgatagttcgatggaggactatcctgacccgcaggattctaaagatagctcactgctggagtctgatatgaagaggaaagggaagttaaagaacaagggatctaagagaaagaaggaagacctgcaggaggttgatggagaaatcgaggccgtgctacaaaagaaggccaaagcccgaggtcttgaattccaaatttcaaacgtgaaatttgaggatgtcggtggaaacgatatgacactgaaggaggtctgcaagatgctgatccacatgaggcatcctgaggtgtaccatcatttaggcgtcgtgcccccaagaggggtgttgttacatggtccgcctggctgtggcaagacgttgctggcacacgctatcgccggagaactagatttgccaattctcaaggtggcagctccggagatcgtgtcaggagttagcggcgaatcagaacaaaaactacgcgaactgtttgaacaagcagtctcaaacgccccatgcataatctttatcgacgagatcgatgctatcacccctaaacgtgaggtcgcctctaaagatatggaaaggaggatcgttgcccagctcttaacatgtatggacgatttaaataacgtcgccgcaactgctagagtccttgtgatcggggcaactaacagacccgacagtcttgacccagcgctccggagagccggtagatttgaccgggagatttgtctcggaatcccagatgaagcgagccgggagcgaatcttacagaccctctgccgcaagctaaggctgcctcaagccttcgacttttgccatttggcccaccttacgcccggttttgtcggagctgacctgatggcgctctgtcgggaggcagctatgtgcgccgtgaaccgagtcctaatgaagttgcaggagcagcagaagaagaacccagagatggaagatctgccgagcaagggtgtccaagaggagcgattaggcacagaacctacctccgagacacaagacgagttgcagagactgctaggcctattacgcgatcaggatcccctgtcagaggagcagatgcagggcttatgtattgagctcaatgactttattgtcgctctgtcatctgtccagccatcagctaagcgggagggcttcgtgaccgtacccaacgtcacctgggccgatatcggcgctctggaggatatcagggaggaattaacaatggccatcctagcgcctgtgaggaacccggatcagttcaaggcacttgggctcgtaacccccgctggcgttctcttggcagggccacctggatgcggcaagaccttgttggctaaggccgtcgcaaacgaatctggcctgaactttatttctgtcaagggccctgagctgctcaacatgtacgttggcgagagcgagagggctgtgagacaggtgtttcagcgggcaaagaattcggcaccttgtgtgatcttcttcgacgaagttgacgctttgtgccctaggagatccgacagagagactggcgctagtgttcgagtggttaaccagttgttaacagagatggatgggcttgaggcaagacagcaggtctttatcatggcagctaccaaccggcctgatatcatcgatccggcaatcctacgtcctggccgtttggacaaaactttatttgtggggctacctccgccagccgaccggttggcgatcctgaagaccatcactaaaaacggcactaagccaccactggatgcagatgtgaacctggaggctatcgcaggcgatttaagatgcgattgctacactggggctgatttgagtgccctggtgagggaggcttcaatatgcgccctcaggcaagaaatggctcgtcagaaaagcggaaatgaaaagggcgaactcaaagtgagtcataaacatttcgaggaagcctttaaaaaggttcgtagctccatctcaaagaaggaccaaattatgtatgaacgcctccaggaatccctgtctagatag

SEQ ID NO: 233245 - DNA, 1386 bp, synthetic construct
  misc_feature 1..1386: note = Description of Artificial Sequence: Synthetic coding sequence
  source 1..1386: mol_type = other DNA
atgcctccctctgggccaagagggacactgctcctgttgcctctcttgctcttactgctgctgagggcggtgttggcagttccactcgaaaggggcgctcccaacaaagaggaaaccccagctaccgaatctccagatacgggcctgtattaccacaggtatcttcaggaggtaatcgacgttctcgagactgacggccatttcagagagaaactgcaggccgcaaacgccgaggacatcaagagcggtaagttgtcccgcgagctggacttcgtgagtcaccatgtgcgaacaaagctcgacgaactgaaacggcaagaagtgtctcgtttgaggatgttactcaaagcaaagatggacgccgagcaggatccaaacgtgcaggtggatcacctgaacctcctgaaacagttcgagcacctggatccccaaaaccagcataccttcgaagccagggacctcgaactcttgatccagaccgccaccagagacctagcacaatatgatgctgcccatcatgaagagtttaagaggtatgaaatgctgaaggaacacgagaggcgaaggtaccttgaatctctgggcgaggagcagcgcaaggaagcagaacgaaaactggaggagcagcagcggagacatcgcgagcaccccaaggtgaatgttcccggttcacaagcacagctcaaggaggtttgggaagagttagacgggctggaccccaaccgcttcaatcctaaaactttctttatacttcacgacattaactccgacggcgtgctggacgaacaggagctggaagctctgttcactaaagagctcgagaaagtttatgatccaaaaaacgaggaagacgacatgcgagagatggaagaggagaggctaaggatgagagagcacgtgatgaagaatgttgatacaaaccaggatagactggtaaccctcgaagaatttcttgctagcacccaacggaaagagttcggcgacaccggcgaggggtgggaaaccgtggaaatgcaccctgcctacactgaggaagagctaaggcggtttgaggaggagctggctgctagggaggctgaactcaacgcaaaggcccaacgcctctcccaggagactgaggcattaggcagatcacagggtcggctagaggcccagaagagggagctccagcaagccgtgcttcacatggagcaaagaaaacaacagcagcagcagcaacagggacacaaggcccctgcggctcaccctgaaggccaactgaagtttcatcctgatacggatgatgtgcctgtgccagctcccgcaggcgaccagaaggaagtggacacttctgaaaagaagctcctggagaggctccccgaggtggaagtaccacagcatctctag

SEQ ID NO: 233246 - DNA, 1386 bp, synthetic construct
  misc_feature 1..1386: note = Description of Artificial Sequence: Synthetic coding sequence
  source 1..1386: mol_type = other DNA
atgcctcctagcggccctagaggaacgttgttattgttgcccctactgctgctgcttctgctgcgagctgtcctggcagtccccttggagagaggggcacccaacaaggaggaaactcctgctaccgagagtcctgacaccggcctctattatcatagatacttacaagaagtgatcgacgttctggagaccgatggccatttccgggagaaactgcaggccgctaatgccgaggatatcaaatcaggcaagctgtcacgggaactggactttgtctcacatcacgtgcgaacaaaattggacgagttaaagcggcaggaagtcagccggctccgaatgctgcttaaggccaaaatggacgctgagcaggaccctaatgttcaggtcgatcatcttaacctactaaagcagttcgaacacctggacccacaaaatcagcacacctttgaagcacgtgacctagagctcctgattcagaccgcgacacgggacctggcacaatatgatgctgcgcatcatgaagaatttaaaagatacgagatgttgaaggagcacgagcgacgaagatatctcgagtctcttggggaggaacagcgaaaagaagccgaaagaaagcttgaggaacagcagcgtagacatagggaacaccccaaggtcaacgttccaggtagccaggcacaactcaaggaggtgtgggaggaactagatggcctggaccccaatcgatttaatcccaagacgttttttatcctgcacgacataaattctgacggcgtgctcgacgagcaggaactggaggccctgtttaccaaggaactggagaaagtctacgacccaaagaacgaggaagacgatatgcgggagatggaagaagagaggctgaggatgagggagcatgtcatgaaaaacgtggatactaatcaggatagacttgtgacgctcgaggagttcctggcttctacacagagaaaggaatttggagacacgggagagggatgggaaacagtggagatgcaccctgcgtacacagaggaggagttgaggcggttcgaggaggagttggccgcacgtgaagctgagctaaacgcaaaggcccagcggctttcccaggaaacagaggccctaggaagaagccaaggccgactggaagcacagaaaagggagttgcagcaggcagtactgcacatggaacaaagaaaacagcaacaacaacaacaacagggacacaaagccccagctgcacatccagaggggcagctgaagttccatccagacacagatgatgtgcccgttcccgctcctgcaggagaccaaaaggaagtggatacttctgagaagaagctgctcgagcggctccctgaagtggaggtccctcagcacctgtag

SEQ ID NO: 233247 - DNA, 1386 bp, synthetic construct
  misc_feature 1..1386: note = Description of Artificial Sequence: Synthetic coding sequence
  source 1..1386: mol_type = other DNA
atgcctcccagtggcccacgcggaaccctgttactgctacctctgctgctattgttactgctcagagctgtgctggcagtgccgttggaaagaggggcaccgaacaaagaagagacccctgctaccgagtctccagacaccggtctgtattaccacagatatctccaagaagtgatcgatgtgctggaaacagacggtcattttagagagaaattgcaggcggctaacgccgaggatattaaatctggtaagctgagtcgagaactggacttcgtgtcccatcatgtacgaaccaaattggacgaattgaagagacaagaagtgtcccgcctcagaatgcttctgaaggctaaaatggatgccgagcaggatcccaatgtccaagttgaccaccttaatctgctgaagcagttcgaacatctcgatccccaaaatcaacacacttttgaagcccgtgatcttgaacttctgatccagacagctaccagggacctcgcgcagtacgacgcagctcaccacgaagagttcaagcgctacgaaatgctcaaagagcacgagaggagaagatatcttgagtcactgggcgaagagcagagaaaggaagccgaacgaaagctggaggaacagcagcggagacatcgcgaacaccccaaggtcaatgtgcccggatcccaggcccagctgaaagaggtgtgggaagagctggatggtctggaccccaacaggtttaatccaaagacgttctttatccttcacgacatcaatagcgacggtgtcctcgacgaacaagagctggaggccctgtttactaaagagctggagaaggtctacgatccgaagaatgaagaggatgatatgagggaaatggaggaagagaggctccgcatgagggaacatgtgatgaaaaacgtcgataccaatcaggacaggctggtgacattggaagagtttctggcatctacgcagagaaaagagttcggggacaccggtgagggatgggaaactgtcgagatgcaccccgcttataccgaagaggaactccgacggttcgaagaggagctggccgctagagaggccgagttgaatgctaaagcccagaggcttagtcaggaaacagaggccctcgggagatcccagggacgtttagaggcccagaaacgtgagctgcagcaggcagtgctgcacatggaacagcggaagcagcagcagcagcagcagcaggggcataaggccccagcagcgcatccagagggccagctgaaatttcaccccgacacagatgatgtacccgtccccgctcctgcgggagatcagaaagaggtggacacttcagaaaaaaaactcctagaaagactcccagaagtcgaagtccctcagcatctctag

SEQ ID NO: 233248 - DNA, 375 bp, synthetic construct
  misc_feature 1..375: note = Description of Artificial Sequence: Synthetic coding sequence
  source 1..375: mol_type = other DNA
atgccaccctctgggccacgaggcaccctcctcctcctcccacttctgctgctactgcttctccgtgccgtactagctgtgccattggagagaggagcaccaaataaagaggagacaccagctacggaaagcccagataccggactctactaccacagatacttacaagaggtgatagacgtgctggaaactgatgggcattttcgcgaaaaacttcaggctgccaacgctgaggacataaagagcggaaaattatcccgtgaacttgacttcgtgtcacatcacgtgcgcactaagctggatgaactgaagcgccaggaagtgagcaggctgcgaatgctcctgaaagctaaaatggacgcagagcaggattag

SEQ ID NO: 233249 - DNA, 336 bp, synthetic construct
  misc_feature 1..336: note = Description of Artificial Sequence: Synthetic coding sequence
  source 1..336: mol_type = other DNA
atgccaccctccggccctcggggtaccttgctgctgttgcccctcttactgctccttctcctcagagctgtgctggccgtgcccctggagagaggtgctccaaataaggaagagacgcccgctactgaaagccccgataccggcctctactatcacaggtatttgcaggaagttatagacgttttagagaccgacggacactttagagaaaagttgcaggctgccaacgccgaggacatcaagagtggaaagctgtcccgagagctggacttcgtttcccatcatgttcggactaagttggatgagctgaaacgacaggaggtgagcaggctctag

SEQ ID NO: 233250 - DNA, 1263 bp, synthetic construct
  misc_feature 1..1263: note = Description of Artificial Sequence: Synthetic coding sequence
  source 1..1263: mol_type = other DNA
atgcgctggagaactatcctgctgcagtactgcttcctgcttatcacctgccttttaacagctctagaggctgtgcccatagatatagacaaaactaaagtgcaaaacatacatccggtggaatctgcgaagatcgaacctccggacacaggtttgtactatgacgagtatctgaagcaagtgatcgatgtgcttgagaccgacaagcacttcagagagaagctgcagaaggcagacattgaggaaattaagtccggcaggctatctaaagaactagacctcgtgagccatcacgtgagaacaaagttggacgagctgaagcgacaggaggtgggaaggcttagaatgctcatcaaagctaagcttgacagcctccaagacatcgggatggatcatcaggccttgctaaaacagttcgaccatcttaaccacctgaaccctgacaaattcgaatcaactgacctggatatgcttatcaaagccgctacttcagatctggagcactacgacaaaacacgtcacgaggagttcaagaaatatgagatgatgaaggagcatgagcgacgggaatacctgaagaccttgaacgaagagaaaagaaaggaagaagagtctaaatttgaagagatgaagaagaagcacgagaaccaccccaaggtcaaccatcctggctcaaaggatcagctgaaggaagtctgggaagagactgatggtcttgatcctaacgattttgacccgaaaacatttttcaaactgcacgatgtgaacagcgacggatttctggatgagcaggagttagaggccctttttacaaaggagctcgagaaggtctacgacccgaaaaacgaagaagatgacatggtggagatggaggaggaacgactcagaatgagagaacacgtgatgtccgaggtagacaccaataaagataggctcgtaacactcgaggagttccttaaggctaccgagaaaaaggaattccttgagcctgactcttgggagactctggaccaacaacagtttttcactgaagaagaactcaaagagtacgagaatataatcgccctacaggaaaacgaactaaaaaagaaggccgatgagctgcagaagcaaaaggaggagctccagagacagcacgatcaactggaagcccagaaactggaataccaccaggttatccagcaaatggaacagaagaagctccagcaaggcattccccctagtggccctgcaggcgagctgaaattcgaacccagggtctag

SEQ ID NO: 233251 - DNA, 1173 bp, synthetic construct
  misc_feature 1..1173: note = Description of Artificial Sequence: Synthetic coding sequence
  source 1..1173: mol_type = other DNA
atgcgctggcggactatcctacttcagtactgttttctgctgatcacatgccttttgaccgcactggaggctgtccccatcgatattgataagactaaggtgcaaaacatacacccagtggaatctgctaaaattgaaccccctgacaccgggctttattatgacgagtatcttaaacaggtgatagacgtgctcgaaacagataaacattttcgcgagaagctgcagaaagcggacatcgaggaaatcaagtccggcagactctctaaggagttggacctggtgtctcaccatgtccgaaccaagctcgacgagcttaagaggcaggaggtcggtcgcttgcggatgttgattaaggctaaactggacagcctgcaagatatcggaatggaccaccaggcacttctaaaacagttcgaccatctgaatcacctgaatcctgataagttcgagtcgaccgacctggatatgctgattaaggcagccacgtctgacctggagcactatgacaagacgcggcacgaagaattcaagaagtacgagatgatgaaagagcacgagcgtagggagtatctgaagaccttgaacgaggagaaacgcaaggaggaggagtctaaatttgaagaaatgaagaagaagcatgagaatcacccgaaagtgaaccatcccggttcaaaggaccagcttaaagaggtttgggaggagacagacggacttgacccaaacgacttcgaccccaagacattctttaagctgcacgatgtgaatagcgatggcttcttggacgagcaagagctggaggcactctttaccaaggagttagaaaaggtgtacgatccaaaaaacgaggaagacgatatggtggaaatggaagaggaaagactaagaatgagggaacatgtgatgtccgagaccctggatcaacagcagtttttcaccgaggaagagctcaaagaatacgaaaatattatcgcccttcaggaaaacgagctaaaaaaaaaggccgatgagttgcagaaacagaaggaggagctccagcggcagcatgatcagcttgaggcacaaaaactggagtatcaccaggtgatccaacagatggaacagaaaaagctccagcaaggcatccccccaagcggaccagccggtgaactaaagttcgaaccacacatctag

SEQ ID NO: 233252 - DNA, 210 bp, synthetic construct
  misc_feature 1..210: note = Description of Artificial Sequence: Synthetic coding sequence
  source 1..210: mol_type = other DNA
atgcgctggcgcaccattctgctgcagtactgcttcctcctgatcacctgtcttctgacggcactggaagccgttcccatcgatatcgacaagacaaaggtccagaacatccaccccgtagagagcgcaaagattgaaccacccgacacggggctttactacgacgaatacttgaaacaagtgatagatgtcctcgaaaccgacaaatag

SEQ ID NO: 233253 - DNA, 105 bp, synthetic construct
  misc_feature 1..105: note = Description of Artificial Sequence: Synthetic coding sequence
  source 1..105: mol_type = other DNA
atgcgatggcggacaattctgctgcaatattgcttcttgctgattacctgcttgctgacagcactggaagcagtcccaattgacatcgataagaccaaagtatag

SEQ ID NO: 233254 - DNA, 1263 bp, synthetic construct
  misc_feature 1..1263: note = Description of Artificial Sequence: Synthetic coding sequence
  source 1..1263: mol_type = other DNA
atgcgttggcggacaatcctgcttcagtattgttttttgctcatcacctgtctgctcacagccctggaggccgtgccaatcgacatcgacaagacaaaggtccagaacattcatcccgtcgaaagcgcaaagatcgaacctccagataccggcctctactatgacgagtacctaaagcaagttattgacgtgctcgagacagacaagcatttccgcgaaaaactccagaaggccgatattgaggaaattaagtccggcaggctgtcaaaagagctggacctcgtgtctcatcacgtacgcactaagctagatgaactgaagcgccaagaggtggggagattgaggatgttgatcaaagcaaagttagatagtttgcaagacatcggtatggatcaccaggcacttcttaagcagttcgaccacctgaaccacttaaaccctgacaaattcgaatcaactgatctcgacatgctcattaaggcagcaacatccgatttggaacattacgataagacaagacacgaggagtttaaaaaatacgaaatgatgaaggaacacgaaagacgtgagtatttaaagacattgaatgaggagaaacgtaaagaagaggagtctaagttcgaggagatgaagaaaaagcatgagaaccacccaaaggtgaaccaccccggatcgaaggaccagctgaaggaggtttgggaggagacagacggattggatcctaacgattttgaccctaaaactttttttaaacttcacgacgttaattctgacgggttcctggacgagcaggaactcgaggctctctttacgaaagagcttgaaaaagtgtatgaccccaaaaacgaggaagatgatatggtcgagatggaggaggagcggctgcgtatgcgcgagcacgtgatgtctgaggtggacactaacaaagatcgtctggtgactcttgaggaattcttgaaagcaaccgagaagaaggaatttctcgagccagactcttgggagacattagatcagcaacagtttttcaccgaagaggagttgaaggagtatgaaaatattatagctcttcaggagaatgaactgaaaaagaaggctgacgaattacaaaagcagaaagaagaactccagcggcaacatgatcaactagaggcacagaaactggaataccatcaggttatccagcagatggagcagaagaagctgcagcagggcattccacccagcggaccagccggagaactgaaatttgaaccccatatatag

SEQ ID NO: 233255 - DNA, 588 bp, synthetic construct
  misc_feature 1..588: note = Description of Artificial Sequence: Synthetic coding sequence
  source 1..588: mol_type = other DNA
atgcgatggcggacaatacttctacagtactgctttctgctaattacctgtctcctgaccgctttagaagcagtgcctatagacattgacaagactaaggttcagaacatccatccagtggagtcagcaaagattgagccacccgacaccggtttgtattatgatgagtatcttaaacaagtgattgatgtgctggaaaccgacaagcatttcagagaaaaactgcagaaggccgacatcgaagaaatcaagagcggacgcctctctaaagagcttgacctggtatctcatcatgtcaggaccaagctggatgagcttaaacggcaggaggttgggaggttacgaatgctaatcaaggcgaagctcgactcattgcaggatatcgggatggaccatcaagccctcttgaaacagttcgatcacctgaatcaccttaaccccgataagttcgaaagcactgatttggatatgctgattaaagcagccactagcgatcttgagcactatgataaaaccagacatgaggaattcaagaaatatgagatgatgaaggaacatgagaggcgcgaatacctgaaaaccttatag

SEQ ID NO: 233256 - DNA, 597 bp, synthetic construct
  misc_feature 1..597: note = Description of Artificial Sequence: Synthetic coding sequence
  source 1..597: mol_type = other DNA
atgaggtggagaactattctgcttcagtactgttttttgttaattacttgtctactaactgctctggaggctgtgcctattgatatagacaaaactaaagtccaaaatatacatccagtggagtcagctaagattgagcctcccgacacaggcctctattatgatgagtaccttaagcaggttatagacgtcctggagactgataaacatttcagggagaagctgcagaaagcagatatagaggagatcaaaagcggaaggctgtcaaaggagcttgaccttgtttcccaccatgttaggaccaagctggacgagctgaagcgccaggaggtcgggagattaaggatgcttattaaggcaaaactcgacagtctgcaggacattggaatggaccatcaggccctgctgaaacagttcgaccatctgaaccatctgaatccagataaattcgagtccacagatctggatatgctgattaaggccgcaacaagcgatcttgaacactatgataagacacgccacgaagaattcaaaaaatatgaaatgatgaaagagcatgagaggagggaatacctcaaaaccttaaatgaggagtag

SEQ ID NO: 233257 - DNA, 105 bp, synthetic construct
  misc_feature 1..105: note = Description of Artificial Sequence: Synthetic coding sequence
  source 1..105: mol_type = other DNA
atgagatggcggactattctgcttcagtactgctttctgctgatcacctgcctgctcacggcgctcgaagccgtgccaattgatatcgacaagactaaggtgtag

SEQ ID NO: 233258 - DNA, 120 bp, synthetic construct
  misc_feature 1..120: note = Description of Artificial Sequence: Synthetic coding sequence
  source 1..120: mol_type = other DNA
atgcgctggcgtactattcttctgcagtactgttttctcttgatcacgtgtctccttaccgccctggaggccgtccccattgatattgataaaacaaaggtgcaaaatatccacccgtag

SEQ ID NO: 233259 - DNA, 210 bp, synthetic construct
  misc_feature 1..210: note = Description of Artificial Sequence: Synthetic coding sequence
  source 1..210: mol_type = other DNA
atgaggtggcgaacaatacttctgcagtactgctttctgctcattacatgcttactgacggctttggaagctgtcccaattgatatagataaaaccaaggttcagaacattcatcccgtagagtccgccaagatcgagccacccgacacagggctatattatgacgagtatctcaaacaggtaatcgacgtgctggaaaccgacaagtag

SEQ ID NO: 233260 - DNA, 273 bp, synthetic construct
  misc_feature 1..273: note = Description of Artificial Sequence: Synthetic coding sequence
  source 1..273: mol_type = other DNA
atgcgctggcggaccatcctgttgcagtactgcttcttgctaatcacttgtttactgacagcactggaggccgtgccaatcgacatcgataagacgaaagtgcaaaatattcatccggtggagtccgccaaaattgaaccgcctgacaccgggctgtactacgatgagtacttaaaacaggtcattgatgttctcgagactgataaacatttccgggagaagctccagaaggcagacatcgaggagattaagtctgggaggctctccaaatag

SEQ ID NO: 233261 - DNA, 1323 bp, synthetic construct
  misc_feature 1..1323: note = Description of Artificial Sequence: Synthetic coding sequence
  source 1..1323: mol_type = other DNA
atgattatcccttcattggaggagctggactctttgaagtactcagaccttcagaacctggccaagtctcttggactgcgggcaaacctcagagcaacgaagcttttaaaagctctcaaagggtacattaagcacgaggcaagaaagggcaatgaaaatcaggatgagtcacagacatctgcatcctcctgcgatgagaccgagatccagatttccaatcaagaggaggccgaacgtcaacctctgggacacgtgaccaagactaggcggagatgtaagaccgtccgggtggatcccgatagtcagcagaatcattctgagatcaaaatctccaatcccacagaatttcagaatcacgaaaagcaggagtctcaagatttgcgggctacagctaaggtgccaagcccacccgatgaacatcaggaggccgagaatgctgtctctagtggtaatagagatagcaaagtcccttccgaggggaagaaatccttatatacagatgaaagctcaaagccaggaaaaaacaaaaggactgcaatcactacccccaactttaaaaagttacatgaggcacatttcaaggaaatggagagcattgaccagtatattgaaaggaaaaaaaagcatttcgaagagcataactcgatgaacgaattgaaacaaccgataaataagggcggagtacgtaccccggtgccacccaggggtcgtctgtctgtcgctagcacacccattagccagcgcaggtcccaagggagaagctgtggcccagcaagccagtcaaccttggggcttaaaggctccctgaaaaggagtgcaatcagcgccgcaaagacaggtgtgcgtttcagtgccgcaacaaaagacaatgaacataaacgaagcttaacgaaaacccccgcacggaaaagtgctcatgtaactgtcagcggcggaacgccaaagggagaggctgtcctcgggactcacaaactgaagaccatcacgggaaactccgccgctgtgattacaccatttaagctgacgacggaggccacccaaacaccggtctccaataaaaaacccgtgttcgatcttaaggccagtcttagcaggccgctaaactacgagccacacaaaggtaaactgaaaccatgggggcagagcaaggaaaataattatcttaatcaacacgtcaataggattaacttttacaagaagacttacaaacagccccacttacagactaaggaagaacagaggaagaagcgtgagcaggaaaggaaagaaaaaaaagccaaggtgctggggatgcgaagaggacttattctagctgaagattag

SEQ ID NO: 233262 - DNA, 1209 bp, synthetic construct
  misc_feature 1..1209: note = Description of Artificial Sequence: Synthetic coding sequence
  source 1..1209: mol_type = other DNA
atgattatccccagtctggaggaactggactctctgaagtatagcgaccttcagaatttggccaaatccttgggcttgagggcgaatctccgggctaccaagctcctcaaggctctcaagggctacataaagcacgaggccaggaaaggcaatgaaaatcaggacgaatcacagacatccgcttcatcatgcgatgagactgaaattcagatcagcaaccaggaggaagctgaaagacagccattgggtcatgtgacaaagacccggagaagatgcaagaccgtcagggtggaccctgattctcagcagaaccacagcgaaattaaaattagcaacccaaccgaattccagaatcacgaaaagcaggaaagccaggatttgcgggctactgctaaagtccccagccctcctgatgaacatcaggaggcagagaacgccgtgtcttcgggcaacagggactccaaagtgccttcagaaggcaagaagagtctctacaccgacgaaagtagtaaacctggcaaaaataagaggaccgcaattacaacgcctaattttaaaaaactgcacgaggcccactttaaggaaatggagagtatcgatcagtatatagagagaaaaaaaaaacatttcgaggaacacaactcaatgaatgaactcaagcagcagccaattaacaagggtggcgtccggactccagtcccgccaaggggtagactctccgtcgcgagcactccaatttcacagcgaaggtctcagggtcgcagttgcgggcctgcttcacagagcacccttgggctgaagggcagcctgaagaggtctgctatatccgctgctaagacgggcgtccgcttttcagctgctacaaaggataatgagcacaagaggtcactaaccaaaaccccagcaaggaagagcgctcatgtgaccgtgtcaggaggaacccccaaaggagaggccgtgctcggcacgcacaagttgaagacgatcacaggcaactctgcagctggaaagttaaagccttggggccagtccaaagagaataattatctgaaccaacatgtcaatcgcatcaatttctacaaaaagacttacaaacagccccacctccagacaaaggaggaacagagaaaaaagagggagcaggaacggaaagagaaaaaggcaaaggtgctcggaatgcggcgagggctgattctggccgaggactag

SEQ ID NO: 233263 - DNA, 1326 bp, synthetic construct
  misc_feature 1..1326: note = Description of Artificial Sequence: Synthetic coding sequence
  source 1..1326: mol_type = other DNA
atgataattcccagccttgaggagctggattctcttaagtactcagatctccagaacttggccaagtctttgggcctccgagccaacctccgcgcaacgaaattgctaaaggctctaaaagggtacatcaagcacgaagcgagaaaaggcaatgagaaccaagatgaatcacagacttccgcatcttcctgtgatgagacagagatccagatttcaaaccaggaggaggctgaaagacagcctctcggtcacgtaacaaaaacacgaaggaggtgtaaaacggtacgcgtagaccctgatagccagcaaaaccactctgagatcaagatatcaaaccccaccgaattccagaatcatgaaaagcaggagagccaggacctgcgagccactgcaaaggttccctctccaccagacgaacatcaggaggcagaaaacgctgtttcttcaggaaatagggattcaaaagtgccttccgaaggcaaaaagagcctgtacaccgacgagtcctcaaaacctgggaagaacaaaaggaccgctattaccacccccaactttaaaaagctgcatgaagctcactttaaagaaatggaatctatagatcagtacatcgagcgtaaaaagaagcacttcgaggagcacaatagcatgaatgagctgaagcaacagcctattaataagggcggagtgagaaccccagtacctcctcgtggccgtctgagcgttgcttccacccctatctcgcagaggcgtagccaaggcaggtcatgcggccctgcctcccaaagtaccctgggcctgaaaggtagcttaaaaaggtctgccatatctgccgctaagacaggtgtgcgttttagcgccgctacaaaggacaacgaacataagcggagtcttactaagactcccgctcgcaagtctgcacacgtaaccgtctccggcggtacccccaagggcgaggctgtgctggggacacacaaactaaagactattaccgggaattcagccgcagtcataacaccttttaaactgacaacggaggccacacaaactccagttagcaataaaaagcccgtctttgatctgaaggcatctctgagcaggcctctgaattatgaacctcataaagggaagcttaagccctgggggcagtctaaagagaacaattacttaaaccagcacgtgaaccgaatcaatttctacaagaagacttacaaacagcctcacttgcagactaaggaagaacaaaggaaaaagcgggagcaggagaggaaggagaaaaaagctaaggtgctaggaatgaggcgcggtctgattcttgccgaagactag

SEQ ID NO: 233264 - DNA, 1323 bp, synthetic construct
  misc_feature 1..1323: note = Description of Artificial Sequence: Synthetic coding sequence
  source 1..1323: mol_type = other DNA
atgatcattccttccctggaggagctggacagccttaagtactccgacctccaaaatctggcgaagtcactggggctccgggctaatctgagagctaccaaactgctaaaggctcttaagggctacatcaagcacgaggcacggaaagggaatgaaaatcaagatgaatcgcagacttccgccagttcctgcgacgagacagaaattcagatttccaaccaagaagaggccgagagacaacctctgggccatgttaccaaaactcgcagacgttgtaagacagttcgtgtggaccctgattctcagaatcactcggaaattaagattagcaaccccacagagttccagaaccacgagaaacaagaaagtcaagatctgcgggctactgccaaagtgcctagccccccagatgagcaccaggaggctgaaaacgccgtgagctccggaaatcgggattctaaggtgccatccgagggaaagaagtctctttatacagacgagtcttccaagccaggcaaaaataagcgaacagccatcacgacacccaactttaaaaagctgcacgaggctcactttaaagaaatggagtctatcgatcagtacatcgagcgcaaaaaaaagcatttcgaagagcacaactcaatgaacgaactgaaacagcaacctatcaacaaggggggagtgcggacacccgttccaccaaggggccgactgtcggtggcctctacacccatttctcagcggcgttcccaaggaaggtcatgtggcccagcatcacaatcgacactgggtctgaagggctcgctgaaacgctcagcaatatctgcggctaagacaggtgtgcggttctcggctgccaccaaggacaacgaacacaaaaggtctctcacaaaaaccccggctaggaagtccgcgcacgtgaccgtttctggcggtacccctaagggtgaggctgtcctcgggacccataagctgaagacaattaccggtaactccgccgcagttataactccatttaaactgacaaccgaggctactcagacccctgtgagtaacaagaaaccagtcttcgatttgaaagcatcgctgagccgtcctctgaattatgagccccacaagggaaagttgaaaccctgggggcagagtaaagagaacaactaccttaatcagcacgtgaacaggatcaacttttataaaaaaacttacaaacagcctcatctgcaaaccaaggaggagcaaagaaagaaacgggaacaggagcggaaggagaagaaggcgaaggtattggggatgagaaggggactaatcttggcagaagactag

SEQ ID NO: 233265 - DNA, 1320 bp, synthetic construct
  misc_feature 1..1320: note = Description of Artificial Sequence: Synthetic coding sequence
  source 1..1320: mol_type = other DNA
atgatcatccctagcctcgaagaactcgattctcttaagtacagcgacctacagaatttagccaagtctctggggctccgcgctaacctgcgtgcgacaaagctactgaaggccctgaaagggtatattaagcatgaggctcgaaagggtaacgaaaatcaggatgaaagtcagaccagcgcttcctcctgcgacgagacagaaatccagatttccaaccaggaggaggccgaaagacaaccactgggccacgtgaccaaaacccgcaggaggtgtaaaactgtgagagtggatccagattctcagaatcactcagagatcaaaatctcaaatcccactgagttccagaaccatgagaaacaggaatcacaggacctcagggccaccgctaaggtcccctcacccccagacgagcatcaggaagctgagaatgctgtaagctctggtaatagagacagcaaggttcctagtgagggtaagaagtcactgtacaccgacgaaagcagcaagccaggcaaaaacaagcggactgccattacaacacctaactttaagaagctgcacgaagcccacttcaaggagatggagtccattgatcagtatattgagaggaagaaaaaacacttcgaggaacataactcgatgaacgaactgaagcagcctatcaataaggggggtgtgaggacgcctgtgccacctcgcggaagactgtcagttgcatccaccccaatctcacaaaggcgttcacaaggcaggagctgcggccctgcctcacagtctacgctgggattaaagggcagtcttaaacggtctgccattagtgccgcaaaaactggggtccggttctctgccgctacaaaagacaacgagcacaagcggagtttaacaaaaacacctgccagaaagagcgcccacgtgaccgtttccggcggaacaccaaaaggcgaagccgtcctagggacacataaactgaaaacaatcactggtaattccgcagcagtgatcactccattcaaactgaccaccgaggccacccagaccccagtcagcaacaagaaacctgtgtttgacttgaaagcgagtttatctagacctttgaactatgaaccccataaaggtaagttgaaaccctggggccagagcaaagagaataattacttgaatcagcatgtaaaccgaataaatttttacaagaaaacttataaacagccgcacctacaaactaaggaggaacaacggaaaaaacgcgaacaggagagaaaagagaaaaaggcgaaagtgctgggtatgcgtcgcggtctcattctggccgaggactag

SEQ ID NO: 233266 - DNA, 1281 bp, synthetic construct
  misc_feature 1..1281: note = Description of Artificial Sequence: Synthetic coding sequence
  source 1..1281: mol_type = other DNA
atgataatccccagtcttgaagaactagacagcctgaaatactcggatttacagaacttagcaaagtctctggggctcagagccaacctacgggcaactaaacttcttaaggcactcaaaggttatatcaaacatgaagctagaaaggggaacgagaatcaagatgagagtcagactagcgcttcatcctgcgacgaaaccgaaatccagatatctaaccaagaggaagccgagagacagccactggggcatgtgaccaagactcgccgacgctgcaagactgtgcgtgtggatccagattctcagaatcacgaaaaacaagaaagccaggacctgagggcaactgcgaaggttccatcccccccagatgaacaccaggaagctgaaaacgccgtgtcatcaggcaaccgtgatagcaaggtcccctctgaaggaaaaaagtctctctacactgatgagtccagcaaacctggtaagaataagcgaaccgctattacaacccctaacttcaagaaactccacgaggcgcattttaaagaaatggaatcaattgatcaatatatcgaaagaaaaaagaagcattttgaggagcacaattccatgaatgaacttaagcaacagcctattaataaggggggtgtaagaacaccagtgccaccaagggggcgactcagtgttgcttcaaccccgatctcacagcgaaggagccagggtagatcttgtggaccggcttcacagtccacactgggtctcaaaggatcactaaagagaagcgccatctcggcagcaaaaacaggggtgcgtttctccgccgctactaaggacaacgagcacaaaagatctctgaccaagaccccagcacgcaagtccgcccacgtgacggtcagcggtgggactccgaaaggggaagcagtgctgggaacacataagttaaagacaatcacaggcaactctgccgcagtcatcaccccttttaagctcacaaccgaagctacccagacccctgtcagcaataagaagcccgttttcgatctgaaggccagcctgtcccggccactgaattacgaacctcataaagggaagttaaagccatggggacaatcaaaggagaacaactacctcaatcaacacgttaaccggattaatttctataaaaagacctacaaacagcctcatctgcagaccaaggaggagcaacggaagaaaagggagcaggaaaggaaagaaaagaaggcaaaagtgctgggtatgaggcgaggacttatcttggcagaggattag

SEQ ID NO: 233267 - DNA, 2250 bp, synthetic construct
  misc_feature 1..2250: note = Description of Artificial Sequence: Synthetic coding sequence
  source 1..2250: mol_type = other DNA
atggccgctgctggaagccggaagcggaggttggcggagttaaccgtggacgagtttctggcgtcgggattcgactccgaatccgagtctgagagcgagaacagcccacaggccgagaccagggaagccagagaagctgcacggtctcccgataagcccggaggcagcccatccgcaagtaggagaaagggacgtgcttcagagcataaagatcagctgtctagactgaaagacagagatcctgaattctataagtttcttcaggaaaacgaccagagtctgctgaatttctccgactctgatagtagcgaagaggaggagggccctttccactccctacccgacgtgttggaagaggccagcgaagaggaggacggggctgaagagggtgaggatggcgaccgggtgccaaggggactaaagggaaagaaaaacagcgtcccggtgacggtggcaatggtggaacgctggaagcaagcggctaaacaacgattgaccccaaagctgtttcacgaggttgtgcaggcctttcgggctgctgttgcaaccacccgcggtgaccaggaaagcgctgaagctaacaaattccaagtaaccgactccgccgctttcaacgcactggtgactttctgtatccgcgatcttattggatgcctgcagaagctgctgttcggaaaggtggctaaggatagtagccgcatgttgcagccctcctcttcgcctctgtgggggaagctgcgggtagatatcaaggcctacctgggcagcgcgattcaactggtaagctgtttgagcgagaccacggtgctggcagcagtcctgaggcatatctccgttctggtcccctgtttcctgacctttccaaaacagtgtcggatgctgctgaaacggatggtgattgtgtggtcaactggtgaagaatccctgcgtgttctcgcctttctggtcctgtctcgcgtgtgcaggcacaagaaagatacgtttcttggacccgtccttaaacaaatgtacataacgtacgttcggaattgcaagtttacttcgccaggagccctcccttttatctcgttcatgcagtggacactgaccgagttgctggctctggagccaggcgtcgcctaccagcatgcctttctctacatccggcaactagctatccatctgcggaacgccatgacgactagaaagaaagagacatatcaaagtgtgtataattggcaatatgtccattgtttattcctctggtgtcgcgttctttcaaccgccggtccatccgaggccttgcagcccctcgtgtacccgctggcccaggtgattatcggttgtattaaactcatccctacagcaaggttttacccgctccggatgcactgtattcgcgctctaaccctgttgtcaggatcaagcggtgctttcatacccgtgctaccctttatactggagatgttccagcaggtagattttaatagaaaaccagggaggatgtcttccaagccaatcaacttttctgtcatccttaaactcagcaacgtgaacttacaagagaaggcataccgagacggtcttgtggagcagctgtatgacctcacactggaataccttcactcacaagcccactgcattgggttccccgagttggttctccccgttgtcctgcagctgaagtcattcctcagggagtgtaaggtcgctaattactgtaggcaagtacagcaattactgggaaaggttcaggaaaattccgcctatatttgctccagaaggcaacgcgtgagttttggcgtcagtgaacaacaggcagtggaggcttgggagaaacttacccgggaggaggggaccccattaaccctctattactcacattggcgtaagctgcgggatagagaaatacagctggagatatccgggaaggaacgcctggaggatttgaactttcctgaaattaaaagaagaaagatggctgatagaaaagacgaggatcgaaaacagttcaaggacttgttcgaccttaactccagcgaagaggacgacactgagggattttccgaacgcggtatcctgcgaccactatccacgcgccacggcgtggaggatgacgaggaggatgaggaagaaggcgaagaggatagctctaactccgaagacggggacccagacgctgaagcaggactcgcccctggggagctgcagcagttggcccaggggccagaggatgagctggaggacctccagctctctgaggatgactag

SEQ ID NO: 233268 - DNA, 2403 bp, synthetic construct
  misc_feature 1..2403: note = Description of Artificial Sequence: Synthetic coding sequence
  source 1..2403: mol_type = other DNA
atgaagttcaggcgaaacaagaaacagatcccttcgtttcgaaagctgataaagacttcaaaggtgaaactagaaaataaactgaaaaataaacaattcaagcaacagtccactttgaagaagtataggaaggagcagcggaaactccggcaggcagttaaagacgccgtgtccaaaaaacccattccattggagaaccctaaagaaaagaggcccggaaagaggatcgaacgagaagaagaagaagaggaggaagctctacctttagatatgatggacgaggacgacctccagctgatgaaggacctgggtcaacgcgtctcattcctgacgagagacctctctagctcggagccagtgcacgctaaaaaacggaaacacgagcgaatcatagacaaatatgaaaagatcccaaggacactgcagaccgcacctgagaaagaactcattcatctgttgcctatcaaagacaagagtgggattataccacagacccgtgagaaacccgttacagattccaataaagacgaggaagaccaagaggaggagagggagctggaagaggagataatcgaggaccccatccaggagctcaccatcgaggaacacctgattgaacggaaaaagaaactacaagagaaaaaaatgcatattgctgccctggcatcggcaatattgagcgaccccgagaacaatatcaagaagctcaaagagcttcgttctatgctgatggagcaagatcccgacgtcgcagtcaccgttaggaagctggtcatcgtgagcctcatggagcttttcaaggatattaccccatcctataagattcgaccactgacagaggcagagaagtcaacaaagacacgcaaagagacccagaagctgcgtgagtttgaggagggcctggtctcccagtacaagttctatctcgaaaatctagaacagatggtgaaagattggaagcagaggaagctgaagaaaagcaatgttgtgagtctgaaagcttacaaaggtctggctgaggtggccgtgaagtcactctgtgagctgctggtagcgctgccccatttcaacttccataacaatatcatcgttctgattgttcccctgatgaacgacatgtctaagctgatttcagagatgtgttgcgaagccgtgaaaaagctgttcaagcaggataagctcggacaggcctccctaggcgtgattaaggtcatttccggcttcgtgaaggggagaaactacgaggttagaccagaaatgctcaagacctttttgtgccttagaatcaaagaggtagaagtcaagaaggacaccgaagatatcaataagcccaagaagttcatgacgtttaaagagaagagaaagagcctgtctagaatgcagcggaagtggaagaaggctgaggagaaattggaacgcgagctgcgcgaagctgaggcttccgaatcaactgagaaaaaactcaaattgcacacagaaaccctcaatattgtgttcgtcacttactttcgaattttgaagaaggctcaacgctctcctctgttaccggctgtgctggaggggctggctaaatttgcccaccttatcaatgtggagttctttgacgacctgcttgtagtacttcataccttaatcgagtccggcgatctgagttaccaggagtccctgcactgcgttcagacggcttttcatattctatccggccaaggagatgtattgaacatagacccacttaagttctatacccatctttacaagactctgtttaagctacacgccggagctactaacgagggagtggaaattgttctccagtgtctggacgtaatgctaactaaacgcagaaaacaggtatcccagcaacgggctctcgcgtttataaagaggctgtgtactctggcgctgcatgtcctgcccaatagctccattggaatactggcaactacgcgcattctaatgcacaccttccctaagacagatctgctgttggatagcgagagtcagggctccggagtattcctgccggagctcgatgagcccgaatattgcaacgcccagaataccgctctgtgggaactgcatgcattacgtcgccactaccacccaattgtgcaaagattcgcggcacaccttatcgcgggtgctcccagcgaaggcagtggtgctttaaaacctgaattaagtcgccgaagcgctacagaattatttgaagcctatagcatggctgagatgaccttcaatcctcctgttgaaagctctaacccgaaaattaagggcaagtttttgcaaggggacagttttctcaacgaggacttaaaccagctgatcaagcgctattcttcggaggtggccaccgagtccccgctggacttcactaaatacctaaagacctcgctgcattag

SEQ ID NO: 233269 - DNA, 2403 bp, synthetic construct
  misc_feature 1..2403: note = Description of Artificial Sequence: Synthetic coding sequence
  source 1..2403: mol_type = other DNA
atgaaagccaggagaaataaaaagcagataccaagctttaggaagttgatcaagacctccaaggttaagttagaaaacaagctgaaaaataagcagtttaagcagcagagtactctcaaaaaataccgaaaagagcaaaggaaacttcggcaggctgtaaaggacgccgtctctaaaaaaccgatcccactagaaaaccctaaagaaaaaaggcccggaaagcggattgaaagagaggaagaggaggaagaagaggctcttcccctcgacatgatggatgaggatgatttgcagctgatgaaggatttggggcaacgcgtctcttttttaacaagagacttatcaagttccgagccggtgcacgcgaaaaaaaggaaacacgagaggatcatcgataagtatgagaaaatcccgaggaccctgcagaccgcccctgaaaaggaactgatacacctgctgccaataaaggacaagtctggcattatcccacagactagagaaaaacctgtcaccgactccaacaaggatgaagaagatcaggaagaagagcgcgaactggaagaggagattatcgaagaccccatacaagaattgacaatagaagaacatctgatcgaacgcaagaaaaagctgcaagaaaagaagatgcatatagcggctctcgcttcagccattctttcagatcctgaaaacaacatcaagaaactgaaagaattgaggagcatgctgatggagcaggatcccgatgtggcagtcactgtaaggaaacttgtgattgtgtccctgatggagctctttaaagatataactcctagttataagatcagacctctgaccgaggccgagaaaagtaccaaaacccggaaggaaacccagaaacttcgggaattcgaagagggtctggtctcgcagtacaagttttatctggaaaatcttgagcaaatggtcaaagactggaaacagcgcaaactgaagaagtcaaacgtcgtcagtctcaaagcatataaaggcctggccgaagtggctgtgaaatcactctgcgaactgcttgtggcactgcctcattttaatttccataataacatcatcgtgctcattgttcccctgatgaatgacatgagcaaacttattagtgagatgtgttgcgaagcagtgaaaaaactgtttaaacaggacaaattgggtcaggcctcacttggcgtaatcaaggtgatctccgggtttgttaaagggcgtaattacgaagtcagacccgagatgctaaagacttttctctgcctgaggatcaaggaggttgaggtgaaaaaggacacagaagacatcaacaagcccaagaaatttatgacgttcaaggaaaaaagaaagtccctgagtcgcatgcagcggaagtggaaaaaggccgaggaaaagctggagagagaacttcgagaagcagaagcctcagaaagcaccgagaaaaagcttaaactgcacacagagacgctgaatatcgtcttcgtcacgtacttccgtatcttgaagaaggcgcagcgtagtcccctactgccagcagtattggagggcctggccaagttcgcacatttgataaatgttgaattctttgacgatctcctggtggtgctccacactctcattgaatccggcgacctgtcttatcaggaaagtcttcactgcgttcagacagcctttcatattttgagtggccagggcgacgtactgaatatcgatcctcttaagttttatactcacctgtataaaactttgtttaagctgcacgcgggtgccacaaacgagggggtggagatcgtgcttcagtgcctggatgtcatgctgactaaacgacgaaaacaggtgagccaacagcgcgcattggccttcattaaaaggctgtgcacattagctttacacgtcctccctaatagctctattgggatcctggctaccacgcgcatccttatgcacacattccctaaaaccgatcttctcctggatagcgaatcccagggcagcggcgtgttcctcccagagctcgatgagcctgaatactgtaatgcgcagaatactgctctgtgggagctgcacgcccttcggcgacattaccatccaatcgtgcagagatttgccgcacacctaattgcaggagccccaagcgagggcagtggcgcactgaagcccgagctctctcggaggagtgccaccgaactgtttgaagcatactctatggcagagatgaccttcaatccacctgtggagtccagcaaccctaagatcaaaggaaaatttctgcaaggagattcttttttgaacgaagatctcaaccaactcataaaacggtactcctccgaagtagctaccgaatccccactggattttacaaagtacctgaagacttcactgcattag

SEQ ID NO: 233270 - DNA, 1506 bp, synthetic construct
  misc_feature 1..1506: note = Description of Artificial Sequence: Synthetic coding sequence
  source 1..1506: mol_type = other DNA
atggaactgttcaaagacataaccccttcatacaagatccggcctctgaccgaagctgaaaagagtacaaagacacggaaggagacccaaaagctgagggagtttgaagaagggctcgtcagtcaatacaagttctacctcgaaaatctggaacagatggtgaaagattggaaacagcgcaaactgaaaaaatctaatgtggtgagcttgaaggcctacaagggccttgccgaagtcgcagtcaaatccctttgcgaactacttgtcgcactgccccacttcaacttccacaacaatattatcgtcttaatcgttccattgatgaacgacatgtccaagctaatcagtgagatgtgttgcgaggcggtgaagaagctgttcaagcaagataaactcggtcaggcctccctgggcgttatcaaggtgataagtggattcgtgaaaggcaggaattacgaagtgcgcccagagatgcttaagacctttctgtgtctccgaattaaagaggttgaagtcaaaaaggacacggaggacatcaataagcctaagaaattcatgacattcaaagagaagagaaaatccctgagtcgtatgcagcggaagtggaagaaggctgaggagaagttggaaagggaacttcgcgaagcggaggcttccgagagcacagagaaaaaattgaaactccatactgagactctaaacatcgttttcgtgacgtattttagaatcctcaagaaggcacagcggagccctctcctccccgcagtgctggaggggcttgccaagttcgctcatctgatcaatgtcgaattcttcgacgatctgctggtagtgctacacaccctcatagagagcggtgatttgagctatcaggagagccttcattgtgtgcaaacagccttccacatcttaagcgggcagggggatgtcctcaatatcgatcctctgaagttctacacgcatctttacaaaaccctgtttaagttgcacgccggtgccaccaacgagggcgtggagatagtgctgcagtgcttggacgtgatgttgactaaacgtaggaagcaggtttctcagcaaagggcccttgcattcattaagagactctgcaccctcgcgctccacgtgctgccaaatagttccattggtatcctagccaccacgagaatactgatgcatacgtttcccaaaacagatctgctgttggattcggagagccagggatccggggtatttctccctgagctggacgaaccagaatactgcaacgcccagaacactgcattgtgggagcttcacgccttgcgcagacattatcaccctattgttcaaaggttcgcggctcacctgattgccggtgccccaagcgaaggatctggcgctcttaaaccggagctgtctcgacgcagcgcgaccgagctgtttgaagcctactccatggctgagatgaccttcaatccgccagtcgagtcttccaaccccaaaataaaagtgaccactaagggttag

SEQ ID NO: 233271 - DNA, 1551 bp, synthetic construct
  misc_feature 1..1551: note = Description of Artificial Sequence: Synthetic coding sequence
  source 1..1551: mol_type = other DNA
atggaacgagaacccggtgcagccggtgtgcggcgagccctgggaagaagattggaagcggtgctggcctcccggagcgaagccaatgcggtcttcgacattttggctgtgctgcaatctgaagatcaagaggaaattcaagaggctgtcagaacgtgttcgaggttgtttggcgcattgctggagaggggagagctgtttgtcgggcagctgccctcagaagagatggtgatgacaggctcacagggagccacccgaaaatacaaggtgtggatgaggcataggtaccattcgtgttgcaaccgtctgggcgaactcctgggacacccatcttttcaggttaaggagcttgctctgagtgccttactaaaattcgtgcagctggagggtgcccaccctctagagaagtctaaatgggagggcaactacctgttcccaagagaactttttaagctagttgtcggtggactcttgtcacctgaggaagaccagtcgttgctcttgagccagttcagagaatacttggactatgacgataccaggtatcatactatgcaggctgctgtggatgcagtcgcgcgagtgaccggtcaacatccagaggtgcccccagctttttggaataacgctttcactttactgagcgcagtcagcctgccacgacgcgagccaaccgtgtcaagcttttatgttaagcgcgctgagctctgggacacctggaaggtggctcacttaaaggaacaccggagggtgtttcaggctatgtggctctccttcctgaaacataagttgcctctgagcttgtacaaaaaggtcctcttaatcgtccacgacgcaatcctgcctcagctggctcaaccaacgttgatgatcgattttctgacacgggcttgtgacctcgggggtgccctgtccctcctggctctgaatggactcttcatcctcatccataagcacaatttagaataccctgacttctaccgaaagttgtacgggttgctagacccatctgttttccacgtgaagtatcgcgctaggttctttcaccttgcagatctctttctgagcagtagtcacctgcccgcatacctggtggccgctttcgccaagcggctggccaggctcgctctcacggctccaccagaagcactgttgatggtgttgccattcatctgcaatctattgaggaggcatcccgcatgccgcgtcctggtccaccgcccacatggccctgagctagacgcggatccttacgacccgggagaagaggaccccgctcagagcagagcactggagagctccctgtgggaattacaggcccttcagcgacactatcaccctgaggtttccaaggccgcttctgtgatcaaccaagcgctgagtatgcccgaggtatccattgcccctctgctcgagttgaccgcatatgaaattttcgaaagggatctgaagaaaaaggggcctgagccagtgcccctggaatttatacccgctcagggactgttaggtcgcccaggggaactgtgcgctcagcactttaccctgagctag

SEQ ID NO: 233272 - DNA, 252 bp, synthetic construct
  misc_feature 1..252: note = Description of Artificial Sequence: Synthetic coding sequence
  source 1..252: mol_type = other DNA
tgacccgaagagcttaccttcgcctctgctcaagctgaagcgagagaggaagagagacgggtgcgagagacagttcgcagagacaagactctactcaaagagaaacggaaacgtagggaagaactcttcatcgagcaaaagaagcgaaaactgctgcctgacaccattttggagaaattgactactgcgtcccagactaatataaagaaaagtcctggtaaggtgaaggaaggcatgacgatcctgatttag

SEQ ID NO: 233273 - DNA, 774 bp, synthetic construct
  misc_feature 1..774: note = Description of Artificial Sequence: Synthetic coding sequence
  source 1..774: mol_type = other DNA
atggtgcaactgcgccctagggctagccgtgctcccgcaagcgcagaagccatggtcgacgagggacagttggcctcagaggaggaggaggcagaacacggactgttactgggtcagccgtcatctggggcagcggctgagccactcgaagaggacgaggagggtgatgatgaatttgacgacgaggcacccgaagagttgacatttgcttcagctcaggcggaggccagagaagaggaacgtagagtgagggagaccgtgagacgagataagactctgttgaaggagaaacggaagagacgcgaagaactcttcatcgagcagaagaaacgcaaacttctgccagataccattctggagaaactcaccactgccagccaaacgaacatcaaaaaaagccccggaaaagtgaaagaagtgaaccttcaaaagaaaaatgaagactgtgaaaagggcaacgattctaagaaagtcaaagtacagaaggtgcagtccgtgtctcagaacaagagctacctcgcggtacggctgaaggatcaagatctccgggattcacgtcaacaggccgcacaagcctttatccacaactctctgtatggacccggaacaaacagaaccaccgtgaacaagtttctgtcgctagctaataagcgactgcctgtgaagagggcggcagtccaatttctcaacaatgcatgggggatccagaagaaacagaatgccaagcggttcaaacggagatggatggtgcggaagatgaaaactaagaagtag

SEQ ID NO: 233274 - DNA, 3300 bp, synthetic construct
  misc_feature 1..3300: note = Description of Artificial Sequence: Synthetic coding sequence
  source 1..3300: mol_type = other DNA
atgtccgtcctgaataagacaaagtggaagggcggaaccctccagatccagcttgccaaggagtcctttcttcaccggttagcccaggagagggaagctgctaaggccaagaaggaggagtcaacgactggaaatgccaacctgctcgaaaagactggtggtgtggacttccatatgaaggccgttccgggaacagaggtccccggtcacaaaaactgggtcgttagtaagtttggacgcgtcttgcctgtattacacctcaaaaaccagcacaagagaaaaattattaaatacgatccgtcaaagtactgccacaaccttaaaaagatcggggaggacttcagtaacactattcctattagtagtttgacgtgggaacttgaaggaggtaacgatccaatgtcaaagaagagaaggggggagttcagcgatttccatgggccacctaaaaaaatcataaaagttcagaaagacgagagttccacggggagtctcgcaatgagcaccaggcccagacgggtcatcgagaggccaccattaacccagcaacaagctgctcagaaacggacatgtgacagcatcaccccaagcaagagtagccctgttcccgtttccgacactcagaagctgaaaaacttgccattcaagacaagtggattagagactgctaagaaacgcaattcgatcagcgacgatgacactgattcggaggacgaacttcgcatgatgattgcgaaggaggagaacctgcagcgaaccacccagccctccatcaatgaatctgagagcgatccattcgaggtagtgcgggatgacttcaagagcggtgttcataagctccactcactcattggattaggcattaaaaatagggtgtcttgtcatgacagtgacgacgacatcatgcgtaatgacagagagtatgactctggtgacaccgacgaaatcattgccatgaaaaagaacgtcgccaaggttaaaaactcaacggaattttcgcagatggagaaatcaacaaaaaagacctcgttcaaaaatagggagaactgcgagttatctgaccactgtatcaaattgcaaaagaggaagagtaacgtggaaagcgccttgagccacggtctgaagagcctgaatcgtaaatcacctagtcattcatcatcatcggaagacgccgattctgcgtctgaacttgctgatagcgaagggggtgaggagtacaacgcaatgatgaagaactgtctccgcgtgaaccttactctcgccgatctagaacaactagcgggttcggacctgaaggtgccaaatgaggataccaaatccgacggacccgagacaactacacagtgtaagttcgacaggggaagcaaaagtccgaagacccctacaggattacggaggggccgacaatgtatcaggccagcggaaatagttgcaagtctgttagaaggggaagagaatacctgcggtaagcaaaaaccaaaggaaaataacctcaagccgaagtttcaggcttttaagggtgtgggctgcctgtatgaaaaggaaagtatgaaaaagtccctcaaagactctgttgcaagtaataataaggatcagaacagtatgaagcacgaggacccttccatcattagcatggaggatggctctccatacgtcaacggctccttgggcgaggtgaccccctgccagcacgctaagaaagccaacgggccaaattacattcaaccacagaaaaggcagacgacgttcgagtcacaggacagaaaggcagtgagcccaagctcatctgagaaaaggagtaagaaccccattagccgtcccctggagggcaaaaagagcttgtcactctcggctaaaacccacaatatcggatttgataaggacagttgccattccaccactaagaccgaagcctctcaggaggaacgctcagacagcagtggcctgacatccttaaaaaaatcccccaaggtaagcagcaaagatacgcgggagattaagactgatttcagcctgagcatttccaatagttcagacgtgtcagccaaagacaagcatgccgaggataatgagaagagactggctgctctggaagctagacagaaagcgaaggaggtgcagaaaaaacttgttcataacgcgctcgccaatcttgacggtcatcctgaagacaaacccacccacatcattttcggaagcgacagtgagtgcgaaactgaggaaacgagcactcaagagcagtctcaccctggggaggagtgggtgaaggagtccatgggtaagaccagcgggaaactctttgattcatccgacgacgacgagagtgacagcgaggacgattctaataggttcaagataaagccacagttcgaaggacgcgctggacagaagctgatggacctccagtctcatttcgggaccgatgatcggtttcgtatggattcaagattcctggaaaccgactcagaggaagagcaggaggaggttaatgagaagaagaccgccgaagaggaagaactcgccgaagaaaaaaagaaagccttaaatgtggtgcagtcagtcctgcagataaatcttagtaactccactaaccggggatccgtggccgctaaaaagttcaaagacattatccactacgaccccactaagcaggaccacgccacctatgagaggaaacgcgatgataagcccaaagagtcaaaagccaaaagaaagaaaaagcgagaggaggcagagaagcttccagaggtctccaaggagatgtattacaacattgctatggatctgaaggagattttccagacaacaaagtacaccagtgaaaaggaggaaggtaccccatggaacgaagattgcgggaaagagaaaccagaggaaattcaggatccagcagctctgacctcagacgccgagcagccgtcaggctttactttttcattctttgacagcgataccaaggacatcaaagaggagacgtaccgggtcgagactgttaaaccaggcaagatagtgtggcaggaggatccacggctgcaggatagttccagcgaagaggaggacgttactgaagaaacagaccacagaaacagttcacctggtgaggccagtttgctggaaaaagagaccacccggttttttttctttagtaaaaacgatgaacgactccaagggtcagatttgttttggcggggtgttggatccaacatgtcccggaattcctgggaggcgcgtactaccaatctgaggatggactgtagaaaaaaacataaagacgctaagcggaagatgaaacccaagtag

SEQ ID NO: 233275 - DNA, 3396 bp, synthetic construct
  misc_feature 1..3396: note = Description of Artificial Sequence: Synthetic coding sequence
  source 1..3396: mol_type = other DNA
atgaaggtgaatagagagactaagagactgtacgtcggtgggctgtcccaggatatcagtgaagctgacctgcagaatcagttctccagattcggcgaagtgagcgatgtcgaaattataacacggaaggacgatcaggggaatcctcagaaggtcttcgcctacattaatatttccgttgcagaagctgatctcaaaaaatgcatgagcgtgctcaataagacgaaatggaaggggggaacgctccaaatccagctggctaaggagagcttcctgcacagactcgcacaagaacgggaggctgctaaggcaaagaaggaagagagtaccactggcaatgctaatcttcttgaaaagaccggaggagtggacttccacatgaaagcagttcccggaacagaggtccccggtcataaaaactgggtggtgtcaaagttcggacgagtgttgccagtgctacacttaaaaaaccagcacaaacacctgcgtaacatcattaaatatgacccctccaagtactgccacaatctgaaaaaaattggcgaggacttctccaatacaatccctatcagctctcttacctgggagttagagggcggaaacgaccctatgtccaagaaaaggcgcggtgaattctcagacttccatgggccacccaaaaagatcatcaaagtgcagaaggatgagtcctcgacgggctctctggccatgagtacccgtcccagaagagtgattgagcggccacccctgacccaacagcaagcagcacagaagaggacctgcgattctattacgccctccaagtcaagccctgttcctgtctccgatacgcaaaagctgaaaaacctgccctttaagacatctggcctggagactgcaaaaaaacgaaatagcatctccgacgatgacactgattccgaggacgaactgcgcatgatgatagctaaagaagagaatctgcagcgcactactcagccctccatcaacgagtcagaaagcgaccctttcgaggttgtgagggacgacttcaagtctggagtccacaagctgcactccttgatcggtctaggcattaagaatagagttagttgtcatgatagtgacgatgatatcatgcggaacgaccgagagtacgattccggcgacacagacgaaataatcgcaatgaagaaaaacgtggccaaggtgaagaatagcacagaattctcccagatggagaagtccacaaagaagacatcatttaagaacagggagaattgtgaactctctgatcactgtatcaaattacagaagagaaagagtaatgtcgagagtgccctgagtcatggactcaagtccttgaacagaaaatctccgagtcacagctcctcctccgaagatgctgactccgcctctgagctcgcggattccgaggggggagaggaatataatgccatgatgaaaaactgcttaagggtcaacctgactctggcggatctggagcaattagcgggaagcgatctcaaagtgcctaacgaggacacaaaaagtgatggacctgagactacaactcagtgcaaattcgatcgcggatctaagtctccaaaaactcctaccggccttagacgcggtcggcagtgtattcggcctgccgagattgtggcatctctgctggagggggaagaaaatacctgtggaaagcagaagcccaaggagaataaccttaaaccaaagtttcaggcttttaaaggggtgggatgcctgtacgaaaaggagtcaatgaaaaagtcactcaaagattcggtcgcctctaataataaagaccagaatagtatgaagcacgaagatccaagtatcatttcaatggaggacggatcgccgtacgtaaacggatctctgggtgaggttaccccgtgtcagcacgccaagaaagccaatgggcctaattatattcagccccagaagcgccagaccacttttgagagccaagatcgaaaagctgtgagtccatcctctagcgagaagagaagcaaaaatccaattagcaggcctctggaaggaaaaaagagtctgtctctgagtgctaagactcacaacatcggtttcgacaaggactcttgtcacagcaccacaaaaactgaagcatcgcaggaggagcggtccgatagtagcgggctcacctcactgaagaagtccccgaaagtgtctagtaaagacacccgagagatcaagaccgattttagcctgtcaatcagtaatagctccgatgtgtccgccaaagacaaacacgccgaggataacgaaaaacgactggccgctttggaggctagacaaaaggcaaaagaagtgcaaaaaaagttagttcacaatgctctggctaacctggagagtatgggaaagacctcggggaagctgttcgactcttcagacgatgacgaaagcgattctgaagatgacagtaacagatttaagatcaagccccagttcgaaggtagggctggccagaagctcatggacctgcaatctcatttcggaaccgacgatcgtttccgcatggacagtcgcttcctggagactgacagcgaagaggaacaggaggaggtcaacgagaagaaaactgcggaagaggaggagcttgccgaggagaagaagaaggctctcaacgtggtgcagtctgttttgcagatcaatctgtccaactctacaaatcggggttcagtggccgctaaaaaatttaaagacattattcactatgacccaacaaaacaggaccatgctacctacgaaaggaaaagggacgataagcctaaagagtccaaagctaagcgtaagaagaaacgcgaagaagcagagaagctgcctgaagtctctaaagagatgtattacaacatagcaatggacctgaaggaaattttccagacaactaagtacacatcggaaaaagaggaagggaccccatggaacgaggactgtggcaaggagaagccagaagagatacaggaccctgctgcgttaaccagtgacgcagagcaaccctctgggttcacattctcattcttcgatagtgacaccaaggatatcaaggaagagacgtaccgtgtggagactgtcaagcccggaaaaattgtttggcaagaggatccgaggttgcaggactcttcttcggaggaggaagacgtcacagaagagaccgaccacaggaacagctcccctggcgaagcgagcctcctggaaaaggaaaccacgaggtttttcttcttctctaagaacgatgaacgcttgcagggatctgatttgttctggagaggcgttgggtctaatatgagtaggaacagttgggaagctagaactactaacctccgcatggactgtcgcaagaagcacaaagacgccaagagaaagatgaaacctaagtag

SEQ ID NO: 233276 - DNA, 777 bp, synthetic construct
  misc_feature 1..777: note = Description of Artificial Sequence: Synthetic coding sequence
  source 1..777: mol_type = other DNA
atgaaggtaaaccgcgaaaccaaacgtctgtacgtcggtggcttgtcacaagacatttctgaggctgacttgcagaaccagtttagccgattcggcgaggtgtccgacgtcgaaattattaccagaaaggatgatcaaggaaacccccagaaagtttttgcttacattaatatttctgtggcggaggctgacctgaaaaaatgcatgagtgtactgaacaagaccaaatggaagggcggtaccctgcagatccagttggccaaggagtcattcctgcatagactggcccaggaaagggaagcagccaaggcaaagaaggaagagagcacgactggcaacgctaatctgctggaaaaaaccgggggagttgactttcacatgaaggctgtgccaggaactgaggtccccggacacaaaaattgggttgtatccaagtttgggagagtgctgcctgtcctgcacctgaagaaccaacataaaaggaagattattaaatatgatccctccaaatactgccacaacttgaagaagatcggcgaggatttcagcaacactatcccaattagtagcctgacatgggagttggaagggggtaacgatccaatgagtaaaaagaggcggggtgagttcagcgacttccatggtcctcctaagaagatcatcaaggtgcaaaaggacgaatcaagtactggtagcctggcaatgagtaccagacctcgtcgcgtgatcgagagaccaccactgacccagcagcaggccgcacagaagcggacatag

SEQ ID NO: 233277 - DNA, 2913 bp, synthetic construct
  misc_feature 1..2913: note = Description of Artificial Sequence: Synthetic coding sequence
  source 1..2913: mol_type = other DNA
atgaaggtgaatcgagaaacaaagagattatatgtgggcggactaagccaggacatctctgaagccgatcttcagaatcagttctctagatttggggaagtctctgacgtcgaaatcatcacccgaaaggatgatcaaggaaatccgcagaaagtgtttgcttacatcaatatcagcgtcgccgaagccgatctcaaaaaatgcatgtccgtgctgaacaaaactaagtggaaaggaggaactctgcaaatccagcttgccaaggagtcatttctgcatcggctggcacaggagagagaagctgctaaggccaaaaaagaggaaagcacgaccggtaatgcgaacctgcttgaaaaaacaggcggagtggactttcatatgaaggcagtgccagggacagaggtgccaggccataagaattgggtcgtcagcaaattcggaagagtgctacccgtgctacatctgaagaaccagcacaagcggaagatcattaagtacgacccttccaaatattgtcacaatttgaagaagattggagaggatttttccaacacaattcctatatcgtctctgacttgggaacttgagggcggaaacgatcctatgtctaagaagcggagaggtgagtttagcgatttccatggacctccaaagaagatcattaaggtacagaaagatgagtcatcaacaggatctcttgccatgagcacacgtcctaggagggtcattgaaaggccccctctgactcagcagcaggctgcacagaagaggacatgcgactccatcactccatcaaaaagctccccagtccccgtttcggatactcagaaacttaagaatctgccatttaaaacttctggtttggaaaccgccaagaagcgtaacagcatttccgacgatgataccgactccgaagacgagctgagaatgatgatcgcaaaggaggagaatctgcaaaggacaacccaacctagcatcaatgagtcagagagcgacccatttgaggttgttagagatgattttaagtcaggcgtgcataagctgcattcgttgatcggactgggaattaagaacagggtgagctgtcacgattcagatgacgacattatgcgcaatgatagggagtacgacagcggggacacagatgagattatagctatgaagaaaaatgtggctaaagttaagaatagcaccgaattctcacagatggagaaatcaactaaaaagacttcttttaaaaatcgagagaactgcgagttgtcagaccattgcatcaagctccagaaacgtaaaagcaacgtcgaaagtgccctcagtcacgggttaaagtccttgaatcgcaaaagccctagccattcttcctctagcgaggacgcagatagcgcctccgagttggcagattctgagggaggcgaggagtacaacgctatgatgaagaattgcctgcgcgtgaacttgacgctggccgatctagagcagctcgcaggtagcgatctgaaagtacctaatgaggacaccaagtctgacggaccagaaaccactacacagtgtaagttcgaccggggaagtaagagccccaagaccccgacgggccttagacgaggccgtcaatgcatcaggcccgcagaaatcgtcgcctccctgctcgagggagaggagaacacatgcggtaagcagaagccaaaagaaaataatttgaagcccaaattccaggcatttaagggagtcggatgtctctatgagaaagaatccatgaagaaatccctcaaggacagcgtggcatccaataataaagaccaaaactccatgaagcatgaagacccttccattatatctatggaggacggaagcccctatgttaacgggagtctcggggaggtgactccttgccagcacgcaaaaaaggcaaacggacctaattacatccaaccacagaagcgacagaccacttttgaaagtcaggacagaaaagctgtgtctcctagctcttccgaaaagcgcagcaagaatcccatctcccggcctctggagggtaaaaagtcactctcactgtctgctaagacccataatattgggtttgacaaagactcttgtcattcaacaactaaaacagaagcatcccaggaggaacggagtgattcatcaggtttgacctctctcaagaagagccccaaggtaagtagtaaggatacaagggaaatcaaaaccgacttcagcctctcaatcagcaacagcagtgacgtttccgccaaggacaagcacgctgaagataacgaaaagaggcttgccgcacttgaagcccgtcagaaggctaaggaagtgcagaagaaactagttcataatgctttagcaaacctcgatggacaccctgaggataagcctacccatatcattttcggatctgactccgaatgtgagaccgaagaaacctccacccaggaacagagtcacccaggggaggaatgggtgaaagagtccatgggcaagacctccgggaagctgttcgatagttcagatgatgacgagtcagattctgaggacgattccaaccgcttcaagattaagccacaattcgagggaagagcaggacagaaactcatggacttgcagagccattttggcacggacgacaggttccggatggacagccgctttctcgaaacagatagcgaggaggaacaggaagaagttaacgaaaaaaagactgcagaggaagaggagctggccgaagagaagaaaaaagccctgaacgttgtgcagtcagtactgcagatcaaccttagcaatagcacaaatagagggtcagtagccgcaaaaaagtttaaggacattatccactatgacccaacaaagcaagatcacgcgacctacgaaaggaagcgcgatgacaagcctaaggaatctaaggcatag

SEQ ID NO: 233278 - DNA, 1242 bp, synthetic construct
  misc_feature 1..1242: note = Description of Artificial Sequence: Synthetic coding sequence
  source 1..1242: mol_type = other DNA
atgaaagttaatcgggaaacaaagcggctctacgttggcggactgtcacaagacataagcgaggctgatctgcaaaaccagttctcccgctttggcgaagtgagcgacgtggaaatcatcacaaggaaggacgaccagggaaatcctcagaaggtgttcgcttacataaatatcagtgtcgcagaggcagacctcaagaaatgtatgtccgtgctgaacaagacaaaatggaaagggggaaccctccagattcagttggccaaggaatcgtttttgcatagactagcccaggaaagagaggccgctaaagccaagaaagaagaaagtactactggcaacgccaatctgctggagaagacaggcggagttgattttcatatgaaggcggtgccgggtacagaagttcctggccacaaaaattgggtggtcagtaagtttggcagggtgctcccagtcctgcatctgaagaaccagcacaaacgtaaaatcatcaaatatgaccctagtaagtattgccacaacctgaagaaaatcggggaagattttagcaatacgatccctataagctctctgacttgggaacttgagggcggtaatgatcccatgagtaaaaaaagacggggagagttctctgattttcatgggccaccaaagaagattatcaaggtacagaaggacgagagctctacaggctctctggcaatgagtacacgaccccgaagggttatagagagacctccactgacccaacagcaggccgctcagaaacggacttgtgacagcatcaccccatcgaagagttcacctgtccctgtgtctgatacacagaagctgaaaaatctccccttcaaaacaagtgggctggagaccgccaagaagaggaattcaatatcagatgacgatacagactcagaggatgagctccgcatgatgattgctaaagaggagaatctgcagcgtactacgcagccgtctatcaacgaatcagaaagcgatccgttcgaagtggtacgggacgacttcaagtccggggtacacaaactacatagcctgataggattgggcattaagaaccgggtgtcttgtcatgatagtgatgatgatatcatgagaaatgatcgagaatacgactccggggacacggacgaaatcatagcaatgaaaaagaacgtcgcaaaggtgaagaatagcacggaattttcccagatggagaaatccaccaaaaaaacctcgtttaagtag

SEQ ID NO: 233279 - DNA, 3504 bp, synthetic construct
  misc_feature 1..3504: note = Description of Artificial Sequence: Synthetic coding sequence
  source 1..3504: mol_type = other DNA
atgaaggtcaaccgagagacaaagcgactgtacgtcgggggactaagccaagatatctccgaggcagaccttcaaaaccaattctcacgatttggggaggtaagcgatgtcgagattatcacccgcaaagatgatcagggcaacccccagaaagttttcgcgtatatcaacatatccgttgcagaggccgacctgaagaaatgtatgagcgtcttgaataagactaagtggaagggtggtacactgcagattcagctggccaaggagtccttcctgcaccgtctggcccaggaacgggaggccgcaaaggccaagaaagaggaatctacgaccggcaatgctaacctcctcgagaagactggaggcgttgatttccatatgaaggctgtcccgggaaccgaggtgcctgggcacaagaactgggtggtgtctaaatttggcagggtgctccctgtcctccatctgaaaaaccagcacaagaggaaaatcataaagtacgacccatctaagtattgccacaatctgaagaagataggcgaagacttctccaacactatccccatctccagtctcacttgggagctggagggcggtaatgatcccatgagtaagaagaggaggggcgaattttcagactttcacggccctcctaagaagataattaaagtccagaaagatgagtcttccaccggaagcttggcaatgagcacccgcccaagacgggtgattgagcgcccaccactcacacaacagcaggcagcccagaagaggacatgcgattcaattacaccgagtaagagcagccctgtacccgttagcgacactcagaaactgaagaaccttccctttaagacctccggcctggagaccgccaagaagcgcaattccatttccgatgatgataccgactcagaagatgaactgcggatgatgattgctaaagaggagaatctgcagcggacaactcagcctagcattaatgagagtgaaagcgaccctttcgaggtagtgcgcgacgattttaagtcaggggtgcacaagcttcactcgttgatcggtctgggaattaagaatcgggttagttgccatgactcagatgacgatatcatgcggaacgaccgtgagtatgacagcggcgacactgatgaaattatcgcgatgaaaaagaacgtggcaaaggtcaaaaacagcaccgaattcagccagatggaaaagagtactaaaaaaacttcttttaagaatagggaaaattgtgaactgtctgaccactgtatcaagctacagaaaaggaagtcaaacgtggagtccgcccttagtcacggcctcaaaagtttaaatcgtaaaagcccatcccactccagtagtagtgaagacgccgacagcgcttcggaactggcagactcagaggggggtgaggaatacaatgcaatgatgaagaactgcctaagagtcaacctcaccttagctgacctagagcaactggccggatcagatttaaaagtgccaaatgaagacactaaatccgatgggccagagaccacaacccagtgcaaatttgatcgcggttcgaaatctccaaaaacaccaacgggactgaggagagggagacagtgcattaggccagctgaaatcgtggcttctttgctggagggggaggaaaacacctgcggcaagcagaagcccaaggaaaataacctgaagcccaagtttcaagcatttaagggagtgggctgcttgtacgagaaagagtccatgaagaagagtcttaaggactccgtcgcttcaaataacaaggatcagaatagcatgaaacacgaagatccatctatcatttctatggaagatggttctccatacgtcaatgggtcattgggagaggttactccatgtcagcacgcgaaaaaggccaacgggccaaactacattcagccccagaagaggcaaaccacatttgagtctcaggatcgtaaagccgtcagcccgtctagtagcgagaaaagaagtaagaatccaatcagccggccactcgaaggcaagaaatccctctcattgagcgctaaaacccataacatcggttttgacaaggacagctgtcactccacaacaaagacagaagcttcgcaggaagagcgatctgattcttcaggacttacctccctcaaaaagtcgcccaaggtgtcctcgaaggatacaagggagatcaagacagatttttccctgtctattagcaactcaagtgatgtgagcgccaaggataaacatgctgaagacaatgaaaagcgactagccgctctcgaggcgcgacagaaagccaaagaagttcagaagaaattggtgcataacgccctggcaaacttagacggccaccccgaagataagcctacacacatcatcttcggtagcgacagcgagtgcgaaacagaagaaacatctactcaggagcagagtcacccgggagaggaatgggtgaaagaaagcatggggaagacaagcggcaagttgttcgatagctccgacgatgacgagtccgactccgaggacgactccaatcgattcaagattaaacctcaatttgagggcagggcaggacaaaaacttatggatctgcagtcccattttgggactgacgaccgcttcagaatggattcaagattcctggaaacggatagtgaagaggagcaggaggaagttaatgagaagaaaaccgccgaggaggaggagctcgccgaagagaagaagaaggcgcttaacgttgtccagtctgtgctacagatcaatctgtccaattccaccaaccgtggctccgtagccgcaaaaaagtttaaggacattattcactacgatccaaccaaacaggaccacgccacctacgagcggaagcgggatgacaagccaaaggagagcaaggctaagagaaaaaaaaagcgggaggaggccgaaaagctcccagaggtttccaaagagatgtattataatatcgcaatggatctcaaggagatctttcagacaaccaagtacacctccgagaaggaagagggcactccatggaatgaagactgtgggaaagagaaaccagaagagatccaggacccggcagccttgactagcgacgccgagcagcccagcggctttacattcagcttcttcgattctgacacaaaagacatcaaagaggagacatacagagtggagacagtgaaacctggtaagattgtttggcaggaggatccccgactgcaagatagctcgagcgaagaggaggacgtgactgaggagacggaccatagaaactcctctcccggtgaagcatctttgctggagaaagagacaacacggttcttcttcttttccaaaaatgatgagcggctgcagggctcagatctgttctggagaggcgtcggatccaacatgtctagaaattcttgggaggctcgtacaactaacctgagaatggattgtcgaaaaaagcacaaagacgccaagaggaaaatgaaaccaaagtag

SEQ ID NO: 233280 - DNA, 438 bp, synthetic construct
  misc_feature 1..438: note = Description of Artificial Sequence: Synthetic coding sequence
  source 1..438: mol_type = other DNA
atgaaggttaatcgcgagaccaaaaggctgtacgtcggtgggctgagtcaggatatcagcgaagctgacttgcagaaccagtttagccgctttggtgaggtttctgatgtagagattattacccggaaagacgaccagggcaacccgcagaaggtcttcgcctatattaatatctctgtggcagaagccgatcttaaaaaatgtatgtccgtgctgaacaagacaaagtggaaaggagggaccctgcagattcagctggccaaggagtcattcttacatcgcctggcccaggagcgggaagccgcaaaggcgaagaaggaagaatccacaacagggaacgccaatctcctcgaaaaaaccggaggggtggattttcacatgaaggcagtaccaggtacagaagttcctggtcacaagaattgggtcgttagcaaatag

SEQ ID NO: 233281 - DNA, 3504 bp, synthetic construct
  misc_feature 1..3504: note = Description of Artificial Sequence: Synthetic coding sequence
  source 1..3504: mol_type = other DNA
atgaaggtaaacagagagacaaagagattgtatgtaggaggcctgagtcaagatatctctgaagcagaccttcagaaccagttttcgcgttttggagaggtttcagatgtcgagattatcacccgcaaggacgatcaggggaatccccaaaaagtgttcgcttacattaacatctctgttgcggaagcagatcttaagaaatgtatgtcggtgctgaacaagactaagtggaagggaggcacccttcagatccagctcgccaaggaatccttcttgcaccgattggctcaggagcgggaggcagcaaaggccaaaaaagaggaatctacgacaggaaatgccaatttgctagaaaaaaccggtggagtggactttcacatgaaagcagtgcctggcactgaggtgcctggccacaagaactgggtggttagcaagtttgggcgtgtccttccggtgttgcacctgaagaatcagcataagcggaaaataatcaagtacgacccatccaaatattgtcataatctgaagaagataggggaggatttctcgaacaccatcccaatttctagcctcacgtgggagctggaagggggtaatgacccaatgagcaagaagagacgcggtgaattttctgactttcacggacctcccaaaaaaatcattaaagtgcagaaagacgagtccagcaccggtagcctcgctatgtccacccggcctcggagggtcatagagagacctccgctgacccagcagcaagccgcacaaaaaaggacatgcgactcaataacaccctccaagtcctcccccgtgcccgtgtcggacacacagaaactcaagaatctgcctttcaaaacttcaggcctcgaaaccgccaaaaaacgaaacagtatcagtgatgacgataccgacagcgaggacgaactgcgcatgatgattgctaaagaagagaatttgcaaagaaccacacagccctctattaatgaaagtgaatctgatccatttgaagtggttcgcgatgatttcaagtcaggcgtgcataaactccacagtctgattggtttgggcatcaagaatcgagtgtcctgccacgattccgacgacgatattatgagaaacgatcgggagtatgattccggcgacacagatgaaataatcgcaatgaagaaaaatgtggccaaagtgaaaaactccaccgaattctctcagatggaaaagtccaccaagaaaacttccttcaaaaatagagagaactgtgaactgtcagaccactgcataaagctgcagaagagaaagagcaacgtagaaagcgcactctctcacggcctgaagtcactgaatagaaagtctccctctcactcttccagtagcgaagatgccgactccgccagcgaactcgccgattctgagggaggcgaggaatataacgcgatgatgaaaaattgcctgcgtgtgaatctaactctagccgacctcgaacagttggccggtagcgatttgaaagtcccaaacgaggacacaaaaagcgacggtccagagacgaccacacaatgtaagttcgaccggggaagcaagtcaccgaagacacccaccggcctgaggcgcggacgtcaatgtatccgcccagcagaaattgtcgcaagtctcctggagggcgaggagaatacctgcggcaaacagaaacccaaggagaacaacctcaagcccaagtttcaggcctttaaaggagtgggctgcctatacgagaaagagtcaatgaaaaagtcacttaaagattctgtcgcttccaataacaaagatcagaactccatgaaacacgaggacccatctataataagtatggaggatggttccccctatgtgaatgggtctctgggcgaagttacaccctgtcagcacgccaagaaagccaatggaccaaattatatacagccgcagaagcggcaaacaaccttcgagtcccaggataggaaagcagtgtcaccctcctcctcagaaaaacgcagcaagaatccgatttctagacccttagagggcaaaaagtccctgagcctgtctgcaaagactcataatattggctttgacaaagactcctgtcactccacaaccaagaccgaggcatctcaggaagaaaggagcgattctagtggcctcacatccctgaagaagtcaccgaaggtcagctccaaggacacacgggaaatcaaaacggacttttcactgtctatctctaatagtagcgacgtgagcgctaaggataagcatgcagaggataacgagaagaggctagctgctctcgaggctcgccagaaagctaaggaggttcagaagaaacttgtccataatgcactagcgaatctggacgggcaccctgaggataaacctactcacatcatattcggcagtgactctgagtgtgagaccgaggagacgtcaacacaggagcagtctcacccaggtgaggagtgggttaaggaaagcatgggtaagacctctggtaagctttttgattcgagtgacgacgatgaatccgactcagaagacgatagtaaccggtttaagattaaaccccaattcgagggcagggctggccagaaactgatggacctgcagagtcatttcgggacggacgaccgattcagaatggactcaagatttttagaaacagatagtgaggaagagcaggaggaagttaacgaaaagaaaacggcggaggaggaggagctcgccgaagagaagaagaaggccttgaatgtggtgcaaagcgtactccagattaaccttagcaatagcaccaaccggggtagcgtggcggctaaaaaattcaaagatattattcactacgatcccacaaagcaggatcacgccacgtacgagcgcaagagggacgataagcctaaggagtctaaggccaagaggaaaaagaaaagagaggaggcagaaaagttgccagaggtgtctaaagagatgtactacaatattgccatggacctgaaggagatttttcagactactaaatatacttcagagaaggaggaagggaccccttggaatgaggactgcggtaaagagaagccggaggaaattcaggaccctgccgcactcacctccgatgccgaacagcctagtggttttactttttctttcttcgattcagacaccaaagatatcaaagaggagacataccgtgttgagacggtcaagccaggtaagatcgtttggcaagaggacccacgccttcaagactcttcatccgaggaggaagacgtgacagaggaaacggaccacagaaatagcagccctggagaggccagcctcttggagaaagagacgactcgattcttcttttttagtaagaatgacgaaaggctgcaggggtccgacctattttggcggggagtggggtccaacatgtcgcggaactcttgggaggcccgaacaacaaatctcagaatggactgtaggaaaaagcataaagacgctaagcgcaaaatgaagcctaagtag

SEQ ID NO: 233282 - DNA, 261 bp, synthetic construct
  misc_feature 1..261: note = Description of Artificial Sequence: Synthetic coding sequence
  source 1..261: mol_type = other DNA
atgaaagtgaaccgggagaccaagaggctgtacgttggcggactttctcaagatatctcagaggcggatttgcagaatcagttctctaggttcggggaggtcagtgacgtcgaaatcatcactagaaaagacgaccagggtaaccctcagaaagtgttcgcctacatcaatatcagcgtggctgaggctgaccttaaaaaatcaatcttccatgtgatccaaagggattcaagcgacgaggagaacagctccattgtttag

SEQ ID NO: 233283 - DNA, 3441 bp, synthetic construct
  misc_feature 1..3441: note = Description of Artificial Sequence: Synthetic coding sequence
  source 1..3441: mol_type = other DNA
atggggcctgcaccggcaggtgaacagttgcggggtgccacaggagagcccgaggtcatggagcctgcgctcgaggggactggaaaagagggcaaaaaggctagcagccgaaaaaggaccctcgcagagccccctgccaagggccttctgcagccagtgaaactgagccgggctgagctgtacaaagagcctacaaacgaggaactgaatcggctgcgggaaacagagattttgtttcattcctctctacttcggttgcaggtggaagagttgctcaaagaggttcgactttccgaaaagaagaaggatcggattgacgcttttctccgggaagttaatcagagagtggttcgagtgccttcggtacctgagaccgagctgacagatcaggcttggcttccagccggagttcgcgtccccctccaccaggtcccctatgctgttaagggttgcttccggttcctgcctcccgcacaggtgaccgtggtcggctcatatctgctgggcacctgcattcggcctgatatcaatgtcgacgttgcgttaacaatgcctagggagattctccaggacaaggatggactgaatcagcgatatttccgaaagagggcactctacttggcccatctggcacaccacctggcccaggatccattgtttgggtccgtctgtttcagttacacaaatggctgccatttgaaaccctccctgttgttgcgaccgaggggcaaggacgagaggcttgtgactgtcagattacacccctgcccccctcccgatttctttcggccatgtcgcttactgccgactaaaaacaatgtcagatcagcctggtataggggtcagtccccagccggagatggaagtcccgaaccgcctacacccaggtacaacacctgggtgcttcaagatacggtgttggagtctcacctgcagcttctcagcaccattctttcaagtgcgcaagggctgaaggatggagtcgcactccttaaagtgtggctacgacagcgagagctggacaaaggtcaaggaggctttactgggtttctggttagtatgttggtggtgttcctggtgtctactcgcaaaatccataccaccatgtcaggctatcaggttctcagatctgtcctgcaatttcttgcaacaacagacctgacagtgaacgggataagtctgtgtctcagctccgacccctccctcccagcactggcagacttccaccaagccttcagtgtggtatttcttgactcatctgggcacttaaacctatgcgccgacgtgacagcctctacttatcaccaggtccagcatgaagccagactctcaatgatgctgttggatagtagggcagacgacggcttccacctcctgctaatgactcccaaacctatgatccgggctttcgatcacgtgctgcatcttagaccgctgtcccggctgcaggccgcatgtcaccggctgaaactgtggcccgagctccaggacaacgggggagactacgtgtctgccgcactgggtcccttgactacactgttggagcaaggcctcggcgcacgccttaacttgctcgcccatagcagacctcccgttcccgagtgggatattagccaggatccacctaagcacaaagactccgggaccctcaccctcggcctcttgctccggcctgagggtctcaccagtgtcctcgagcttggccctgaggcagaccagcccgaagccgctaagttccgtcagttctggggatctcgtagcgagcttaggagattccaggatggggctatacgggaagcagtggtgtgggaggcagcctcaatgtcccagaagagactgattccccatcaagtggtgacgcatcttttggccctccacgccgatatcccagaaacctgtgtacattacgtggggggaccccttgacgcactcatccagggcctgaaggagaccagctccacaggggaggaggcactggttgctgccgttcgatgttacgatgacctatcgagactactgtggggtcttgagggcctgccactgaccgtgtccgcggtccagggtgcgcaccctgtcctgcgttacaccgaagtatttccacctactccagtcaggcctgcattctcattctacgaaaccttgcgagagcgaagttctctcctgccaagactggacaaaccgtgtcccgcttatgtggaaccaatgaccgtggtctgccatcttgagggctccggtcagtggccccaggacgcggaagccgttcagagagtcagagctgcctttcagcttcgcctggccgaactgctgactcagcagcatggcctccagtgcagagcgacggcgacccacactgacgtactcaaagacggttttgtctttcggattcgggtggcgtaccagcgcgagcctcaaattcttaaggaggtacagtcccccgaggggatgatttctctgcgagataccgcagcttcccttcgattggagcgcgatactaggcagttacctcttctgacttcagccctgcacgggctgcagcagcagcatccagcatttagcggagtggccagactcgccaagcgctgggtcagagctcagttgctgggggagggcttcgctgacgagtccttggacctggttgctgccgctctgtttctccatcctgagccctttacgccgccttcatccccgcaggtcggtttcctccgctttttgtttctggtcagtacttttgattggaagaataaccctctgtttgtgaatctgaataatgaacttacagtggaggaacaggtggaaattcggtctggattcctcgcagctcgcgctcagctgccagtgatggtcatcgtcacacctcaggaccgaaagaatagcgtctggacacaggacggtccgagcgcccagatccttcagcaactggtagtgcttgcagccgaggcactgccaatgctggagaaacagcttatggatcctcgaggacccggagatatccggacagtgttcagacctccactcgatatctatgatgtcctcatcaggctgtcaccacgtcatatacctcgacacagacaggctgtggattctccagccgcttctttctgtcggggtctcctgtcccaaccaggccctagctccctcatgccggtcctcgggtacgacccccctcagctgtaccttacccagctcagggaggcctttggcgacctggccttgttcttctacgaccagcacgggggtgaagtgataggggtactgtggaagccgacttcatttcaaccccagcctttcaaggcgagttccacaaaaggacgcatggttatgtcacgagggggagagttagtcatggtacctaatgtcgaggctatcctggaggatttcgccgtcttgggagagggtctggttcagactgtagaggctcgcagcgagaggtggaccgtatag

SEQ ID NO: 233284 - DNA, 3024 bp, synthetic construct
  misc_feature 1..3024: note = Description of Artificial Sequence: Synthetic coding sequence
  source 1..3024: mol_type = other DNA
atggggcctgcacccgctggtgaacaactgaggggagccaccggcgagccggaggtcatggaaccagccctggaggggaccgggaaggaaggcaagaaagcttcttcgcgcaagagaacacttgccgagcctccagctaaaggtctgctgcagcccgttaaactgtcacgagccgaattgtataaggagcctacaaatgaggagttgaacaggctgcgggagacggaaatcctgttccattcaagcctactccgacttcaggtggaagaactcctcaaggaggtgagactgtcagagaaaaaaaaggacaggattgacgctttccttcgcgaagtgaatcagcgggtggtgcgggtgccgagtgtcccagagacagagcttaccgaccaggcttggttgcctgcaggagtgcgagtgccattgcaccaggtaccttatgccgtgaagggttgctttcgcttcttaccaccagctcaggtgaccgtagttggatcctatttgttaggcacctgcattaggccggacataaacgttgatgttgcgctcaccatgccacgggagatccttcaggataaagacggattgaaccagcgctattttcgtaagagagcgttgtaccttgcacacttagcgcaccatctggcccaggatcctctctttggcagtgtgtgtttctcctacaccaatgggtgtcatctgaagccatccctcttacttagacccaggggtaaggatgagcgcctggtgactgtccgcctacatccctgcccccctcctgattttttcagaccctgtcggcttcttccaaccaagaataatgtcagatccgcttggtatcgagggcagtcccctgccggtgatggttctcctgaacctcccaccccgcgatacaatacgtgggtcttgcaggatacagtgctggagtcacatctgcaactgctgtcaaccatcctctcaagtgcacagggtcttaaggatggggtggccttgctgaaggtgtggctgcggcagcgcgaactcgacaagggccaggggggttttacaggttttcttgtctctatgctggtggtcttcttagttagcaccaggaaaatccacaccacaatgtccggctaccaagtcctgcgctctgtactccaattccttgccactactgacctgacagttaacggcattagtttatgtctgtcctccgatcctagcctacccgcattagcagactttcaccaggcttttagtgtggtgtttttggatagttccggccatttaaacctctgtgctgacgtaactgcctccacttatcaccaggtgcagcacgaggcacgactgtccatgatgctgttggattctcgggctgatgacgggttccacctcctgttgatgacacccaaacccatgatcagagcgttcgatcatgttttacacttacggcctctttcaaggctacaagccgcttgtcatagattaaagctctggcccgagttgcaagataatggaggggattacgtgtccgctgctctggggccactgacgaccctgctggagcagggcttgggcgcacgactgaacttgttagcccacagtagacccccagtgccagaatgggacatctctcaggatccgcctaagcacaaggactcaggtaccctgaccctcgggctcctgctgcgtcctgaaggtcttacgagcgtgttggagttgggccctgaagctgatcagcctgaggccgctaagtttcgccagttttgggggagtagatccgagttgcgtcggttccaggacggcgcaattagagaggctgttgtgtgggaggccgcaagcatgagtcagaagagactgataccacaccaggtggtgacacatcttctcgctttacacgcagatatacccgagacctgcgttcactacgtggggggtccgctggatgctctgatccagggtctgaaggagacatcaagcaccggggaagaggctctggtcgccgctgtccgatgctatgacgacctgagcaggctgctctggggcttggagggcctgcctttgactgtgtctgccgtccagggagctcatcccgttctgagatatactgaagtgttcccccctacccctgtccgacccgctttcagcttctatgagactcttagggagcgtagtagtctgctgccgagactagacaaaccatgtccagcctacgtggagcccatgaccgttgtctgccatctcgagggctcgggacagtggccacaggatgctgaagcagtccagagagtgagagcagctttccagttgcgcttagcagagctcctgacacagcagcatggactccagtgcagagcgaccgccacacataccgatgtcctcaaggatgggttcgttttcaggatccgagttgcctaccagcgcgagccgcagatcctcaaagaggtgcaaagccccgagggtatgatctcattacgagatacggctgctagtttaagattggaacgcgacacccgccagctgccccttctgacttccgcacttcacggcttgcagcaacagcatcccgcttttagcggggtggcacggctggctaagagatgggttcgagcacagttgctaggcgagggatttgccgatgaatcattagatctcgtggcagccgctctgtttctccatccagaaccttttacaccaccctcctctcctcaggttggatttctgcgcttcctgttcttagtgagtacatttgactggaaaaacaatccactgttcgtaaacctgaataatgaattgacggtggaggaacaggtcgagatacggagcggctttctggccgctagggcccagctgcctgtgatggttattgtcacaccgcaagaccgaaagaatagtgtctggacgcaggatggaccaagtgcacagattctgcagcagctcgttgtccttgccgctgaggccctccccatgttagaaaaacagctcatggatccacggggtcccggagatatcagatgggatccagctaaaatgtggccgttctag

SEQ ID NO: 233285 - DNA, 2100 bp, synthetic construct
  misc_feature 1..2100: note = Description of Artificial Sequence: Synthetic coding sequence
  source 1..2100: mol_type = other DNA
atggggcctgcgccagccggagaacaactgcggggagcaactggggagccagaagtgatggagccggctctggagggcaccggtaaagaagggaagaaggcctctagtcggaagcggaccctagccgagcctcccgctaaggggctgctgcaaccggtgaaactgagccgggcagaactgtataaggagcccactaacgaagagctgaatcgcctcagagaaaccgagatcctgtttcattcttccctgttacgccttcaagttgaggagctgctgaaagaagtgaggttgtctgagaagaaaaaggatcggatcgacgcctttttgcgggaggtgaatcagcgcgtcgtaagggtcccttcagtgccggagacggaactaactgaccaggcttggttaccagccggagtgcgagtgccactacatcaggtgccgtacgccgtgaagggttgttttagatttctgccacctgctcaagttaccgtggtgggttcctatttactggggacttgtatcaggcctgatatcaatgtggatgtggcgctcacgatgcccagagaaatcctccaggacaaagatgggctcaatcagagatacttcagaaagcgagcactgtatttggctcatctggcacatcatttagctcaggatccactattcggaagcgtctgtttctcatataccaatggctgtcatcttaaaccttctctgctgctgcggccaagaggcaaggatgaaaggctggtgaccgtgcggctccatccctgccctcccccagattttttccgcccttgtcgtctgttgcccacaaagaataacgtgcgctcagcttggtatcggggtcaaagtccagctggcgacggctcccccgagccgccaacgccaaggtataacacatgggtgcttcaggatactgtgctcgaatctcatctccagctcttgagcaccatcttatcaagtgcccaggggctcaaggatggagttgcgctgctgaaggtgtggctgcgacagagagaactggataagggccagggcggttttacgggatttctggtgagcatgttagtggttttcctggtgagcactagaaaaattcacacgactatgagtgggtaccaggtgttgagatcggtactgcaattcttggccacgacggacttaacagttaacgggatcagtctgtgtctttccagcgatccctccttgcccgctctggccgactttcaccaggcattcagtgtcgtattcctggattcatcaggtcatctcaatttatgcgcagacgtgaccgcaagtacttatcatcaggttcagcatgaggccaggttatctatgatgcttctggatagccgggcagacgacggattccatcttctgctaatgactccaaagccaatgattcgggctttcgatcatgtgctccaccttcggccactcagtcgtcttcaagctgcttgtcatagactaaagctctggcccgagctccaggacaacggcggagactacgtttcagctgctcttgggcctctgacaacacttctcgaacaaggacttggcgctcggttaaacttattagcacatagtcggccaccagttcctgagtgggatataagtcaggacccgccaaaacacaaagactcagggacattgacattggggctgcttctgcgacctgagggcctgacttcagttttggagctgggaccagaagccgatcagccagaggccgcaaaatttcgtcagttttggggctctcggagtgagctgcgtcgctttcaggacggcgcaatcagagaggcggttgtgtgggaagcggcatccatgtcccagaagagactcataccacaccaggtagtgacccatttgctagccctccacgcggacatccccgagacctgcgtgcattacgtgggcggtcctttggacgccttaattcagggactgaaggaggctagctctaccaaaggacgaatggtaatgtcccgcggaggagagctggtgatggtacccaacgtggaagcaatcctcgaagacttcgccgtcctcggcgagggattggtccagactgtagaggctcgaagcgagcggtggaccgtctag

SEQ ID NO: 233286 - DNA, 603 bp, synthetic construct
  misc_feature 1..603: note = Description of Artificial Sequence: Synthetic coding sequence
  source 1..603: mol_type = other DNA
atggtgatcgtcaccccacaggatcggaaaaactcggtgtggacccaggatggcccatcagcccagattttgcaacaattagtggtcttagcagctgaagcacttcccatgctggaaaagcaactcatggaccctcgtggtccaggcgatatcagaactgtgttcaggccaccactagacatttacgacgtgctgatccggctctctcccagacacatccccagacaccggcaagccgtggattcccccgcagcatcgttctgcaggggactactaagccagcctggacccagttcacttatgcctgtcctgggttacgaccctccacagctttacctgactcagctgcgcgaggcgttcggggatttggcactattcttctacgaccagcatggtggagaagtaatcggggtactgtggaagcccacctcattccaacctcagcctttcaaagcatcttccaccaagggcagaatggtcatgagcagaggtggcgagttagtgatggtgcccaacgtggaggccatcctcgaggactttgctgtcttaggtgagggcctggttcagacagtggaggcacgctctgaaaggtggacggtctag

SEQ ID NO: 233287 - DNA, 3072 bp, synthetic construct
  misc_feature 1..3072: note = Description of Artificial Sequence: Synthetic coding sequence
  source 1..3072: mol_type = other DNA
atgggtcccgcacccgctggcgagcaattaagaggtgccactggcgagcccgaagtgatggagcccgcactggaaggaactggtaaagaaggtaagaaggctagttctaggaagaggacgctggccgagccaccagccaagggcttgctacaacccgtgaaactgtcccgcgcagagctttacaaggaacccactaatgaggaactcaaccggttgcgcgaaaccgagatcctgttccactcgtcgctccttagactgcaggtggaagaactcctcaaggaggtccggctgtcagagaagaaaaaggacaggattgacgcttttcttagagaggtgaaccagagagtggtgcgagtaccgagcgtgccagagaccgagttaactgatcaagcttggttgcctgccggtgtgagagtgcccctccaccaagtaccctacgcagtaaaaggctgcttccgcttcctgcctcccgctcaggtcacggtggtggggtcatacctgctcggcacctgcataagaccagatatcaacgtggatgtcgctctcactatgccaagagaaattctacaggacaaggacggcttgaatcagaggtactttcgtaagagagccttgtatttggcccacttagcgcaccatcttgcacaggaccctctgtttggcagcgtatgtttttcctatactaatggctgtcacctgaaacccagtttgctcctgaggccacggggaaaagacgagcgtttggtcaccgtcagactgcatccctgccctccacccgattttttcaggccttgtcggctactgccaaccaagaacaacgtgcggtctgcatggtacagaggacaatctcccgcaggcgatggctcgccagagcctcccacgcctcggtacaatacctgggtgttacaagacacagtcctggagagccacctccagctccttagtacaattctcagctcagcacaggggctgaaggatggggtggctctgctgaaagtgtggcttcggcaaagggagttggacaagggccagggaggtttcaccggttttctggtgagtatgctagtggtgtttctcgtaagtacccgaaaaatccacactactatgtcagggtaccaagtcctccgctccgtgttacaatttctcgccacaaccgacttaacagtgaacggaatctcactttgtctctccagtgacccgtcactgcctgcactggccgatttccatcaggccttctcagtggtgttcctggattcctccggacatttgaacctgtgtgccgacgtcacagcctccacgtaccaccaggtacagcacgaagccaggctgtccatgatgctgctggacagccgcgcagatgacggattccacctgctgcttatgacgcccaaacccatgattagggccttcgatcatgttcttcatcttcgccctctctcccgactacaggcagcctgccacaggctcaaattgtggccagagctgcaggacaacgggggtgactacgtgagtgctgccctggggcctctaaccactctgctagaacagggccttggcgctagactgaatctgttagcccactcccggccacctgttcccgaatgggatatctcccaggaccctccaaaacacaaagattccgggacattgactctgggactgctgctgagacctgaaggactcacatcagtgctggagctaggtccagaagctgatcagcctgaagcagctaaatttcggcagttttgggggtctagaagtgagcttcgaagattccaggacggggcaatcagagaagctgtggtttgggaagcggcttcaatgagtcagaaacgattaattcctcatcaggttgtcacccacttactggcactccacgcagacattcccgagacatgcgtgcactatgtaggtggccctctcgacgctctgattcagggcttaaaggaaactagcagtacaggcgaggaagctcttgtcgcagcagtgcgctgttacgatgatttgagccgcctcctatggggactggaaggcttgcctttgaccgtctctgccgtgcagggggctcacccggtactgagatacacggaggtgtttcctcccacacccgttagacctgcatttagcttttacgaaacgttgcgagagcgtagttccttgcttccacgtctcgacaaaccttgccccgcatacgtggagccgatgacagtcgtgtgtcaccttgagggctccgggcaatggccacaggatgccgaagctgtgcagcgcgtgcgcgctgcctttcaattgcgcctcgccgagttgttgactcaacagcacggcctgcagtgcagagcaaccgcaacccataccgacgtcctaaaagacgggttcgtgttccgtattcgcgttgcataccagcgcgagcctcagattttgaaggaggtccagtcgccagagggaatgatctctctgcgcgacacagctgcctctctgcgtcttgagcgcgacactcgccagttgcctcttctgactagcgccctccatggcctgcagcagcagcatccagccttctcgggggtggctagactggcgaagcgctgggtgagggcccagctgcttggtgaaggattcgccgacgagtcacttgacctcgtggctgccgctctttttctgcatccggagccattcacgcccccttcttcccctcaggtcgggtttctaagatttctttttctggtctccactttcgattggaagaataatcccctgtttgtgaaccttaataacgagcttaccgtggaggagcaggtcgaaatcaggtcaggatttttagcagcccgagcccagctgcctgtaatggtgatagttacgcctcaggataggaagaactccgtgtggacacaagacggcccttcagcacaaattttacagcaactggtcgtgctggcagcagaggcactcccaatgctggagaaacagctcatggatcctaggggccctggtgatattcgcatgggtccttctgaaaacgttgctctgctgtctcacataacggatactgagcagtggaagggggctatctgtgtgtag

SEQ ID NO: 233288 - DNA, 3285 bp, synthetic construct
  misc_feature 1..3285: note = Description of Artificial Sequence: Synthetic coding sequence
  source 1..3285: mol_type = other DNA
atgggcccagccccagccggagagcagctccggggagctacaggagagccggaggtcatggaacccgcattggaaggaactgggaaagaagggaaaaaggcctcttcgcggaaacgcacactggcagaacctccggctaagggattgcttcagccagttaaacttagcagggcagaactatataaggagccaacaaacgaggagcttaatcgcctgcgggagaccgaaatcctgtttcactctagtcttctgcgtctccaggtcgaggagctgctgaaggaggtccgtcttagcgagaagaaaaaggataggatcgacgctttcttgagagaggttaaccagcgcgtggtgcgggtgcccagcgttcccgaaactgaggaaattctgcaagacaaagatggacttaaccagcggtactttcggaaaagagccctttatttagcccatctggcacatcacttagcacaagaccctctgttcggcagtgtctgctttagctacacgaacggctgccacctgaaaccttcactcttactgaggccaagagggaaggatgagagacttgtgactgtgagacttcacccttgtccgcctcccgacttttttagaccgtgtaggctcttacccacaaagaataatgtgcgctctgcgtggtaccgaggtcagagcccagctggtgatggttccccggaaccgcctacaccaagatacaatacatgggttcttcaggataccgtgctggaaagccacctgcagctgctctcaaccatcctgagttccgcgcagggtttaaaggatggcgtggctctgctgaaggtgtggcttaggcaacgggagttggacaaaggacagggcggtttcaccggtttccttgtttccatgcttgtcgtattcctggtctccaccagaaagatccacaccacaatgtcaggttatcaggtgctgcggtctgtgcttcagttcctcgctactaccgatcttacagttaacgggatttccctgtgtcttagcagcgatccaagtctccctgccctcgccgactttcaccaggcattctctgtggtatttctggactcttcaggacatctcaacctgtgtgcggacgtaactgcgtctacctaccaccaggggtggagtctgctgtggctgcaagtccaacacgaagcaagactctccatgatgctccttgacagtagggccgacgatgggtttcacctcctcttgatgaccccaaaacctatgattagagcttttgaccacgtcctccacctgagaccattgagcaggctgcaggctgcttgccaccggttaaaactatggcccgaactgcaggacaatggaggagattatgtgagcgcagccctgggcccactgaccaccctcttagagcagggcttgggcgctagacttaacttactggcccacagcaggcctccagttcccgaatgggacatttctcaggaccccccaaagcataaagacagtggcacccttacgctgggcctccttctccggcctgaaggattaaccagcgtgctcgagctggggcctgaagctgaccagcccgaggcggctaagtttcgtcagttttggggatccagatccgaactgcggaggttccaggacggcgctattcgagaggcggtggtatgggaagccgcttcaatgtcgcagaagcgactgattcctcaccaggttgttacacatttactggcactgcatgctgatatcccggaaacatgtgtccactatgtgggtggcccactcgacgccctgatccaaggactcaaggagacatcaagcactggggaagaggcgctggtcgcagcggtccggtgctacgatgatctttcacggctactctggggtctggagggtctgcctttgaccgtgtcagctgtccagggtgcccatcctgtccttaggtacactgaagtgttccccccaacacctgtgcgaccggctttttccttttacgaaactctccgcgagcggtcctcactactcccccgtctggataagccctgcccagcctatgtggaacctatgaccgtggtctgccatctcgagggcagcgggcaatggccccaagacgccgaggcagttcagagagtacgcgcagctttccagctaaggcttgctgagctcctcactcagcagcatggtttgcagtgtagggctaccgccacccacactgatgtcctgaaggatgggtttgtgttccgtatccgcgtggcttaccagcgagaaccccagattcttaaggaagttcagtctccggagggcatgattagtttgagggatacagccgcatcactgagactggaacgcgataccaggcaattacctctgctaacttccgctctgcacgggctccaacagcagcatcctgccttttctggcgtggcacggctagcgaaaagatgggtcagagctcagctcctcggtgagggcttcgctgacgagtctttagatttagtggctgccgctttattcttacatccagaaccttttacgccaccatctagccctcaggtagggttccttagatttctgtttctggtgtccacttttgactggaaaaataatccacttttcgtgaacctcaataatgaactgaccgtggaggaacaggttgagatccggagcggcttcctggcagcaagggcacagctcccagtcatggtaatcgttacaccacaggataggaagaattcggtttggacacaggatggcccttccgcccagatactgcagcagttggttgtgctggctgctgaggcccttccaatgctggaaaaacagctcatggacccaaggggacccggagacatccggacagtatttaggcccccattggatatctatgacgtgttgatacgcctttcccctaggcacatacctagacaccgacaggctgtggattcaccagctgcctcattctgcaggggtctactgtcccagcccggaccctccagcttgatgccagtgctggggtacgatcccccacagctgtacttaacacaattgcgggaggcctttggtgatctcgcactgtttttttacgatcagcacggcggagaagtgatcggggtcctttggaagccaacaagtttccaaccgcagccttttaaagcatcttccactaagggacgcatggtcatgagcagagggggagagttagtcatggtcccaaacgtggaggcaatcttggaggactttgcagtgcttggagaaggattagtccagactgtcgaggcacgatcggaacgatggacggtgtag

SEQ ID NO: 233289 - DNA, 2109 bp, synthetic construct
  misc_feature 1..2109: note = Description of Artificial Sequence: Synthetic coding sequence
  source 1..2109: mol_type = other DNA
atgatgcttctggacagccgggcagatgatggattccacctactcttaatgacaccaaaacccatgatccgggctttcgaccacgtattgcatctacggccactgtcccgtttacaggccgcatgccacaggctgaaactgtggcctgagcttcaggacaacggaggcgactatgtcagcgccgcactggggccactcactacattgctggagcagggactcggggctaggctcaatctgctggctcactctcggccaccggtgcctgagtgggatatctcccaggacccaccaaagcacaaagacagtggcacgctcaccctcggcttgctcctgcgacccgagggactcacaagcgtgctggagctcgggcctgaagccgatcagccagaggcggctaaatttagacagttctgggggagtagatcagaactacggaggtttcaggacggggcaataagagaagctgtcgtgtgggaggccgcatctatgtctcagaaacgcctgatcccccatcaggtggtcacgcacttgctggcactccacgctgacattcccgaaacctgtgtgcattatgtgggtggtcccctggatgcattgatccaggggctcaaggagacatcatctactggagaggaagcattagtggcagcggtcagatgctacgacgatctgagcagactcctgtggggactcgagggattaccgttgactgtctccgccgtccagggtgcccaccctgtgcttcgttatacagaagtctttccacctacgcccgttagaccagccttttcattctatgaaacccttcgagaaaggtcatccctgttgcctaggttagataagccttgccccgcttatgttgagcctatgaccgttgtttgtcacctggagggctctggccaatggcctcaggacgccgaggcggttcagcgagtgcgagccgcattccagctccggttggcagagctgcttacgcaacagcacggcttgcagtgtcgagccacggcgacccacacagacgttttgaaggacggattcgtctttcgcattcgggtcgcgtatcagagagaaccacagatcctaaaggaagtccagagcccagaagggatgatcagtctcagagacaccgcggcttctctaagactagaacgagacacgcgccagcttcctctactgacttctgcactccatgggctgcaacagcagcatccagcgttctccggggtggcaagactagcgaagcggtgggtgagggctcagctcctgggcgaagggtttgctgatgaatcgttggacctcgttgctgccgctctgtttctacatcccgagcccttcactcctccttcaagcccgcaggtggggttcctccggttcctgtttctcgtgtcaacattcgattggaaaaacaatcctctcttcgtgaatcttaacaacgagttaacggttgaagagcaggtggaaattagatcagggttcctagctgcacgcgcacagctgccagttatggttatagtaaccccacaagaccgcaagaatagtgtgtggacgcaggacggcccatctgcccagatactccagcaactggttgttttagccgcagaggccttaccgatgctggagaaacagttgatggatcctcgcggaccgggtgatatccggaccgtgttcaggcctcctctggacatctacgatgtgctcatccgcctgagtcccaggcacatccccaggcatagacaggccgtcgactctcccgctgcatccttctgccggggattattgtcacagccgggtcctagcagcctcatgcccgtgctgggatacgatccccctcagctttacttaacgcagttgagagaggcattcggggacctggctctgtttttttatgatcaacacgggggagaagtgataggcgtactgtggaagcccaccagcttccagccccagccattcaaagcatcttccaccaagggcaggatggtcatgagcagaggtggcgaactggtcatggtgcccaacgtcgaggccatcctggaagactttgcagtcctgggagaaggcctcgtgcagactgtcgaagctaggtctgaaagatggaccgtctag

SEQ ID NO: 233290 - DNA, 645 bp, synthetic construct
  misc_feature 1..645: note = Description of Artificial Sequence: Synthetic coding sequence
  source 1..645: mol_type = other DNA
atgaacctgtccagcgccagcagcactgaggaaaaagccgtcaccacggtcctgtggggttgcgagctgagccaggaacgcagaacctggacttttcggcctcaactcgaagggaagcagtcctgtcgcctgctactgcacaccatctgcttgggcgagaaggcaaaagaagagatgcaccgagtggaaattttaccaccagccaatcaggaggataagaagatgcaaccagtgacaatagccagcctccaggcctccgttttgccaatggtgagcatggtcggtgtacagctgtctcctccggtcactttccagctgcgcgcaggatcaggacctgtattcctgtcaggtcaggaaaggtacgaagcaagcgatttgacgtgggaagaagaagaggaagaagaaggcgaagaagaagaggaggaggaggaagatgatgaagatgaggacgcggacattagcctggaagagcagtctcccgtgaaacaggtcaagaggctggtgccacagaagcaggctagcgtcgcaaaaaagaagaaattagagaaagaggaggaggaaatccgggcaagcgtccgcgacaaaagcccagttaagaaggctaaggccactgccagagctaaaaaaccaggcttcaaaaagtag

SEQ ID NO: 233291 - DNA, 411 bp, synthetic construct
  misc_feature 1..411: note = Description of Artificial Sequence: Synthetic coding sequence
  source 1..411: mol_type = other DNA
atgaatctctcttcagcatctagcactgaagagaaagccgtaactaccgtgctgtggggttgtgagctgtcacaagaaagacggacctggacctttcggccacagctagaggggaaacagagctgtcgcttactgctgcatactatttgcctcggcgagaaggctaaagaggagatgcaccgcgtagaaatccttccccctgccaatcaggaagataagaagatgcagcctgtaactatagccagtctgcaagcctctgttctgcctatggtatccatggtcggagtccagctatccccaccagtcacctttcagctaagggctgggagtggacccgtttttctctcaggccaggagagatatgagaaaaaggctggaaaaagacgtcggggtaacaagagtcagaggtag

SEQ ID NO: 233292 - DNA, 645 bp, synthetic construct
  misc_feature 1..645: note = Description of Artificial Sequence: Synthetic coding sequence
  source 1..645: mol_type = other DNA
atgaatctaagttccgcctcctccaccgaagagaaggccgtgacaaccgtgctgtggggatgcgaactctctcaggagcgcaggacatggacctttcggccacagctggagggtaagcagagctgtaggctgctgctgcacactatctgcttgggagagaaagctaaggaggaaatgcaccgcgtggaaatcctgcccccagcaaaccaagaagacaagaagatgcagcctgtgaccatagcaagcctccaggcctcagtcctgcccatggtgagtatggtgggggttcaactgagcccacccgttaccttccaactgagggctggtagcggccctgtgttcctgtccgggcaggagaggtacgaggcctcagacctgacatgggaggaggaggaagaggaggaaggagaggaggaagaagaagaggaagaggatgatgaggacgaagatgctgatatctccctagaagaacagagccccgtgaaacaggttaaaaggctggtcccccagaagcaggcgtcggtagcaaaaaagaagaagctagagaaggaagaagaagagatacgcgctagcgttcgggataagtcccctgttaagaaggccaaggccactgcccgagccaagaaacctggttttaagaaatag

SEQ ID NO: 233293 - DNA, 645 bp, synthetic construct
  misc_feature 1..645: note = Description of Artificial Sequence: Synthetic coding sequence
  source 1..645: mol_type = other DNA
atgaaccttagtagtgcctcatctacagaggagaaagcggtcacgaccgtgctgtggggctgtgagctgagtcaggaaagacggacatggacatttaggccacagttggaagggaagcaaagttgccgactcttgttgcatactatttgccttggagaaaaggccaaggaagagatgcaccgcgttgagattcttcccccagcaaaccaggaagacaagaagatgcagccggttaccatagctagtctacaggccagcgtactgccaatggtgagtatggttggagtgcagctatcaccacccgttactttccaactgagggcaggcagcggaccagtgtttctgagtggccaggagaggtacgaagcttctgatctcacctgggaggaagaggaggaagaggagggcgaggaagaagaggaagaagaagaagatgatgaggacgaggatgctgacatatccctggaggagcaaagccccgttaaacaagtgaagcgacttgtgccccagaaacaggcctcagtcgccaagaagaagaaactggagaaagaagaagaggaaattcgagcttcagtgcgtgacaagtcccccgttaagaaggccaaggccactgctcgtgctaagaaaccaggcttcaagaaatag

SEQ ID NO: 233294 - DNA, 645 bp, synthetic construct
  misc_feature 1..645: note = Description of Artificial Sequence: Synthetic coding sequence
  source 1..645: mol_type = other DNA
atgaatctctcatctgcatcctccacggaggagaaggccgtgacaacagtactctggggatgtgagctgagtcaagaacggcgaacctggacattccgcccacagctagagggcaagcagagctgtcggttgctcctgcatactatttgcctcggggagaaggccaaagaagagatgcaccgagtggaaatcttaccgcctgcaaaccaagaggacaagaaaatgcaacctgtaacaattgcttctctgcaggcttccgtgctccccatggtcagcatggtgggggtacagctttctccacccgtgacatttcagttgcgcgctggatctggaccagtctttctgagtgggcaggagcgatacgaagcgtctgacttgacttgggaggaagaagaggaagaagaaggcgaagaggaagaagaagaggaagaagacgacgaagatgaggacgcagacatatccttggaggaacagagcccagtgaaacaggttaaaagactcgttcctcagaagcaggcctccgtcgccaagaaaaagaagctggagaaagaggaagaagagattagagcatcagtacgggataagtctccggttaaaaaggcgaaagcaactgcccgtgcgaagaagcctggtttcaagaagtag

SEQ ID NO: 233295 - DNA, 537 bp, synthetic construct
  misc_feature 1..537: note = Description of Artificial Sequence: Synthetic coding sequence
  source 1..537: mol_type = other DNA
atggccgctgggaccgcagcggctctggctttcctgagccaggagagcagaacccgcgcagggggagttggaggactcagggtgccggctcccgtgactatggactcttttttttttggctgtgaactgagtggccacacaaggtctttcactttcaaggttgaggaagaggatgatgcagaacacgttctggcattaactatgttgtgcttaacagagggagctaaagacgagtgtaatgtggttgaagttgttgcacgcaaccatgatcaccaggagatcgccgtaccggtcgctaacctcaaacttagctgccagccgatgctgtccctcgacgacttccagctgcagcccccagttaccttccgactaaaaagcggctcaggtcctgtgaggatcacaggtaggcatcagattgtgaccatgtcaaacgacgtgtccgaggaggaatccgaagaggaggaggaagacagcgatgaagaagaggtagaactgtgtccaatcctccccgcaaaaaagcaggggggtcgtccttag

SEQ ID NO: 233296 - DNA, 501 bp, synthetic construct
  misc_feature 1..501: note = Description of Artificial Sequence: Synthetic coding sequence
  source 1..501: mol_type = other DNA
atgaagtatacaagctatattctggcctttcagctgtgtattgtgctggggtcattgggctgctactgtcaagatccttacgtgaaggaggctgagaacctgaagaaatatttcaacgctgggcacagcgatgttgccgacaacggcacgctcttcctgggaattttgaaaaactggaaggaagaatccgaccgaaagattatgcaatcacagattgtgagtttctacttcaagttgtttaaaaacttcaaagacgatcagtcaattcagaaatctgttgaaacaatcaaagaggacatgaatgtcaaattctttaattctaataaaaagaaacgggatgatttcgagaaactcacaaactattcagtgaccgacttgaacgtgcagagaaaggctatccatgagctgatccaggtcatggccgaattaagccccgcagctaaaaccggcaagcgtaagagaagccagatgctattcagaggcagaagggcgtctcagtag

SEQ ID NO: 233297 - DNA, 2061 bp, synthetic construct
  misc_feature 1..2061: note = Description of Artificial Sequence: Synthetic coding sequence
  source 1..2061: mol_type = other DNA
atgagcatgttctccgattttcttcagtcctttctgaagcactcatcctcaacagtcttcgacctggtggaggaatacgagaatatctgcggctctcaggtcaatattctttccaaaatcgtaagccgtgcaactcctggactgcagaagttttccaagaccgccagcatgttgtggctcctgcagcaggagatggtcacttggaggctgcttgcgtctctgtacagggatcgcattcagtctgcacttgaggaggaatccgtgttcgctgtgactgctgtgaatgctagcgagaaaacagtggtcgaggcactgtttcaacgtgatagtctggtgagacagtctcaactggtcgtcgactggttagagagtattgccaaagatgaaattggggagttcagtgacaatatagagttctacgccaagtcggtctattgggaaaatacccttcacaccctgaaacagagacagctcactagttatgttggatctgtaaggcccctggtgactgagctagatcctgacgcccctatccgccagaagatgcccctggacgacctagaccgtgaggacgaagtcaggctgttgaagtacttgttcactctgatccgcgcagggatgaccgaagaagcacaacggctctgtaagcgctgcgggcaagcctggagagcagccacacttgagggatggaagctgtaccatgacccaaacgtcaacggaggtaccgaacttgagcctgtggaaggaaacccataccgacgcatctggaaaatcagctgctggcgaatggctgaggatgagctgttcaataggtacgaacgcgcaatctacgccgcactgagcggcaatctgaagcagcttctacctgtgtgcgatacctgggaggacacagtgtgggcatatttccgggtcatggtagactcgctggtggagcaggagattcaaacctcagtggctaccctggatgaaacggaagagctgcctcgggagtacttaggggcaaactggactctggagaaggtgtttgaagagctgcaggccacggacaagaaaagggtactcgaggagaaccaggaacattaccacatagtccagaagttcctcattttgggggatatcgacgggttaatggatgagttctcaaagtggctgtctaagagcagaaacaatctccctggtcaccttttacggttcatgacacacctcatcctgttcttccgaaccctcggcttgcagacaaaggaggaagtaagtattgaagtactgaagacttacattcaggaggatagattaaagattgacgtcatcgattggctggtgttcgaccctgcccagagagcagaggctctgaagcagggcaatgcaataatgcgtaaattcctcgcatctaagaaacatgaagcggctaaagaagtgtttgtcaagattccacaggatagtatcgcagagatatacaatcagtgtgaggagcagggtatggagtctcctctgcctgcagaggacgacaacgcaattagggagcacttatgtatccgagcctacctggaagcacacgaaacttttaacgagtggtttaagcacatgaatagcgtgcctcagaagcccgcattaattccacagccgacctttacggagaaggttgcgcatgagcataaagagaaaaagtatgagatggattttggaatttggaaaggtcacttagacgccctcactgccgatgtcaaggagaagatgtataacgtcttactgttcgtggacggcggttggatggtcgacgtcagagaggacgctaaggaggaccacgagcgcacccatcagatggtgcttctccggaaattgtgtctgcctatgctttgcttcctactgcatactatcctgcacagcactggtcagtaccaagaatgtcttcagttggcagacatggtgtcaagcgagcgacacaaactctacttggtctttagcaaggaggaacttcgaaaactgctccagaaattgagagagtcatctctgatgttgctagatcagggactagacccgcttggatatgaaattcagctgtag

SEQ ID NO: 233298 - DNA, 2691 bp, synthetic construct
  misc_feature 1..2691: note = Description of Artificial Sequence: Synthetic coding sequence
  source 1..2691: mol_type = other DNA
atgaaaattctcgtgatcttgcatcaagagaccaggctgtctttggagctgttggcccacttcgactctctggtccttagcaccaacctcctgtttatagttactccaacaagccggtcgctgctgcggcagcctgacatctcatgtattctaggtacaggaggaaaaagtcccaggcttactcagtcctccggatttttcgggaacctgtctatggtgacgaacttggacgatagtaattgggcggctgccttttcctcacagagatccggattgtttaccaacaccgagccccactccatcacagaagacgttactatcagtgctgtgatgctgagagaagacgaccccggagaagctgcttcaatgtccatgttcagtgactttttgcagtcttttcttaaacactcatcctctaccgtatttgatctggtggaggagtatgaaaatatctgcgggagtcaggtcaatatcctctctaaaatagtgtctcgggcaacaccaggcctgcaaaagttttctaaaacagctagtatgttatggctccttcaacaagagatggttacttggaggctgctcgccagtctgtacagggataggattcagtctgctttggaagaagagagcgtcttcgccgttaccgcagtgaatgcctctgagaagaccgttgtggaggccttattccagagggacagcctggtccgccagtcccagctcgtcgttgattggctcgagtctatagctaaggacgagatcggcgaattctctgacaacatcgaattttacgccaagagcgtgtactgggagaacacgctgcatacattaaagcagcgacaactaacctcctacgtggggtcagtgcgcccactggtgaccgagcttgatcctgacgctcccatccggcaaaagatgcccctcgacgacttggatagggaggacgaggtaaggctcctgaaatacctgtttaccctcattcgtgctggtatgaccgaagaggcgcagaggctgtgcaagagatgtgggcaagcctggcgagccgctacgctggaagggtggaaactgtaccatgaccccaatgtgaacggcggaaccgagttggagcccgtcgagggcaacccatatcggaggatctggaaaatttcatgttggaggatggcagaggacgagctcttcaacagatacgagcgggctatctacgcagccctatccggaaatttgaaacagttactgcctgtgtgcgacacatgggaggacaccgtatgggcttactttcgtgtcatggtcgatagtctggtcgagcaggaaatccagacgtccgtggccactctcgacgaaacagaggagctgccacgggagtatttaggcgctaactggacgctggagaaggtgtttgaagagctgcaggccacagacaaaaaacgggtgctggaggagaatcaggagcattatcatatcgtgcagaagttcctgatactgggggacatcgatgggctgatggacgagttcagtaagtggctgtcaaagtccaggaacaacttacccggacatctcctgcggttcatgacacatctgatcctcttctttcgcactttgggtttgcagaccaaggaagaagtgtccattgaggtattgaaaacctacatccagctactgatccgagagaagcacaccaatctgattgcattctacacctgccacttaccacaggatctggccgttgcccaatacgccctcttcctggagtctgtgaccgaattcgagcagcggcatcactgtctagaattggctaaggaggctgatctggacgtggccacgattaccaaaacggtggtagaaaacatccgaaaaaaggacaatggagagttttcccatcacgacctggccccagctttggatacaggaacaaccgaggaggatcggctcaaaatagatgtcatcgactggctagtttttgatccagcacagagggctgaagcgttaaaacagggcaatgcaataatgcgcaagtttttggcgtccaaaaagcacgaagcagccaaagaagtatttgtcaaaattcctcaggacagtatcgcggaaatttacaaccagtgcgaggagcaagggatggagtccccgttgccagccgaggatgacaacgctatacgagaacacctttgcatccgagcatacttggaagcccacgaaaccttcaacgagtggttcaagcacatgaacagtgtgccgcagaaaccagctctgatcccacagcctacattcactgaaaaggtcgcccacgagcacaaggagaaaaagtatgagatggatttcgggatctggaaggggcacttagacgcgctcacagccgacgtgaaggagaagatgtacaatgtgcttctctttgtggacggaggctggatggtagacgttcgggaggatgctaaggaggaccatgaacggactcaccaaatggtcctgttacggaagctatgtctccctatgttgtgtttcctgttacacacgatcctgcacagcactgggcagtatcaggagtgtctgcagctcgccgatatggtatcctccgaacgacacaagctgtaccttgtgttcagcaaagaggagctccggaaactcctccagaagcttcgcgagtcaagtctgatgctcctcgatcagggtttggaccccctggggtatgagatccagctttag

SEQ ID NO: 233299 - DNA, 3471 bp, synthetic construct
  misc_feature 1..3471: note = Description of Artificial Sequence: Synthetic coding sequence
  source 1..3471: mol_type = other DNA
atgttccccgctgccccaagcccacgtacaccaggcaccggaagtaggagaggtccactcgccggactcgggccagggtccactcctaggacggccagcagaaaagggctgccactaggttctgctgttagctcgcccgtgttattcagccctgtcggcaggcgctcatccctttcctctcgcggaacccccacccgtatgttcccacaccactcaatcaccgagtccgtaaactacgacgtcaaaacctttggctcaagcctgcctgtgaaagtcatggaagcgcttacactggccgaagttgacgatcaattaactataaacatcgacgagggcggatgggcatgcctggtctgcaaggaaaaactaatcatttggaagattgcgttatcgcccatcaccaaactctctgtctgtaaagagcttcagctccctccaagcgattttcactggtcagccgatttggtggcactgtcatattcttcaccctctggggaggcccattctacacaggcagttgcggtaatggttgccacaagagagggctccatacgatactggccaagcctggccggagaagatacatacacagaggctttcgtagactcagggggagataagacctatagctttctcaccgctgtgcaaggtgggtccttcatcctctcttcttccggctctcagcttatccgcctcatccctgagtcaagcggcaagatccatcaacacatcttgccacaggggcagggtatgctgagcggcattggccgtaaagtaagctccctctttggaattttgtcaccgagctctgacctgaccctgtccagtgtcctgtgggaccgtgaacgcagctccttctactccctgacaagcagcaatatcagtaagtgggagctcgatgattcttctgaaaagcatgcctacagctgggacatcaatcgggcactcaaagagaacatcaccgatgcaatatggggctcagagtcaaactacgaggccattaaagaaggtgtgaacattaggtatctggatctgaagcaaaactgcgacgggctggtgatcctcgctgctgcctggcactcagctgacaacccttgcttgatttattactcacttatcaccattgaagacaacggctgccagatgtccgatgctgtgaccgtggaggtgactcaatacaacccgccattccagtcagaggatctgatactgtgccagctcaccgtccccaattttagtaatcagaccgcgtacctctataatgaatccgcagtatacgtatgctccactggaacaggcaagttttccctcccccaggaaaagattgtcttcaacgcacaaggcgacagtgtcttaggagctggggcttgcggaggggttcctatcattttctcgcggaatagcggactcgtgagcatcacctcacgcgaaaacgttagcattttggccgaggatttggagggcagccttgcatcttctgtggccggtcctaactctgaatcaatgattttcgaaaccacaacaaaaaacgagactattgcacaggaggacaaaatcaagctgcttaaggcggctttcttgcaatactgtcggaaagatctcggtcacgcacagatggtggtggacgaactcttctcctcacattctgatctcgattcggatagcgaacttgacagggcggtgacccagatttcagtcgatctgatggacgattacccagcaagtgacccccgatgggccgagtctgtgccggaggaagctccaggattctccaacacttctctaatcatcctgcaccaactcgaggataaaatgaaggctcactcctttcttatggatttcattcaccaggttggactgttcggacgtttgggaagtttccccgtgaggggcacccctatggccacgcgcctgctcctatgcgagcacgcggagaaacttagcgccgctattgtgcttaagaatcatcattctaggctgagcgaccttgttaataccgccatcctgatcgccctaaacaagcgtgagtacgagataccgtcaaatttaacacctgccgatgtcttttttcgcgaggtgagccaagtggataccatttgtgagtgcctgctggagcatgaggagcaggtacttcgcgacgcccctatggatagtattgaatgggccgaagtcgtcataaatgtgaacaatatcctaaaggatatgctgcaggccgcatctcactataggcaaaaccgcaactccttgtacaggcgcgaggaatctctcgaaaaagagcccgaatacgtcccgtggactgctacatctggaccaggcggaatccgtactgtgatcattcgccaacacgaaatagtgctcaaggtcgcttatccacaagccgatagtaacttaagaaatattgttacagaacagcttgtggccctgattgactgttttcttgacggatacgtgtcccagctgaagtcggttgacaagtcttcaaatcgggaacggtacgataatctggaaatggaatatctgcagaagcgaagcgacttactctctcccctcttgtccctgggccaatacttgtgggccgcaagtctggcagaaaaatattgtgacttcgacatattagtccagatgtgtgagcaaaccgacaaccaatccaggctgcagaggtatatgactcagttcgctgatcagaatttctcagatttcctcttcaggtggtacctggagaagggaaaaaggggcaagttgctatctcaaccaatttcccagcatggtcaactggctaattttctgcaggcgcacgagcatctctcctggctacacgagatcaacagccaggaactggaaaaggcccatgccacactgttaggtttggctaacatggaaacgcggtactttgcaaagaagaagaccctcctgggcctttctaaactggctgcactcgctagcgacttttcggaggatatgctacaggaaaagattgaggagatggcagaacaagagagatttctactgcaccaggagacactgcctgaacagctgttggcggagaaacagcttaacctttcggccatgcctgtgctaacagccccacagttaatcggactctatatttgtgaggaaaatcgtagggctaacgaatacgacttcaaaaaagctctggatctgctcgaatacatagacgaggaggaagacatcaacataaatgaccttaaactcgaaatcctctgtaaggcactgcagcgggacaattggtcttctagcgatggcaaggacgaccctatagaagtatctaaggactctatattcgtcaagattcttcagaaactccttaaggacgggattcagctttctgagtatttgccagaggtgaaagatttgctccaggccgaccagctgggaagtctcaagagcaatccgtattttgaatttgtgttaaaagccaactacgagtattatgtgcaggggcagatttag

SEQ ID NO: 233300 - DNA, 675 bp, synthetic construct
  misc_feature 1..675: note = Description of Artificial Sequence: Synthetic coding sequence
  source 1..675: mol_type = other DNA
atgttccccgctgcaccctcaccacggactcccggaactggatcccgcagagggcctttggccggtctgggacccggaagtaccccacggactgcttcaagaaaaggactacccctgggttcagccgtcagctctccagtgctgttcagtcccgtgggaagaagaagttcactgtctagtagggggactcctacccggatgtttcctcatcacagtatcaccgaatccgtgaactacgacgttaagaccttcgggtcatccctgcctgtcaaagtgatggaggccctgaccctggccgaagtggacgaccagctgacaattaatatcgatgagggcggatgggcttgcctggtgtgcaaggagaagctgattatatggaaaatcgccctgtcgccaataactaagctaagcgtgtgcaaggagctacaattaccacctagtgacttccattggtctgcagacttggtggcgttgtcatatagcagcccctccggtgaggcccattctacacaggcagtggcagttatggttgcaaccagggaaggaagtatcaggtactggccgtctctagccggagaggacacctacactgaggcttttgtggactccggaggggataaaacctattcatttctgaccgcggtgcaggtgcacaaagaaacaaagtcaggctag

SEQ ID NO: 233301 - DNA, 3207 bp, synthetic construct
  misc_feature 1..3207: note = Description of Artificial Sequence: Synthetic coding sequence
  source 1..3207: mol_type = other DNA
atgttccctgccgcaccttcgcccagaacccctggtaccggttctaggcgtggcccactggcgggactcggccctggatcaaccccgagaacagcctcacggaaaggtctgccacttgggtctgccgtatcaagcccggtgctgtttagccccgtggggaggaggtcgagcctgtcatccaggggcaccccaacccggatgttcccccatcattctatcacagagtctgtgaactacgacgtgaaaacattcgggagttcactcccagttaaggttatggaagccctcacacttgccgaggtggacgatcagctgacaataaatatcgacgagggtggatgggcctgccttgtgtgtaaggagaaattgattatttggaaaattgccctctccccaataacgaaactgtcagtgtgtaaggaattgcaacttcccccttctgacttccactggtccgccgacctggtcgccctcagctactcatcaccatcaggagaagctcatagtacccaggccgtggccgtgatggtcgcaacgcgcgaaggatcgatcaggtactggccgagccttgctggggaagatacctatacagaggcttttgtggactccgggggagataagacttattcttttttaactgccgtgcagggtgggtctttcatcctgagtagcagcggctcccaactgattcgcctgattcccgagagttctggaaaaatacatcagcacattctgccgcagggacagggaatgctcagcggtattggacgtaaggtttcttcgctgtttggtattcttagtccctcgagtgacctcacattaagctcggttctgtgggatcgagaaagaagctccttttattcgctgacatcgagcaatattagtaagtgggaactggacgacagtagcgaaaaacacgcctatagctgggatatcaaccgggctctgaaggagaatatcaccgacgcaatctggggcagcgaaagtaattatgaagctataaaagaaggcgtcaacattcggtaccttgatctcaaacagaattgcgacggactggtcattcttgccgcagcctggcatagcgccgataacccatgcctcatctattactcacttatcacaatagaagacaacggctgccaaatgagcgacgccgtgacagttgaagtcacccagtataatcccccattccagagcgaggatctgatactttgtcaactgactgtgccgaattttagcaatcagaccgcatatctgtataatgagtccgccgtttatgtgtgctccacaggtaccggcaaattttcactgccccaggaaaaaatagtctttaacgcccagggcgactccgttctgggggctggcgcatgtgggggtgtgcctatcatcttcagtcgcaatagcggcctcgtaagcataacatccagggaaaatgtaagcattctggccgaagacctggagggatcgctagcttctagcgtagccggacctaacagtgagagtatgatcttcgaaacaacaactaagaacgagacgatcgcgcaggaggataagattaagctcctaaaggccgcttttctgcaatattgtcgtaaggatctggggcatgcacagatggtggtcgacgaactcttttcaagtcacagcgacttggacagcgactccgagctggatagagctgtcacacagatctccgtcgacctgatggacgattacccagcctctgacccccgatgggcagaaagcgtgccagaggaagcaccgggatttagcaacacctcgttaatcattctgcatcagctcgaggacaagatgaaggctcatagcttcctgatggactttatccaccaggtaggtcttttcggccgtctgggaagtttccccgtacgcggaactcccatggcaacccgccttctgctttgcgagcacgctgagaagctgagcgccgctatcgtgctaaagaaccaccattctcggctgagtgatcttgtaaatactgctatattgattgcccttaataagcgggagtatgagataccctccaatctgacgccagccgacgttttttttcgcgaggtgtcccaggtagataccatttgtgagtgcctcttggaacacgaggagcaggtgctaagggacgctcctatggattcaatcgaatgggcagaagtggttattaatgtgaacaatatcttaaaggatatgctccaggccgcatcacattaccgacaaaatagaaactcattgtaccggagggaggaatctctggagaaggaaccagagtacgtgccatggaccgctacctcaggtcctggcggaatcagaacagtaatcatcaggcagcatgagattgtcctgaaagtcgcgtacccgcaagctgattctaacctcaggaacatcgtgactgagcagctcgtcgccttgattgactgcttcctcgacggatatgtcagtcagctcaagagcgttgacaagagctcgaatcgcgagaggtacgacaacctcgaaaaaggaaagaggggtaagcttttgtctcagcccatttcccagcatggacagctcgcaaacttcctgcaagctcatgaacatctgagctggctgcacgaaataaattcacaggaattggaaaaggcgcacgctacactgctgggattggccaacatggaaaccaggtatttcgcgaaaaagaagaccctccttggcctgagtaagctcgccgctctggcatccgacttcagcgaggacatgctgcaagagaaaattgaggagatggcagagcaagagaggttcctactgcaccaagagacgctacccgaacagctcctggctgagaaacagctgaacctttctgcgatgccagtgctgaccgcaccccagctcatcggcctgtatatctgtgaagagaatagaagagccaatgaatacgatttcaaaaaggctctagatctactggaatatatcgatgaagaggaggacataaacattaacgatttgaaacttgagatactatgcaaagcacttcagagagataattggtcctcttctgatgggaaggacgatcccattgaggtgtccaaagattccatttttgtaaaaatattacagaagttgctgaaagacggcatacagttgagcgaatatttacctgaagttaaagatctgttgcaggcagatcagctcggaagtatcaacgtcaatttttgttag

SEQ ID NO: 233302 - DNA, 3258 bp, synthetic construct
  misc_feature 1..3258: note = Description of Artificial Sequence: Synthetic coding sequence
  source 1..3258: mol_type = other DNA
atgtttcccgctgcccctagtcccagaaccccaggcacaggatccagacggggacctcttgctggactgggtcctggatctaccccaagaacagctagtcgaaagggcttgcctctcggatctgccgtcagttctcctgtgctgttctctccggtgggcagacgcagctccctgtcaagcagaggtactcccacccgcatgttccctcaccactcaatcactgaatcagtgaactacgacgtcaagacatttggttcttcactgccagtgaaggtcatggaggctctcaccctcgccgaggtagatgatcaactgaccattaatattgacgagggcggatgggcgtgcttggtgtgcaaggaaaagctaattatctggaagattgccttatctccaatcaccaagttgagcgtgtgcaaggaattgcagttacccccaagtgatttccattggtccgccgatttggtggctctttcatattcatccccatccggggaagcccactccacacaggccgtggccgtcatggttgccactagagagggtagtatccgctactggccaagcctcgccggtgaagatacctacacagaagcgtttgtggacagcggcggagacaagacctatagcttcctcacagccgttcaggggggttcgttcatcctcagctcaagtgggtcccaattaatacgattaatcccagagagcagcgggaaaattcaccagcacatcctcccccaaggacagggtatgctttcaggtatcggcaggaaggtatcctccctctttgggatcttaagtccatcctcggaccttactctgtccagcgtgctatgggaccgcgaacggagctccttctactccctcacgtcctcaaacatatccaagtgggaactcgacgattcaagtgaaaaacacgcctactcctgggacataaaccgcgcactcaaggagaatatcacagatgctatctggggcagtgaatcaaattacgaggctatcaaggaaggcgtgaatataaggtacctcgacctcaaacagaactgcgacggtctggtgatcctggcagccgcttggcacagcgcggataacccttgcctgatctattactccctgatcacgatagaggataacggctgccagatgagtgacgcagtgacagtagaggtgacccagtataaccccccattccaaagcgaggacttaatcctctgtcaattaacagtgcccaacttctccaatcaaacggcctacctgtataacgaatctgccgtgtacgtgtgctccaccggaactggcaagttctccctgccacaagagaagatcgtgttcaacgcacagggggattctgtgcttggagccggtgcctgtggcggagtccctatcatattttcaaggaattctggcctggtgtcaattacgagcagggagaacgtgagcatccttgccgaggacctggagggtagtcttgcctcttcagtggcagggccaaacagcgaaagtatgatttttgaaactacaaccaagaacgagactatagctcaggaggataagattaagctgcttaaagccgcttttttacagtattgtcgaaaggacctcgggcacgctcagatggtggtggacgagctgttttcttcacacagcgacctggattcagactctgaattggaccgagcggtgactcaaattagcgtcgacctgatggatgattatccagcttcggatcctcgatgggctgaatccgtcccagaagaagcacccggtttttctaacacttccctcattatcctccatcagttagaagataaaatgaaggcacactcattcttgatggactttatacatcaggtagggctattcggccgtcttggttccttccccgtcaggggaacgccaatggcaacccgcctattactatgcgaacatgccgagaagttatctgccgcaattgtcctgaaaaaccaccatagccgcctatcggatctggtgaacactgctattttaatcgccctgaacaaacgcgagtacgagattccctctaacctgaccccggcagatgtctttttcagagaagtgagccaggtggataccatatgcgagtgcctgctggagcacgaggagcaggtcctgcgcgacgccccaatggacagcatcgaatgggcagaagtggttattaatgtaaataacattcttaaggacatgcttcaagccgcttctcattaccgccagaataggaatagcctataccggcgagaggaaagtcttgagaaggaacctgaatatgtgccctggaccgccacttcgggacctggcggaatccgaaccgtcattattcgtcaacacgagattgtgctaaaagtcgcttatcctcaggcggacagtaatctcagaaacatcgtgacagagcagctggtggcactgatcgactgtttcctggacggatatgtgtcacaattaaagagtgttgacaagtcctcgaatcgggaaaggtacgataatctcgaaaaggggaaacgcggaaagttactctcacaacccatatcacagcacggacaacttgccaactttctccaagcccacgagcatctgagctggctgcatgaaatcaattcccaggagctcgagaaagctcacgcaacgctcctgggcttagcgaacatggagacaaggtatttcgccaaaaaaaaaaccctgcttggtctgagtaaacttgcagccctggcaagcgacttctctgaagatatgttgcaggagaagatcgaggaaatggccgaacaggagcggttcctgcttcaccaggagaccttgcctgaacagctcctggctgaaaaacaactgaatctgagcgcaatgcctgtcctcaccgctccccagctgatcggtctctatatctgcgaagagaatagaagggccaatgaatatgacttcaagaaggccctcgatctcctggaatacatcgatgaggaggaagacataaacataaatgatcttaaactcgagatcctttgtaaggctcttcagcgggataattggtcttcctccgatgggaaggacgatcctattgaagtgtctaaggattccatattcgtaaagattctgcagaagctactgaaggatgggatccagctttctgagtatctccctgaggttaaggatctgttacaggcggaccagctgggctcactcaagagtaatccttacttcgagttcgtgcttaaagctaactatgagtactacgtgcaaggccagatctag

SEQ ID NO: 233303 - DNA, 3423 bp, synthetic construct
  misc_feature 1..3423: note = Description of Artificial Sequence: Synthetic coding sequence
  source 1..3423: mol_type = other DNA
atgggcccactggccggacttgggccaggatcgacaccacggactgcatctcgcaaggggcttcccctgggctccgctgtctcgagtcctgtgctattttctcccgtggggcgtcgatcatccttgtcctccaggggaaccccaacaagaatgtttccccatcattctattaccgaatctgtgaactacgatgttaaaacttttggcagcagtctcccagtgaaagtgatggaggctctcactctcgcagaggtggacgatcagctgactataaatatcgatgaaggcggatgggcttgcctagtgtgcaaagagaaacttataatttggaaaattgcgctttcacctatcacaaagctgagtgtctgtaaggagttacagctgccaccttctgattttcactggtctgccgaccttgtcgcacttagctattcatctccttccggcgaggctcattctactcaggccgtggccgtgatggtggctacacgagagggctcgatacggtattggccctccttggccggtgaggacacatataccgaagcattcgtcgactccggcggtgataagacctactcattcctcacagccgtgcagggagggagtttcattttaagcagcagcggctcacaactgatccggctgatccctgagagctccgggaaaatccaccaacacatcctgccgcagggccagggtatgttgtccggcattggacgcaaagtttcttcgcttttcggaattctcagcccttccagtgacctgactctgagttccgttctttgggatagggaaaggagttccttttacagtctcacctcctcaaatataagtaaatgggaattggacgactcatcggagaaacacgcttattcatgggacataaatcgcgctctgaaggagaacattactgacgctatttggggaagtgagagtaattacgaggcgatcaaggagggcgtgaatattaggtatctggacctgaagcaaaactgcgatggtcttgtcatccttgctgccgcttggcactcagcggacaacccttgcctgatctactactcactgattacgattgaagataatggctgtcaaatgtccgacgctgttactgtagaggtgacacagtacaacccgccttttcagagcgaggatctcatcctttgccagctgaccgtccccaattttagtaaccaaactgcatatctgtacaacgagtctgccgtgtacgtctgtagcaccggcacaggcaagttctctctccctcaagaaaagatcgtgtttaacgctcagggcgactctgttctaggggctggcgcatgtggcggtgtccctatcatcttttcacggaacagtgggttggttagcattacctcccgtgaaaacgtgtcgatcctggccgaggaccttgaagggagtcttgcctctagtgtagccggacctaacagtgaaagtatgattttcgaaacaacaacaaaaaatgagaccatagcccaggaggacaaaataaagctgctgaaagccgcttttctccaatattgcaggaaagacctgggccacgcccagatggtcgtcgatgaactgttctcctcacactccgatctggactctgatagcgagttagatagggcagtgacacagatcagtgttgacctgatggacgattatccagcttcggacccaaggtgggcagagagtgtgcccgaggaagcgccagggttttccaatacatctctcatcatcttgcatcagctggaagataagatgaaggcacattcattcctaatggattttatccaccaggtggggctcttcggtcgactgggttccttccctgtcagaggaaccccaatggctacacgattgcttctttgcgaacacgccgagaaactgtccgccgcaatcgtgctgaagaatcatcacagtcggctttccgatcttgtcaatacggctatactgatagcattgaataaaagagagtacgaaatcccttccaacctgacccccgctgacgtgttcttcagagaagtcagtcaagtcgataccatctgtgaatgtctgctggagcatgaagagcaggtcctcagagacgccccaatggacagcatcgagtgggctgaggtagtcatcaatgttaacaatatcctgaaggatatgcttcaagcagcgagccactatcgacagaacaggaacagcttgtatcgacgagaggaaagcctggaaaaggagcccgaatacgtcccatggactgctactagtggcccagggggtatccggactgtgatcatccggcagcacgagatcgttctgaaggtggcctaccctcaagcagactccaacctccgcaacattgtaactgagcagcttgtcgccctgatcgactgctttcttgatgggtatgtgtcccagctgaagtccgtggataagtcaagcaatcgagagcgctatgataacctggagatggagtacctgcaaaagagatcagatttactgtccccgcttctctcccttggtcagtatttatgggctgcgtccttggccgagaagtattgtgactttgatattttggtgcagatgtgcgagcaaaccgacaaccaatccaggctccaacgctacatgacacagttcgccgaccaaaatttctcagatttcctgtttaggtggtacctggagaaggggaaaagaggcaaacttctgtctcagcctatctcacaacatggacaattggccaatttcctccaggctcatgagcatctctcttggctgcacgagattaattcacaagaattagagaaagcgcacgctacccttttggggctcgccaacatggagacgagatatttcgctaaaaagaaaacactactgggattatctaagttggcggctcttgccagcgatttttcagaggatatgttgcaggaaaagatcgaagaaatggcggagcaggagagattccttctgcatcaagaaaccttgcccgagcagttactggcagagaagcaacttaacctaagcgcgatgcccgtgctcacagctccccaacttattggactgtatatctgcgaggagaaccgcagggccaacgaatatgacttcaagaaggcccttgacttattggaatatatagacgaagaagaagacattaacataaatgaccttaagctcgagatcttgtgtaaggccctacagagagacaattggtcctcatctgatggaaaggacgatcctatagaggttagcaaggacagcatatttgtgaagatcctgcagaagttactcaaggatgggattcagctctccgaatatttacctgaagttaaagacctgttacaggccgatcagctggggtcactcaaaagcaatccttactttgagttcgtcctgaaggccaactatgagtactacgtccaaggccagatttag

SEQ ID NO: 233304 - DNA, 4428 bp, synthetic construct
  misc_feature 1..4428: note = Description of Artificial Sequence: Synthetic coding sequence
  source 1..4428: mol_type = other DNA
atggcaagcggcgcaggtggagtaggcggaggcggtgggggtaagataagaacaaggcgttgtcatcagggcccaatcaagccgtaccaacaaggtcgacaacaacatcaggggatcttaagcagggttactgaaagcgtgaaaaatatagtgcctgggtggctgcagcgttacttcaacaagaatgaggacgtctgctcctgctccactgatacctcagaggtcccaaggtggccagagaataaggaggatcatttggtgtatgcggacgaagagtcaagtaatatcacggacggacgcatcaccccggagcccgcagtcagtaatactgaggaacctagcacaactagcacggcttcaaactaccccgatgtgcttacccgtcccagtttacatcgctcccatttaaacttctctatgctcgaatcacccgcactacattgccaaccttcgacgtccagtgccttccccattggtagtagtggattctccctggtaaaggagatcaaggattccacttcccagcatgacgatgacaatatcagcaccacaagcgggtttagtagtagagccagtgacaaggatattaccgtctcaaaaaacacatctctcccccctttatggtcaccggaagccgagaggagtcactcgctaagccaacacacagcgacatcctcgaagaagcccgcttttaacctgtcagctttcggaaccttgtcaccttctcttggaaactcatccattctgaaaaccagccagcttggcgatagccccttctatccaggtaagacaacctacggaggagcagccgcagccgtgcggcagtcgaagcttaggaataccccgtaccaggctcccgttaggaggcaaatgaaggcaaagcagttgagtgcccaaagttatggcgtgactagctctacagcgagaagaatactccaatccttggagaaaatgtctagtcccctggccgatgcaaagcggattccttccatcgtctcttctcctttgaactcacccctggaccggagtgggattgacataacggacttccaggccaaacgggagaaggtggactctcagtacccccctgtacagagactgatgacgcccaaaccagtgtccattgcaacaaacaggtctgtatacttcaagccctccctcaccccatccggcgagttcagaaaaacgaatcagcgtatcgacaataagtgttccactgggtacgaaaaaaacatgactccagggcagaaccgggagcagagggagtccggtttctcatatcccaactttagtttgcccgctgccaacgggctgtcctctggcgtaggcggtggcggagggaagatgcggcgagaacgcacccgattcgtagcctcaaagccactggaagaggaagagatggaagtccccgtactgccaaagatctctctgccaataacaagcagtagcctgcctactttcaatttttcaagccctgagataacgactagttcaccatccccgattaacagtagccaggcgttgactaacaaggtgcagatgacgagtcccagctccacaggctctcccatgttcaagttctcatcaccaatcgttaagagcaccgaagccaatgtcttgcctcctagctcaattggcttcacctttagtgtgcccgtcgctaaaaccgccgagctgtccggcagttcctccacacttgaacctatcatatcttccagcgcgcaccatgtgacaacggtgaatagcactaactgcaaaaagacacctcccgaagattgtgagggaccctttaggccggctgagatattaaaagagggctcagttctggacattctgaaatcccctggctttgcttcgccaaaaattgattcagtggctgctcagccaaccgcaacttccccagtcgtgtacactagaccggcaatttcttccttcagttcctctggcattggcttcggcgagtccctgaaagccggatcatcatggcagtgtgacacctgtcttcttcagaacaaggtgactgacaacaagtgcatcgcttgccaggccgctaaactgtcgcctagggacactgcgaaacagactggcatcgagactcctaacaagtcaggaaagaccactcttagtgcctccgggactggctttggtgataaattcaaacctgtgatcggcacgtgggattgcgatacatgcctagtccagaataaaccagaggctataaagtgcgtcgcatgcgagacacctaaacccggaacttgtgtcaaaagagcgctcacactgacagtcgtgtccgaaagcgcggagaccatgaccgcctcttcatcatcatgcactgtgactacaggaaccctgggattcggcgataaatttaaaaggccaatcgggagctgggagtgtagcgtttgttgtgtcagtaacaacgctgaggataataagtgcgtgagctgtatgtcagaaaagcctgggagctccgtccctgcttcaagtagctcaactgtgcccgtgtcattacccagcggtggatccctcggcctggaaaaatttaaaaaacccgagggctcatgggattgtgagctgtgcctagtccagaataaggccgactcaaccaaatgtctggcctgtgagtcagcaaaacctggcacaaaatctggattcaagggattcgacacgagcagctcttcctcaaacagcgcggcatcctcttccttcaagttcggcgtttcgtcatcctcttcaggcccttcccaaactctgacatccaccggcaatttcaaatttggcgaccagggcggattcaaaataggagttagctccgacagcgggagcattaatcccatgagcgagggtttcaagttctctaaacccatcggtgacttcaagtttggcgtctcttcggaatcaaagccggaagaggtcaaaaaagacagtaagaatgacaacttcaagttcgggctctcaagcggcttgtccaaccccgtgagtctgacgcctttccagtttggtgtctccaatcttgggcaagaggagaagaaagaggagttaccgaagtcctctagtgccggattttcattcggcactggtgtgatcaactctacaccagcacccgcaaatacgattgtcacctctgagaacaaatcttcctttaatcttggtacaatcgaaactaagtcagccagcgtcgcaccttttacatgtaagacctcggaggctaaaaaggaagaaatgccagccactaaagggggattttccttcggcaatgtcgagcccgcatctctgccgtccgctagcgtttttgtactcggcagaacagaggaaaaacagcaggagcccgtcacttcaacttccctagtgttcggaaagaaagccgacaacgaggaacccaagtgccagcccgtctttagctttgggaactctgagcagaccaaagacgaaaactcctcgaagagtactttttcatttagtatgactaaaccctccgagaaggaatccgagcagccagccaaagctaccttcgccttcggggctcagacaagtactacggcagatcaaggcgctgcaaagccagtgttctcctttctgaataatagcagtagctccagtagtactccagctacaagcgcgggagggggaatcttcggaagtagtacgagcagcagcaatccccctgtggcaacattcgtcttcgggcagtcatcaaaccctgtatcatcatctgcgtttggcaataccgccgagagcagtactagccagtcattgttattttcccaggattctaagttggccacgaccagcagtaccggcacggcggttacaccttttgtttttgggcctggtgcttcatcaaataatacaacgacctccgggttcgggttcggggctacaactacctcgtcctccgcagggagctctttcgtattcggcaccggcccttccgctccatccgcatccccggctttcggcgctaaccagacacctacatttgggcagtcccagggcgcatctcaacctaatcctcccggatttggttccatcagttcctctaccgctctgtttccaaccgggtcacagccagctcctcctacatttggaactgtgagctcatcctctcagcctccagtgtttgggcaacagccttcccagtcagcattcgggagcggcacaacacctaactctagttcagccttccagttcgggtctagtacgacgaatttcaatttcaccaacaatagcccctccggcgtctttacttttggggcaaacagctccacacccgctgcgtccgcccagcctagcggcagcggcggatttccgttcaatcagtcccctgccgcattcactgttgggagcaatggtaaaaacgtgtttagttcatctgggacaagcttctctggtcggaaaataaagactgcagttcgacggcgaaagtag

SEQ ID NO: 233305 - DNA, 4368 bp, synthetic construct
  misc_feature 1..4368: note = Description of Artificial Sequence: Synthetic coding sequence
  source 1..4368: mol_type = other DNA
gggctaagattgtgtctgtcacgtcctctgactcggcctggagctggctcaggcggagggtccgccatggcctcaggagccggaggagtagggggaggcggtggcggtaagattcgcactcgccgatgccaccaaggccctatcaaaccttaccaacagggaaggcagcaacaccaaggaatactctcaagagtgaccgaaagcgtgaaaaatattgtgcccggatggctccaaaggtacttcaacaagaatgaagatgtttgttcatgtagcactgatacctccgaggtaccacgatggcccgagaataaggaggaccatcttgtgtatgccgacgaggaaagcagcaacatcactgatggaaggatcacgcctgagccggctgtgtccaatacagaggaaccatccacaacttctactgcctccaattatcctgacgttttgacgaggccatctcttcaccgcagccacctgaacttttctatgttagagagtccagccctacactgccaaccgtcgactagcagtgcctttccgattggcagttccgggttcagtcttgtcaaggagataaaggactcaacatcacaacatgacgatgataatatctcaacaacctctggcttcagcagtcgggcatcagacaaggacatcaccgtcagtaaaaatacatctctgcctcctctgtggtccccagaggccgaacgatctcattctcttagtcagcataccgcgaccagctccaagaagcctgcctttaatctgagcgcgtttggtacactgtcccccagcctggggaacagctcaatcctgaaaacatcccaattgggagactcccccttctacccgggtaaaactacctacggcggagccgcagccgcagtgaggcaaagcaagctgaggaatactccctatcaggccccagtaagaagacagatgaaagctaagcagttgtctgcccagagctatggggtcacgagctcaacagccagacgaattttacagtctctggaaaagatgagcagccccttagctgatgccaaaaggattcccagtatcgtctcctcacctctgaattctcccctggaccggagcggcatcgacatcacagactttcaagccaagcgtgaaaaagtcgatagccaataccccccagtacagcgcctaatgacccctaagccagtgtctatagcgaccaacaggagtgtatattttaagccctctctgacgccatccggagaatttcgcaaaaccaatcagagaatcgacaacaaatgtagcaccggttacgagaagaatatgacccctggtcagaaccgcgagcaacgcgaatccggattctcttacccgaatttctcactgcctgccgcaaacggactgtcaagcggagtcggcggaggaggagggaagatgcggcgagaaagaacccgatttgtagcatccaaacccctggaagaggaagagatggaagtaccagtgttgcccaagatcagcttaccaattacttcaagctcacttcctacgttcaatttcagttcccccgagattaccaccagctcaccatccccaataaactcgagccaagccctgactaacaaggtgcaaatgacctctccttcctctacaggcagccctatgtttaaattctcttctccgatagtgaaatccacagaggccaacgtgttgcccccttcctcgatcggtttcaccttttcagttcccgttgcaaaaacggctgagctctccggctccagctctacattagagcctattataagcagctcaggcttcgcaagtccaaagattgacagcgtggcagctcagcccaccgccacctctccagtggtctatacacggccagctattagcagcttttcttcctccggaatcggctttggcgagtcgctgaaagccggaagctcttggcagtgcgacacctgcttgctccagaataaagtaacagacaacaaatgcatagcctgccaggccgcaaagctgagtcccagagatacagccaagcagacaggtatagaaacaccgaacaaaagcggcaaaactaccctctcggcctctggtaccgggtttggggacaagtttaagcccgtcataggcacatgggattgcgacacctgcctggtgcagaataaaccagaggcaataaaatgtgtggcctgtgagactcctaagccaggcacttgcgtcaagagagctctcactctgaccgtggtgtctgagagcgctgagactatgacagctagcagcagttcttgcaccgtgacaaccggaaccctcggtttcggcgacaagtttaagagacccattgggagctgggagtgcagtgtttgctgtgtcagcaataatgcggaggataacaaatgcgtttcatgtatgtctgaaaagccaggaagctcggttcccgcaagcagctcttctaccgtgcccgtcagccttccctccggcggaagtctgggtttagagaagttcaaaaaacctgaaggctcttgggactgtgagctgtgcttggtgcagaataaagccgactctaccaaatgtctggcttgtgagagcgccaaaccgggtactaaatccggatttaagggctttgacacctccagctctagtagcaacagtgctgcctcgtcctcattcaaatttggggtgtcgtcctcttcttctggaccaagtcagacattaacctctaccggcaacttcaaattcggcgatcagggaggatttaaaatcggtgtcagctcggactccgggagcatcaaccccatgtccgaagggtttaaatttagcaagcctattggtgattttaagtttggtgtgagcagcgaatccaagcccgaagaggttaaaaaggatagcaagaacgacaatttcaagttcggactgtcttctggtttgtcgaatccagtatccttgacgccatttcaatttggggtgtccaatctcggacaagaggagaaaaaggaggagcttccaaaaagctcatctgcgggtttctcattcggaaccggcgtcatcaactccacccccgcacccgctaatacgatagttacctccgaaaataagtccagtttcaatctgggcacaatcgagacaaagtctgccagcgttgcgccatttacctgtaaaaccagcgaagccaagaaagaggagatgcccgcaactaaagggggattctcctttgggaacgtagaacctgccagcctgccgtctgccagcgtgttcgtgctcggccgtacggaggagaagcagcaggaaccagtgacttccacatccctcgtgttcggtaagaaagccgacaacgaagagccaaaatgccaacccgtattctcattcggaaatagtgaacaaaccaaagacgaaaatagctccaagtctactttcagcttctccatgacgaagccttcagagaaggagtcagagcagcccgctaaggctacgtttgccttcggcgctcagacttccaccaccgcggaccaaggtgcggctaagccagtgtttagctttctcaataactcttcctccagctcgagtacccctgccacctctgccggtgggggtattttcggctctagcacatcgtccagcaacccccctgtggccacattcgttttcgggcagagttcaaaccccgtcagttcttctgcttttggcaacacggcagaaagctctacatcccagagcctactcttctcacaagattcaaagttggcaaccacgagctcaacaggcaccgctgtaacccccttcgtgtttggacccggagcttccagtaataacaccaccacaagtggcttcggcttcggtgctaccactaccagcagctcggcaggatcaagttttgttttcggaacgggcccttcggccccttctgcatcgcccgcatttggcgcaaaccagacacccacattcggacagagtcagggggcttcccaacccaatcctcctggatttggaagcatctcctcatctactgccctttttcctacggggtcccagccagctccacccaccttcggaaccgtgagctcttcgagtcaaccgcctgtgttcggccagcagccgagtcagtctgcctttggctcaggcacaaccccaaatagctctagtgcctttcagtttggctccagtactaccaattttaacttcaccaataactccccctctggagtattcacttttggcgctaattcttcaacccctgccgctagtgctcagccctctggcagtgggggtttcccttttaatcagtcgcccgctgcgtttacagttggctctaacggcaagaatgtgtttagctcgagtggcacctcatttagcggacggaaaattaaaaccgccgtgcggcgacggaaatag

SEQ ID NO: 233306 - DNA, 4521 bp, synthetic construct
  misc_feature 1..4521: note = Description of Artificial Sequence: Synthetic coding sequence
  source 1..4521: mol_type = other DNA
atggctagcggcgctgggggtgtggggggtggcggaggcggaaaaataagaacccggagatgccaccaggggccaattaaaccgtaccaacaagggaggcaacagcatcaggggatcttgtcccgggtcaccgaatctgttaagaacatagtgcctgggtggctgcagcgctattttaacaagaacgaggacgtgtgctcctgtagcacagatacgtcggaggtccctcgttggcccgaaaacaaggaggaccacctggtctacgcagacgaggagagttccaacatcactgacgggaggatcacacccgaaccagcagtcagcaatactgaggagcccagcaccacgtccaccgcctcgaactatcccgatgtcttgacacgcccttcccttcaccgatcacacctcaacttctcaatgctggaatcccctgcacttcactgtcagccttccactagtagcgcatttcctattggctcttcggggttttccttagtgaaagagatcaaggactctacatcacagcacgacgacgacaacattagtaccacttccgggttctcctcgagagctagtgacaaagatattactgtgagcaagaacacctccttgccacccttgtggtccccagaggctgaaaggtcacacagcctgtcccagcacactgcaacatcctccaaaaagcccgcttttaacttaagcgctttcggaactctttcaccgtcactgggaaatagcagcatactgaaaacaagtcagctgggggattctccattttatccaggtaagactacatatggcggtgcagccgcagcagtgaggcagtccaagttgcgcaacactccctaccaggctccggtccggaggcagatgaaagccaaacagctcagcgcccagagttacggtgtcacatcctctacggctcggcgtatcttacagagcctggagaagatgtcctcacctctggccgatgcaaagcgaataccaagcattgtctctagccccttgaacagcccactggaccggtctggcatagacattacagacttccaggccaagcgggagaaggtggatagccagtacccgcctgtccagagactgatgaccccaaagcctgtctctattgcaacaaaccgatctgtgtattttaagccatcgcttactccaagcggagaattccggaaaacaaaccagcgtattgacaataagtgctctactggctacgagaagaatatgactcccggacagaatagggagcaacgagaaagcggtttttcttatcctaattttagcctgcctgccgcaaatggcctctccagtggcgtggggggtggaggcggaaaaatgagacgtgagaggacgaggtttgtggccagcaagcccctcgaggaggagcgccagggacttaccgttctaccaaagctgatcagcagttcttgtgctcaggccattatcccatcgtggccccttaaggttcttcgcttgcaggaaatggaggtccctgtcctgccaaagattagtctacctatcactagcagctctctccccactttcaatttctcctcaccagaaatcaccacatcaagtccctcacctatcaactccagccaggcactgaccaacaaagtgcaaatgacctcaccatctagcactggctcccctatgtttaaatttagtagccccatcgtcaagtctactgaggccaatgtcctacccccaagtagcataggctttacgttttctgtacctgtcgcaaaaacagctgaactgtccggctctagctctaccctagaacccattatcagtagctctgctcaccacgttactaccgtcaattccactaattgcaaaaagacgccaccagaagactgtgaagggccatttcgtccggctgagatcctcaaagaggggtccgttctggacatactgaagtctccaggcttcgccagtccgaaaatcgactccgtggcagcccagccgactgccacatctcctgtcgtatacacgaggcctgccatctcatccttcagcagctccggcatcggtttcggcgaatctttaaaggccggatcttcttggcagtgcgacacatgtctactgcagaacaaggtgactgataacaagtgtattgcctgtcaagccgcaaagctctcccccagagacactgctaaacaaaccgggattgaaacacctaataagagcggcaaaaccacactaagtgcatccggcacgggattcggggataaattcaaaccggtgataggtacctgggactgcgatacctgcctggtgcagaataaacctgaagccatcaaatgtgtcgcctgtgagactccgaaacctggtacttgcgtcaaaagagcattaaccctcacggtggtgagcgaatccgccgagactatgactgcatcaagtagctcatgcaccgtgactaccggcacactgggtttcggtgacaagttcaaacggcctatcggctcttgggagtgttcggtctgctgtgtgagcaacaacgctgaggataataaatgtgtgtcctgtatgtccgaaaagccagggtccagcgtccccgctagttccagctctactgtgccagtgtccttaccctcaggcggtagcctggggctggaaaaatttaagaaacccgaggggagctgggattgcgaactatgcctcgttcagaataaagcggattcaactaagtgtcttgcttgtgagtccgcaaagcccggaaccaaatccggattcaaaggttttgacacttccagttcttcaagtaactcggccgctagctcttctttcaaattcggcgtttcgtcttcctccagtgggcctagccagactttaacgtctaccggaaattttaaattcggcgatcagggtggcttcaagattggggtctcctctgacagtgggagcatcaacccgatgtcagaggggttcaagttttctaagcccatcggagattttaagttcggagtatcctctgagagcaaaccagaggaagtgaaaaaagactccaaaaatgacaatttcaaattcggcctttctagtgggctctccaaccccgtttcactgactccatttcaattcggggtttcaaatctggggcaagaagagaaaaaggaggagcttcccaagtccagctccgcaggcttttcttttggcaccggtgttatcaacagcactccagcccctgctaacacaattgttacctcagaaaataaaagctcctttaacctgggcacaatagagactaagtccgccagcgtagcaccttttacctgcaagacatcagaggcgaagaaagaagagatgcccgctacaaagggtgggttctcttttgggaatgtggaaccagcctccctcccgtctgcttccgtctttgttcttggacgcactgaagaaaaacaacaagagccggtcacatctacctctctggtattcggtaagaaggccgataacgaggagccaaagtgccagcctgtcttctcatttgggaacagtgagcagaccaaggacgagaactcctccaaaagtacctttagcttttccatgactaaaccctcggaaaaagagagtgagcagcctgctaaggcaacctttgccttcggggcacagacgagtactactgccgatcagggagccgcaaagcccgtattctctttcctgaacaatagctcatcttcaagttcaacccctgccactagtgccggtggcggtatatttgggtcctcaactagtagttcaaacccacctgttgctacctttgtttttggccagtcctctaacccagtttccagcagtgcttttgggaacaccgccgaaagttcaacctcacaatcattattatttagtcaggacagtaagcttgccacaacgtcttctaccggaacggccgtcacaccattcgtgttcggccctggtgcttcttccaacaatactaccaccagcggctttggcttcggtgcaaccaccactagctcatccgccggttcttcatttgtcttcgggactggcccatcagcccctagcgcatccccagccttcggcgcaaatcaaaccccgacgttcggccagtcccagggcgcttctcagcccaatccccctggctttggtagtatctctagctccaccgctctgtttccaactggcagccagcccgcaccccctaccttcggcaccgtatccagcagtagccagcctcccgtatttggacaacagccatcgcagtctgccttcggaagcgggacaactcccaatagtagcagcgccttccaattcggttcctcaaccactaacttcaacttcacgaacaactctccctccggggtgtttactttcggcgctaatagcagtactcccgcagcaagcgcccagccaagtgggagtgggggatttccatttaatcagagccccgcagcattcaccgtcggcagtaacggtaaaaacgtattctcgagcagcggaacatcgttttctggacgtaaaattaagaccgccgtgaggcgaaggaagtag

SEQ ID NO: 233307 - DNA, 3555 bp, synthetic construct
  misc_feature 1..3555: note = Description of Artificial Sequence: Synthetic coding sequence
  source 1..3555: mol_type = other DNA
atgatgcagctacttcagctgttgttaggattacttggtcctgggggttatctcttcctgctgggcgattgccaagaagtgaccacgctaacggttaagtaccaggtgtcagaggaagtgccatctggaaccgtgattggtaaactcagtcaggaactcggtcgggaggaacggaggcgacaagccggtgctgctttccaggtactccaattaccacaagctctcccaattcaagtggactccgaggagggactgctgagtaccggccgtcggctcgacagggagcaactatgtagacagtgggacccctgcctggttagcttcgacgtactggcaaccggggacctggccctcatccacgttgagattcaagtgctcgacattaacgaccaccagcccaggtttccaaagggggagcaggagctggaaatcagcgagtcggcctccctcagaacgaggatccctctggatagagccttggaccctgacaccggtcctaataccctgcatacctacactctgagccccagcgaacatttcgcattggatgtgattgttggccctgacgagacgaagcacgcggagttgattgtggtaaaagaactggatcgtgaaatccacagcttcttcgatctggtgctgactgcttatgacaacggcaaccccccaaagtctggcacttcactcgtgaaggttaacgtcctcgactctaacgacaattcccccgctttcgcagagtcttcgctcgccctcgaaatccaagaggatgctgcaccaggcactctcttaataaaattgactgcaacggatcctgatcagggcccaaatggggaggtggagtttttcttgtccaagcacatgcctccggaggtattagataccttcagcatcgacgccaaaaccggccaggtgattttgagaaggcctctggactacgaaaaaaatcccgcttacgaagtcgatgtgcaggcccgtgacttgggaccaaatcccatacctgcacattgcaaagtgctaattaaggtccttgatgtcaacgataacatcccctccatccatgtcacctgggcatcccagccgtcactcgtgtctgaggcattacccaaagactcgttcatcgctctggtgatggctgatgacctcgattcaggtcataacggccttgtccactgctggctctctcaggaactgggacatttcagactgaagagaacaaacggaaatacctatatgcttctgacgaatgctaccctcgaccgcgagcagtggcctaagtatacactgacgctgctggcccaggatcagggcctgcaaccgctatccgccaagaaacagctaagcatccagatttccgacattaatgataacgcacccgttttcgagaagtctcgttatgaggtgagcaccagagaaaacaacctgccctcactgcacttgatcacgattaaggctcatgatgcagatttagggattaatggcaaagtcagttatcggatccaagacagcccagtggcacatctggtggccattgatagcaacacaggggaagtaacagcgcagagatcactaaactatgaagagatggccggtttcgagtttcaggtgatcgccgaagatagcggccagccaatgctggcctccagcgtcagcgtgtgggtctccctgctcgacgctaacgacaatgctccagaggtggtgcagcctgtgttaagcgacggaaaggcgtctctgagcgttctggtcaatgcctccacaggccaccttttagtgcctattgaaacaccaaatggactcgggcctgctgggactgacactccacctctggccacgcacagctcccgtccattcctgctaactacaatcgtggccagggacgccgactctggcgctaatggcgagccgttatactcaatcagatcgggcaacgaagcacacctcttcatactaaatccacacactggccagctgttcgtaaatgtgaccaacgcctctagcctgataggcagcgagtgggagctggaaattgtggtggaagaccagggatctcctcccctgcagacaagagctctgctccgggtaatgttcgtgacttccgtggaccacttacgggactccgcaaggaaacctggcgctttgagtatgtcaatgctgacagtgatctgtttggcagtcttgttagggatattcgggctgattctcgccttattcatgagcatttgccggacagaaaagaaagataaccgggcatataattgtagagaggccgagtctacatatagacagcagcccaagcgcccacagaaacacatccagaaagccgacatccatctggtgcccgtgctcaggggtcaggccggagaaccatgcgaagtcggtcagtctcataaggatgtagataaagaggcaatgatggaagcaggatgggacccatgtctacaggctccttttcacctgacacctaccctgtatcgcaccttacggaatcaaggaaaccaaggggctccggcagaaagtcgagaggtgctgcaggatactgtgaatttgctgtttaatcacccaaggcagaggaacgcctcacgggaaaatcttaacctgccagagccccaacctgccacgggtcagccaagatcaagaccgctgaaggttgctggtagccctactggtcgcctagcaggcgatcagggatccgaagaggcgccacagcgacccccagcatccagtgccaccctcagacggcagaggcacctgaacgggaaggtcagccctgagaaggagtctgggcctcgtcagattctgcggtctctggtccggctgtctgttgccgcatttgccgagaggaaccccgtggaggaactcacagtcgattcccctcccgtgcagcaaatttcccaacttctcagtctccttcatcaggggcaatttcaaccaaaaccaaaccatcgaggtaacaagtatctcgccaaacctggcggatcacggagcgcgatcccagacacagatggtcccagtgctagagctggaggccaaacagaccctgagcaggaggaggggccactggatcctgaggaggacctttcagtcaagcagttgctagaggaggagctgtcatccctgctggatccatcgactggactcgccctggaccgtttgtctgctcccgacccagcctggatggcaagattgtcactcccactcaccacaaattatagggataacgtcatttcacccgacgccgctgctacagaggaacccagaacgttccagacctttggtaaagccgaagcccctgaattgtcacctaccggtactcgccttgccagtacatttgtaagtgaaatgtcatctttgctggagatgcttctagagcagcggtcctcaatgcctgtggaggcagctagcgaagcgctgcggcgactcagcgtgtgcggtaggacactctcactagaccttgctacttctgccgcttctgggatgaaagtccagggggacccaggaggcaaaactggcaccgagggaaagtccagggggtctagcagttctagcaggtgtctctag

SEQ ID NO: 233308 - DNA, 3999 bp, synthetic construct
  misc_feature 1..3999: note = Description of Artificial Sequence: Synthetic coding sequence
  source 1..3999: mol_type = other DNA
atgtctgacatggactaccctcttcaagggccaggcctcctttcggttcccaatctccccgagatcagttctatccgcagggtgccgctccctccagagctagtggaacagttcggtcacatgcagtgcaattgcatgatgggcgtatttccccctataagccgcgcatggttgactatcgacagtgatatttttatgtggaactatgaagatgggggagacctcgcctactttgatggtctgagcgaaacaatcctcgcggtggggctggtgaagcccaaggccggtatctttcaaccccacgtgcggcatctgctggtccttgccacacctgtggatatcgtaatcctgggtctctcatatgccaatctgcagacaggctccggagtgctgaacgatagcctttccggcggtatgcagctactgccggacccactctattccctgcctacagataacacctatctccttacgattacatctaccgataatggcaggatttttctggcaggtaaggatggatgcctgtacgaggtcgcataccaagctgaggccggttggttctcccagaggtgtagaaaaatcaaccattccaaatccagcctttcttttttggtgccttcgctactccaattcaccttcagcgaagacgaccccattctgcagatagccatagataattcacgcaatattctgtacactaggagtgagaaaggcgtgatccaggtgtatgatctgggacaggatggccagggaatgtcccgagtggcgtcagtgtcccagaatgcgatagtgtccgctgccggtaatattgcccgaacaattgaccggagtgtgtttaaacccatcgtgcaaatagcagttatcgaaaattctgaatctctggactgtcagctgttagccgttacgcacgctggggtccgtttatacttctcaacttgccccttccggcagcccctggccagacctaataccctgacccttgttcacgttcgactgcctcctggattctcagcaagttctacagtcgagaagccctccaaggtacatcgagccctctactcaaaggggatactgttaatggccgctagcgaaaacgaggacaacgacatattgtggtgcgtgaatcacgatacatttccttttcaaaagcccatgatggagactcagatgaccgccggagtggatggccattcttgggcgctttccgcgattgatgagctcaaggtagataagatcattacccccctgaataaggaccatatcccgatcaccgatagtcctgtcgtggttcaacagcacatgttgccgcctaagaagtttgtactgctctctgcgcagggcagcctgatgtttcacaaactgcgacctgtggatcagctgcggcatctgcttgtcagtaatgtcggcggtgacggagaggagatcgaacgattcttcaaactgcaccaggaagaccaggcatgcgctacgtgtctaatcctggcctgcagcacagcagcttgtgaccgggaagtttccgcgtgggcgactagagcattttttcgctacggcggagaagcccagatgcgtttccccacaacacttccgccacctagcaacgtaggccctatactgggaagccccgtttactccagctcccccgtgcccagtggaagcccctatccaaatccttccttcctggggacgcctagtcatggcatacagcctccggctatgtcaactccggtgtgcgcactagggaatccggcaactcaagcgacgaatatgagctgtgtgacgggtccagaaatcgtctacagcgggaaacataacggaatatgcatttatttctccaggatcatgggcaacatttgggacgccagcttggtggtggaaaggattttcaagtcagggaacagagagatcacggcaatcgagtccagtgtcccctgtcagctcctggagagtgtcctccaagaacttaaaggtttgcaggaattcttggataggaattcccagtttgcaggtggaccactgggcaacccaaacaccaccgcgaaagtacagcaacggctgataggcttcatgcgccctgagaatggcaacccgcagcagatgcaacaggaactgcagcgtaaattccatgaggcacaactgagtgagaaaatctcgttgcaagctatccagcagttggttcggaaatcctaccaggccctggcgctgtggaagctgctgtgtgagcaccagtttactatcattgtggccgagctgcaaaaggaactgcaagagcagctcaagattaccaccttcaaggacctggtgatccgggacaaagagctcaccggggctctgatcgcctccttgattaattgttacatacgggataacgcagctgttgatggaataagcctccatctacaggacatttgccctttgctgtactctacagatgacgccatatgcagcaaggctaacgagctgttacagcgatcccgacaggtacagaacaagaccgaaaaggaaaggatgctgcgggagagtttgaaagaataccagaaaatctccaatcaagttgacctgtcaaacgtttgcgcgcagtatcgacaggtccgattctatgagggggtggtcgagttgtctttgacagctgctgagaaaaaagacccgcaaggcctcgggttgcatttttacaagcacggggagcctgaagaggacattgttggcctgcaggcctttcaggagcggctgaacagctataaatgcattacagatacactccaggaattggtcaatcagagtaaagcagcgcctcagagcccctctgtccccaaaaagccaggccctccagtgctatcttctgatcccaatatgctgagtaatgaggaggctggccaccacttcgagcaaatgctgaagttatcccaaaggtccaaagacgaactcttctccatcgcgctttataactggctgatccaggtggatctggccgataagctgctgcaggtggcttccccgtttttagaaccgcacctggtgaggatggctaaagtcgaccagaaccgggtgaggtacatggacttactgtggagatattacgagaaaaataggagcttctccaacgctgccagagtgctctccaggttggcagatatgcacagcacagagatcagcttacagcagagactggaatatatcgcacgggcaattctcagcgctaagtcctctactgcaatctccagtatcgcagcagatggtgaatttcttcacgagctggaggaaaagatggaagtcgcaagaatccaactgcagatacaggaaaccctccaacggcagtactcacatcactcaagcgtccaagatgctgtctctcagttagactccgagcttatggacattaccaagttatatggggaattcgcagatccttttaaactcgcagaatgtaagcttgcaattatccattgcgcaggctattctgaccctatcttggtccagaccctgtggcaggacatcattgagaaagaacttagcgactcagtgacacttagtagttcagaccgcatgcatgccctatcgttgaagatcgtgttactgggcaaaatctatgccggtactcctcgctttttcccgctcgactttattgtgcaatttctggagcagcaagtctgtacgctgaattgggacgtagggttcgtgatacaaaccatgaacgaaatcggagttccattgccacgactcttggaggtctatgatcagctatttaagagccgtgacccattctggaacaggatgaagaaacccttgcacctcttggattgcatccatgtgctgctgattagatacgtggaaaacccctcgcaggttttgaattgtgagcggaggcgctttacaaacctgtgcctggacgccgtatgtggctatctggtggaattacagtctatgtcttcgagcgtggccgtgcaggcgattacagggaacttcaaatccttgcaagcgaaactcgagaggctgcattag

SEQ ID NO: 233309 - DNA, 4062 bp, synthetic construct
  misc_feature 1..4062: note = Description of Artificial Sequence: Synthetic coding sequence
  source 1..4062: mol_type = other DNA
atgtacccggatctgagcgagcttctcatggtcagtgcgccaaataatccaaccgtgtccggaatgtctgacatggactatccgctccagggccctgggctcctgagtgtccctaacttgcccgagatctcctccattagacgggtgcccctccccccagaacttgtagaacagtttgggcatatgcagtgcaactgtatgatgggcgtgttccctcctataagtcgcgcttggctgacaatcgattcagatatttttatgtggaattatgaggacggaggtgaccttgcatacttcgatggcctgtcagagacaatcctggctgtcggactggtaaagccgaaagctggcatttttcaaccacatgtgcggcatctgctggttttggccacaccagtggacattgtaatactgggattaagctacgctaacttgcaaacagggtcaggggtgctgaatgattcacttagcgggggaatgcagttgctcccggaccccctgtatagccttccgacagacaatacatacctgcttactattacatcgactgataatgggaggattttcctggccggaaaagacggatgtctctacgaggtcgcataccaggctgaagcaggctggtttagccagcgttgccgtaagataaatcattcgaaaagctccctgtcgttcctggttcctagtctcctacagttcacctttagcgaggacgatcccatccttcagatcgccatcgataactctcgcaatattctctacactcggagtgagaagggggtgatccaagtatacgacctgggccaggatgggcagggaatgtctcgagtggcttcagtgtcacagaatgctattgtctccgctgctgggaacatcgccagaactatcgaccgcagtgtcttcaaacctattgtgcagatcgctgttatcgaaaattctgagagccttgactgccaattgctggccgtcacccacgcgggtgtgagactgtacttctccacatgtccgtttaggcagcccctggccagaccaaacaccctgacactggtccacgtacggctgccgcctggctttagcgcctcctccaccgtcgagaaaccctctaaagtgcacagggccttatatagtaagggcatactccttatggctgccagcgaaaacgaggataacgatatactctggtgcgtgaaccacgatactttcccattccagaagcctatgatggagacacagatgaccgcaggagttgacggccactcctgggcactctccgcaattgatgaattgaaagtggacaagattataaccccactgaacaaggatcacataccaattaccgactcccccgtagtggtgcagcaacatatgctacctcccaagaagtttgtcctgctgtcagctcaaggatctctgatgttccataagctgaggccggtggaccagttgaggcatctgctggtgagcaacgttggaggagatggcgaggaaatcgagagattcttcaaactgcatcaggaagaccaggcatgcgcaacgtgcttaattctagcatgcagcacagcagcatgcgaccgggaagtctcagcatgggcaaccagggccttctttcggtatggtggcgaggcccaaatgcggtttccaactacacttcctccacctagcaacgtagggcctattctgggcagccccgtatacagtagctccccagtgccgtccggctcaccttatccaaatccttcttttttgggtaccccgtcccatggtatccagccacctgccatgtctacaccagtctgcgcactcggaaatcctgcaacccaggccaccaacatgtcctgtgtgaccggacctgaaattgtgtactctggaaaacacaacggcatttgcatctacttctcccgcatcatgggtaatatatgggatgctagcctcgttgttgagaggatattcaagagcggtaatcgcgaaataaccgcaattgaatcttctgtcccctgccagctgctagagagcgtattacaggaactgaagggactccaagaatttttagatcgtaactctcagttcgccggaggccctctggggaatccaaacacgacagccaaagtccagcaacgattaatcggatttatgcgccctgaaaacgggaatccccagcagatgcagcaggaactccagcgcaaatttcacgaggcacagttgagtgagaaaatcagcctgcaagccattcagcagctggtcaggaagtcataccaggccttagccctttggaagctgttgtgtgaacatcaattcaccattatagtggctgagttacaaaaagagctccaagagcagttgaaaattactacgtttaaggacctcgtgatccgcgacaaggaactgaccggggctctgatcgcctcattaatcaactgttatatcagagacaacgctgccgttgatggcatatccctgcatctgcaggatatttgccctttattatattccaccgacgatgccatctgcagcaaggccaacgaactgctgcaaagatctcgccaagtacagaataagactgaaaaggaacgcatgcttcgtgagagccttaaagaataccagaagatttccaatcaggttgatctcagcaatgtgtgcgctcagtaccggcaggtcaggttctacgaaggggtggtggagttaagcctgacggccgctgagaagaaggaccctcagggcctgggcctgcacttctacaagcacggcgagccagaagaggatattgtcggcttgcaggctttccaggaacgtttgaactcctacaagtgtattacggatacgttgcaagagcttgtcaaccagtcgaaggccgcaccacagtctcccagcgtgccaaagaagcccggtcctcctgtgctgagttcagaccctaatatgttgtcaaatgaggaggccggacatcactttgagcagatgctcaaactgtcacagcgaagtaaggatgagctgttcagcatcgccctttacaactggttgattcaggtagacctcgctgacaaactcttgcaggtcgcgtccccctttttggagccacacctggtgaggatggccaaggtggaccagaaccgcgttaggtacatggacctgctttggcgatactacgagaaaaacagatctttctcaaacgctgccagggtcctgtccagactggccgacatgcacagcacagaaattagcctgcagcagcggcttgagtacatcgcaagggcgatcttgtccgccaaatcatccaccgctattagtagtatagcagccgatggcgagtttctacacgagctggaggagaaaatggaagtggccaggattcagctgcagatccaggaaacattacagagacagtactcccaccacagtagtgtgcaagatgccgtatctcagctggattccgaactcatggatattactaaactatatggcgaattcgcagatcccttcaagctggccgaatgtaaactggcgattattcattgtgctggttattctgaccctattctggtccagacactttggcaagacataattgagaaagagctttccgattccgtgactctgtcctccagtgacagaatgcacgccctcagcttgaagatcgtactcttgggcaaaatctacgccggaacacccagatttttccctttggacttcattgtgcaatttttggaacaacaggtttgcactctgaattgggacgtggggtttgtcatacagaccatgaatgagattggtgtccctcttcctcggctgctcgaggtgtacgaccagctgtttaagagccgcgaccctttctggaaccggatgaaaaaacctctccatctgctggattgtattcacgtcttattgatacggtatgtggagaacccctcccaggtcttgaattgcgaaagacggcgattcactaatttgtgtctcgatgccgtttgcggctacctggttgagcttcagagcatgtcttcgtccgtcgcagtacaagctataacgggtaatttcaaatcccttcaggctaagctggagagactgcattag

SEQ ID NO: 233310 - DNA, 3984 bp, synthetic construct
  misc_feature 1..3984: note = Description of Artificial Sequence: Synthetic coding sequence
  source 1..3984: mol_type = other DNA
atgcccagctccctgctgggggcagccatgcctgccagtacttctgcagctgcactgcaggaggcactggaaaatgccggaaggttaatcgaccggcagttacaggaggacagaatgtatcccgacttgagtgagttgctgatggtgtcagcacccaacaatcccacagttagtgggatgtcggacatggactatcctcttcagggcccagggttactgtctgtgcccaatttgccggagattagttcaattcgccgtgtccctctcccacccgaattggtcgaacaatttggccacatgcaatgcaattgtatgatgggggtctttcctcctatatcgcgggcttggctaaccattgacagcgatatcttcatgtggaattatgaagacggcggtgacttagcctattttgacggactgtccgaaaccatactggctgtcgggcttgtcaagcctaaggcaggaattttccagcctcacgtcagacatctccttgtgttagctaccccggtggacatagtcatcctcgggctgtcgtacgcaaacctccagacaggatcaggagtcctaaatgactcgctcagcgggggtatgcagttattgcccgatcccctttattctctccccactgacaatacatatctgttgacaattacttccactgataatggcaggatctttctggccggtaaagatggctgcctctacgaggtggcctaccaggctgaagcaggatggttttcccaaaggtgccggaagatcaatcacagtaagagctctctgtcatttctcgtaccctcactactgcagtttaccttctctgaagatgatccaatcttgcaaatcgccatagataatagcaggaacatcctctatactcggtccgagaaaggggtcatccaagtctatgacctggggcaagacgggcaggggatgagtcgcgttgctagcgtcagtcagaacgctattgtgtcagctgctggcaacattgcacgcacaatagatcggagcgtttttaagcccatcgtccaaattgcagtaatcgaaaacagtgagagtctcgactgtcagctcctggccgtgacccacgcaggcgtcaggctctatttcagcacatgtccgttcaggcagcctctggcaaggcctaatacactgaccctagtgcatgttaggctcccgccaggcttttcagccagctcaacagttgagaagccgagcaaggtccacagagccctttactcgaaggggatcttactgatggcagcctccgagaacgaggacaacgatatcctgtggtgtgtaaatcatgacacattcccatttcagaaaccaatgatggagactcagatgactgctggagtggatgggcactcatgggcactgtccgccatcgacgagctgaaagtcgataaaattatcacccccctgaataaagaccacattcctatcacggactcaccggtcgtggttcagcagcatatgctgcccccaaaaaagttcgtgttactgtcggcccaggggagcttaatgtttcataagttacgccctgtggaccagctccggcatctgctcgtgtccaacgtggggggagacggcgaggaaatcgaacggttcttcaaactgcatcaggaagatcaggcgtgtgctacatgcctgattctggcctgttctacagcagcctgcgaccgggaagtgagcgcttgggccaccagggcgtttttccgatacgggggagaggcccaaatgagatttcccacgacgcttcctccaccaagcaacgtcggacccatcctaggctcccccgtttactcatcttcacccgtcccaagcggaagcccctacccaaatccctcattcctgggaaccccgagtcacggtattcagcctcccgctatgagtacccccgtttgtgccctcggcaaccctgccactcaggctactaatatgtcatgcgtaacagggcctgagattgtgtactccggaaaacacaacggaatttgcatctactttagcaggattatgggcaatatttgggacgcctctctggttgtggagaggatcttcaagagcggaaaccgggagatcactgctatcgaatcctccgtcccatgtcagctgctggaatccgtgctacaggagcttaagggattgcaggaattcctggaccgaaacagtcagttcgccggaggacctctgggaaatccaaatactacggcaaaggtacagcaacgtttgatcggatttatgcggcctgaaaatggaaatcctcagcaaatgcaacaggagctacaaagaaagtttcatgaggcccaattgtcagaaaagatatccttacaggccatccaacagctagtccgaaaatcttatcaggccttagctctgtggaagctcctgtgtgagcaccagttcacaatcatcgtggcagagctccaaaaagctaacgaactgttgcagcgctcccgccaggtacagaataagacagagaaggagcgtatgttgagagagagtctcaaagagtaccaaaaaatcagcaaccaagtcgatctctctaatgtgtgcgcacagtaccggcaggttcggttttatgaaggagtcgtggagctgagcttaaccgccgctgaaaagaaagacccccaagggctgggactacacttctataaacacggcgagcccgaagaggacatagtagggctgcaggctttccaagaacgccttaactcttataaatgcataacagatactttgcaggagctggtgaaccaaagtaaggcagcaccccaatctccgtctgtaccaaagaaacctggcccacccgtgctgtcttctgatccgaacatgttgtccaacgaagaagccggtcaccacttcgaacagatgctcaaactgtcccaaagatcaaaggatgaactcttttctatcgctctctacaactggctgatccaagtggacctagctgacaaactacttcaggtggcttcccccttcctcgagcctcacctggtccgcatggcaaaagtcgaccaaaaccgtgtccggtacatggacctgctatggaggtattacgaaaagaaccggtcgttcagcaatgcagcgcgagtgctgtctcgcctggcagacatgcactccaccgagatttctcttcagcagcggctcgagtacatcgctagagccatcttaagcgctaaatcctcaacagctatctcatcaattgccgcagatggcgaattcctacacgagctcgaggaaaaaatggaggtggctagaattcagctacagattcaagaaactcttcagcggcagtactctcaccacagctccgtgcaggatgccgttagtcaattggactctgagctgatggatatcaccaaattgtatggagagttcgccgatccgtttaagctggcagaatgcaaattggcaattatccattgcgctgggtactctgaccctattctggtccagacgctctggcaagacataatagagaaagaactgtccgattccgtgaccctatcttcgagcgatcgcatgcacgctttaagtctcaaaatagtcctgctgggtaaaatttatgcaggcacccccaggtttttcccccttgacttcatagtgcagttcctggaacagcaggtatgtacattaaattgggatgtcggtttcgtgatccagactatgaacgagattggtgttcctctgccgagactattggaggtttatgaccagctgtttaagtctagggatccattttggaacagaatgaaaaagcccttacacctgctcgactgtattcacgtcctcttgattcgctacgtcgagaatccctctcaagtgctaaattgtgaaaggcggagatttacgaatctctgtctggacgctgtttgcggctacctcgtcgaactgcaatctatgtcttctagcgtcgcagtgcaagctattacaggcaattttaagagcctgcaagcaaaactggaacgtttgcattag

SEQ ID NO: 233311 - DNA, 4311 bp, synthetic construct
  misc_feature 1..4311: note = Description of Artificial Sequence: Synthetic coding sequence
  source 1..4311: mol_type = other DNA
atgttacatctgtctgctgcacctccagcccctccccctgaggtgactgctaccgccaggccctgcttgtgcagcgtgggtcgccgtggcgacggcggaaagatggccgcagcaggggctctggagcggtctttcgtggaactttcgggagcagaaagagaaaggcccaggcatttcagggagttcaccgtgtgttcaattggtacggccaatgctgtggctggagccgtgaaatatagtgaatcagcgggtggcttctattacgtggaatccggtaagctgttttccgtgacccggaataggttcattcactggaagacttctggagataccctggaactcatggaagagtctcttgatattaatttactcaataacgcaattcggcttaagtttcagaattgctctgtgctgccaggtggtgtgtacgtgtcggagactcagaaccgagtgatcatccttatgctgacaaatcagaccgtacaccggctcttactgccccacccatcacggatgtatcgttccgagctggtagttgattcccagatgcaatctatatttacggatatcggtaaagtggacttcactgacccctgtaattaccagctgataccggcagtgcctggtatctcacctaacagtacagcttcaacagcatggctgtcttcagacggcgaggcactgtttgccctgccctgcgccagcggcggaatcttcgtgctaaagctccccccatacgatatccctggtatggtgagtgtggtagagctaaagcagagcagtgtaatgcaaagactcctgaccggatggatgcctactgcaatacgcggtgaccagagcccttcggaccggccactgtcgctcgctgtccactgcgtcgaacacgacgcatttattttcgccctgtgtcaagaccataaactccgaatgtggagttacaaagagcaaatgtgtcttatggtggcagatatgcttgaatacgtcccagtaaagaaggatcttaggctcaccgctggaacaggacacaagcttagactggcttactcccctaccatgggcctttatctcggaatctacatgcacgcccctaagcgtggtcagttttgtattttccagctggtgagtacagaaagcaacagatatagtctggaccacatatccagtctgttcactagccaagaaacactgatcgactttgcccttaccagcacggatatctgggctctgtggcacgatgctgagaaccagaccgtggtgaaatacatcaattttgaacacaatgttgcgggacaatggaatcccgtctttatgcagcccctccctgaagaagagattgtcattcgagatgatcaagatcccagagagatgtatctccagtcacttttcactccgggacaattcactaatgaggctctatgcaaggcattacagattttttgtcggggaaccgagcgaaatttggacctctcttggtcagagctcaagaaggaagtgactcttgctgttgagaatgagcttcagggctccgtgaccgagtatgagttttctcaggaagaatttcggaacctccagcaggaattctggtgcaaattttatgcctgctgtctgcagtaccaggaggcactgagccacccactggccctgcatctcaacccacacaccaatatggtgtgtctgctgaagaagggatatctgagtttcctgatccccagtagcctagttgatcatttatacttgcttccctatgagaatcttctgaccgaggatgagactacaatttctgacgacgtcgatatcgccagagatgtgatctgtttaattaagtgcctccgcctgatcgaggaatcagtgactgttgatatgtctgtgattatggaaatgtcttgttacaatctccagtcccctgagaaagccgctgagcagattctcgaggatatgatcacaatcgacgttgagaatgtgatggaagatatttgttcaaagcttcaggaaatcagaaacccaatacacgccatcggactcctcatccgcgaaatggactatgaaacagaggtggagatggagaaaggtttcaatccggctcaacccctcaatatcagaatgaacctaacccagttatatggatcaaataccgccggatatatcgtatgtcggggtgtccataagatagccagcaccagattcttgatctgccgcgatttgctcatcctgcagcaactattgatgagactgggggatgccgttatatgggggaccggccagttgtttcaggcccagcaggatctgctgcaccgaactgcaccgctgctactgagttactatctgatcaagtggggatccgagtgcctggccaccgacgttccattggataccctcgaatccaatctacagcacctgagtgtgctagagctgacagacagtggagccctaatggcaaatcgattcgttagtagcccacagaccatagtcgaactgtttttccaggaagtcgcgcgaaagcatatcatcagtcatctcttttcacaaccaaaagcgcctctgtcccaaaccggattgaactggccagaaatgatcaccgctatcacttcttacttgttgcagttgctctggccttcaaaccccggatgcctcttcctggaatgtcttatgggtaactgccagtatgtacagttgcaggattacatccagttgttacatccgtggtgccaggtaaatgttgggtcatgccggtttatgttgggacgttgctatctcgtaactggggaaggacagaaagccttagagtgcttctgccaggccgctagcgaggtaggcaaggaggaatttctggatcggctaatcaggtctgaggacggcgaaatcgtgagcactcctaggcttcagtactacgacaaagtgcttagactcctcgatgttattgggctgcccgagctcgtgatccaactggctacatccgccataactgaggcaggtgacgattggaaatcacaagcaacgctgaggacttgcatctttaaacaccacctagacctaggccataattctcaggcttatgaagccctaacacagatcccagacagttccagacagctcgactgtttacggcagctggtcgtggtgttgtgtgaacgcagtcaacttcaagatctggtagaattcccttacgtaaatttgcataatgaggtggtcgggattatcgaaagccgcgcaagggccgtggatctgatgacccataattattatgaacttctctatgcattccacatctacagacataactaccggaaagctggcacagttatgtttgagtacggcatgcggctcggtcgtgaagttagaactctacgaggactcgagaaacaggggaattgctacctggccgcattgaactgtctccgccttatccgccctgaatacgcctggatcgtgcagcccgtgtccggagccgtgtacgacagaccgggtgcttcacctaagagaaatcacgacggtgagtgcacagccgcaccaaccaatagacaaattgagatcctagagctcgaggatctggagaaagagtgcagtctcgctaggatcaggctgacactggctcaacacgatccctcagccgtggcggtggccggatcttcaagcgccgaggagatggtgaccctcctcgtgcaggccggtcttttcgatactgccatcagcctgtgccagaccttcaagttgcctctgacccccgtttttgaaggattggcttttaaatgcatcaaacttcaatttgggggagaagccgcacaagctgaggcctgggcttggctagccgcaaaccagttatcatcagtcatcacaactaaagagtctagcgcgactgacgaggcctggcgcctcctcagcacctatcttgagagatacaaggttcaaaataacctctaccaccactgcgtcataaacaagctgctgagtcacggcgtacccttaccaaattggttgatcaactcatacaaaaaggtcgacgcagctgaacttctgcgactgtatcttaattatgaccttctggaggaggcagtggatttagtgtctgagtatgtggatgctgtgctcggcaaaggacatcagtatttcggtatcgagtttcccctctcagccacagctcctatggtttggcttccttactcctccatcgaccagctgcttcaggctctcggggaaaactcagccaacagccacaacatagccctgtcacagaagattctcgacaagttggaagattaccagcagaaggtcgacaaggctactagagaccttctttacagacgcacactatag

SEQ ID NO: 233312 - DNA, 1452 bp, synthetic construct
  misc_feature 1..1452: note = Description of Artificial Sequence: Synthetic coding sequence
  source 1..1452: mol_type = other DNA
atggtgagcgttgtggagctgaagcaatcctcagtgatgcagcgcctactgaccggctggatgcccacggcaatccgcggagatcagagtccaagcgaccgtcccctcagtctggccgtgcactgcgttgagcatgacgccttcatctttgctctctgccaggatcacaagctccgcatgtggtcctacaaggagcagatgtgtcttatggtggccgacatgcttgaatacgtgcccgtgaagaaagacctacgtctgacggccggtaccggccacaaactcagacttgcatactcgcccaccatggggttataccttggaatatatatgcatgcgccaaaacgcggtcagaggagaggctttgccatgctacctggcctgaagctgctgtcaagcagcagtccccctaccagtgcttcccagtgtgctgggatcacgagtgtgaaccattccacacagccagaattctttttttgcattttccagctggtgtctacagaatcaaaccggtatagcctcgatcacatttccagccttttcacctctcaggagaccctcatcgactttgccctgaccagcacagacatctgggccctgtggcacgacgccgaaaaccagacggtggtcaaatacatcaattttgaacataatgtcgctgggcagtggaatcctgtatttatgcaacccttgcccgaggaagagatcgttatccgggatgaccaggacccgagggaaatgtacttgcaatcactgtttactccgggacagtttactaacgaggctctctgtaaggcacttcagattttctgtcggggaaccgagcgcaatctcgacctctcttggtcggagctgaaaaaggaagttactctcgcagtggagaacgagttgcaggggtcagtcaccgagtacgagttctcccaggaggaatttaggaatctccagcaggagttttggtgcaagttctacgcctgttgcttgcaatatcaagaggccctgtctcatcccttagctttacacctgaatcctcacaccaatatggtgtgccttctcaaaaagggctatctgtctttcctcatcccatcgtcactggtcgaccacctctatctcctgccctatgagaatctgctaaccgaggacgaaaccacgattagtgacgatgtcgacattgctcgcgatgtgatctgcctcatcaagtgcctgcgcctgattgaggaaagcgtcaccgtggacatgtctgtgattatggaaatgagctgctacaatctgcagagtcctgagaaggcagctgagcagatcttagaagacatgattaccattgatgtagaaaatgtcatggaggacatctgttctaagctccaggaaataaggaacccgatccatgccatcgggctgctgatacgcgaaatggactatgaaactgaggtagagatggaaaaagggttcaacccttag

SEQ ID NO: 233313 - DNA, 675 bp, synthetic construct
  misc_feature 1..675: note = Description of Artificial Sequence: Synthetic coding sequence
  source 1..675: mol_type = other DNA
atgctccatttgtcagccgcaccacctgcaccccctccagaggtcactgcaacagcaaggccctgcttgtgcagtgttggcaggaggggggatgggggaaagatggcagctgccggtgcactggagaggtctttcgtggagctgtctggggctgaaagggaaagacctaggcactttagggagttcacggtctgctcaatcggcacagctaatgcggttgcaggcgcagtcaagtatagcgagtctgccggtggattttattatgtcgaatccggaaagctgttcagcgtgactaggaatcgttttatccactggaagacctctggcgacacactggaattgatggaagaaagtctggatataaatctgctcaataatgctattcggttgaaattccagaactgctccgttctgccgggaggcgtttatgtttcagaaacacaaaacagggtcatcatcctcatgctcacaaaccagaccgtccaccggctcctcctgcctcacccctctcgcatgtaccgtagcgtgtcatggctgagcgccatttcttttatatcacagatcacactcggagtgaccaacgtggttcttgagcggtgcctgctggagctgaaagaaatttggatcctggttatccctcatcaagcctatttcgacagctacaggctgaagtag

SEQ ID NO: 233314 - DNA, 6039 bp, synthetic construct
  misc_feature 1..6039: note = Description of Artificial Sequence: Synthetic coding sequence
  source 1..6039: mol_type = other DNA
atggcaacgcctctcgcagttaatagcgccgctagcttgtggggcccttataaagacatatggcataaggtgggaaacgcgctgtggcggagacagcctgaggcagtccatctgctggacaagatcctgaaaaagcacaagccagacttcatcagcttatttaaaaatccacccaaaaatgttcaacagcatgaaaaagttcaaaaggctagcactgagggggtcgccattcaggggcagcagggaactcggttgttgcccgagcaactgatcaaggaagcctttatactgagtgacctctttgatattggcgagttggctgccgtcgaattgcttctagccggagagcaccagcagccgcactttccgggtctgactcggggtttagttgccgtgttactctactgggacggcaaaaggtgtattgctaacagcctgaaagcactgatccagtctcgacgcggtaaaacctggacactggagttgtcccctgagctggcctctatgactacgcggttcaccgatgaattgatggaacaggggctgacctacaaggttcttacgctggtctctcaaattgacgtgaataatgagttcgaaaagctccaacgggagagaggtcttggctccgagaaacatagaaaggaggtctctgacctgattaaagagtgtcgacaaagtctggccgaaagtctgtttgcctgggcctgccagagcccactcggcaaggaagacactttactattgattggccatctcgaacgggtgaccgtcgaggcaaatggcagcctggatgccgtgaatctggcactgctgatggcccttctgtattgcttcgatatctcctttatcgagcagtcaacagaagagagggatgacatgatacatcagctgcctctgttgactgagaagcagtatatcgccacgattcactcacgcttgcaagattcccaactgtggaagctgccgggattgcaggcaacggtccggttagcatgggcccttgcacttcgagggattagtcagctacccgacgtcaccgcactggctgaattcaccgaggcagatgaggccatggcagagttggccatcgccgataacgtgttcctgtttctaatggaaagcgtcgtagttagcgagtacttttaccaggaggagttctatataaggcgggtgcacaatcttattaccgattttcttgccctcatgcctatgaaggtgaagcagctgagaaacagagcagacgaagacgcccgaatgattcatatgagcatgcaaatgggaaacgaacctcccattagtcttcgaagagacttagagcatctgatgctgctgattggagaattatacaagaagaaccccttccatctggaactggctctggaatattggtgcccaactgagccacttcagacgccaaccattatggggtcctatctgggtgtggcccaccagcgaccccctcaaagacaggttgtgttgtcaaaattcgtgcggcagatgggagatctcctgcctcccaccatttatatcccttacctgaaaatgttacagggtctggccaacggtcctcagtgcgcacactactgcttctctttgctaaaggtgaatggttcatctcatgtggagaatatacaaggtgctggcggttcccccgtcagctgggagcatttttttcactcgctgatgctctatcacgaacacctccgcaaggacctgccatccgccgactctgttcaatacagacacttaccctccagggggatcacccaaaaagaacaagatggtctgattgcgtttctgcagctcactagcacaatcattacatggagcgaaaacgcaagactggccttgtgtgaacacccgcagtggactccggtggtagtcatcctcggtctgttgcagtgtagcatacctcctgtgcttaaagccgagttgctcaagacccttgctgctttcggcaaatctccagagattgctgcaagtctgtggcagagcctggagtacactcagatcctgcagactgtgcgcataccaagtcagagacaggctatcgggatcgaagtcgaacttaatgaaattgagagtcgatgtgaggagtacccactcacacgagcgttctgccagcttatttccactcttgttgagagctccttcccttccaatctgggagcagggctgcgaccacccggatttgacccctatctacagttcctgcgagatagtgtgtttttacgcttccgtacccgcgcatatagaagagccgctgagaagtgggaagttgccgaggttgttcttgaggtgttttacaaacttctccgagactatgagccacaactggaagacttcgtggaccagtttgtggagctgcagggggaagaaattattgcatacaaacctccaggcttctctttgatgtaccacctgctcaacgaaagccctatgctggagctcgcactgagtttattggaagaaggagtaaaacaacttgacacctacgccccattccccggtaagaagcatctcgagaaggctgtccagcactgtttagccttgttaaatttgaccctgcagaaagaaaatttgttcatggatctgctaagagagtcccagcttgccttaattgtttgcccactggaacagcttctccaaggcataaaccccagaaccaagaaagctgataatgtggttaacatcgcccgttacctctatcatggtaacaccaatcctgagctggcctttgagtccgccaagatcttgtgctgcattagctgcaattccaacattcaaattaaactggttggggacttcacacacgaccagtcaatttcccagaagttaatggctggcttcgtggaatgcctggactgcgaagacgcggaggagtttgtgagactggaggaaggtagcgagctggaaaagaagctcgtggctattaggcacgaaacaagaatccacattctcaatttactgattacgtcgttggaatgtaaccccccaaatctggcgctctacctgttgggcttcgaactaaagaagccggtttcaacaacaaacttgcaagaccctggcgttctgggttgtcctagaacctgcctgcacgccattttaaacatactagagaaagggacagaaggcaggaccggccctgtggcagtgcgggaatcaccccaactggccgagttatgctaccaggttatctaccaactctgcgcatgcagcgatacatccggtccaaccatgagatacctcagaacttcccaggactttctgtttagtcagctgcagtaccttcccttttccaataaagagtatgagattagtatgcttaaccagatgagttggttgatgaaaaccgcttccatagaactgcgggtgacctcactgaatcggcaaagatctcacactcaacgcttgttgcacctcctgctcgacgacatgccagttaagccatactccgacggagaaggagggatagaagatgagaaccggtccgtttctggcttcctccatttcgacaccgcaaccaaggtacggagaaagatactgaacatcctggattctatcgatttttctcaggagatcccggaacctcttcagcttgatttttttgaccgagcccagatcgagcaggtcatcgcaaactgcgaacacaagaatctaagggggcaaacggtgtgtaatgttaaactgctccacagggttttagtagctgaggtgaatgccttacaaggaatggctgctattgggcagagaccactgcttatggaagagatctccaccgtgctgcagtacgttgtagggaggaacaagctgttacagtgtctgcacgcaaaacgtcacgccctcgagtcctggcgacagctggttgaaataatcctgacagcatgtccacaggacctcattcaggctgaagatcgccagttgattattagggacattctgcaggatgtgcatgataagatattggacgacgaagccgcacaggaactgatgcccgtagtcgccggtgccgttttcactctgacggctcacctttcccaggccgtgctgacagaacagaaagagaccagtgttttaggccctgccgaagcccactacgcctttatgctagacagttgtttcactagcccgcctccagaggagaacccgttggttgggtttgccagcattggagacagctccctgtacatcatcttgaagaaacttttagactttattcttaagaccggcggaggtttccagcgtgtgagaacccatctgtacggtagcctcctgtactacctgcaaatcgcccagcgtcctgatgagcccgatacattggaagcggcaaaaaagacgatgtgggagcgactaacagccccagaggacgtgtttagtaagctccaacgggagaatatcgcaatcatcgagagctatggggctgccctcatggaagtcgtatgtagggatgcatgtgatggtcacgagatcggcaggatgctcgctcttgcccttctggatagaatcgtctctgttgataaacagcagcagtggctgctgtacctgtctaattccggatatcttaaagttctggtcgactccctggtcgaggacgatagaaccttacagtctctgttaaccccccaaccacccttgctcaaggctctttacacttatgagtctaagatggcgtttttgacacgagtagcgaagattcagcagggagcgctggagcttctcagaagtggcgtgatcgtgcgcctggcgcagtgtcaggtgtatgacatgcgccctgagactgatccacaaagcatgtttggcatgcgagaccctcctatgtttatccctacgcctgtggacaggtatcggcaaattctcctcccagcactgcagctttgccaagtcatcttgacatccagtatggcacagcatttgcaggcagccggtcaggtgctgcagtttctgatctcccactccgataccatacaggccatactgagatgccaagacgtgagcgctggctctttacaggaactcgcactgcttactgggataatcagtaaggctgccctgcccggaatactgtctgagttggacgtcgatgtgaacgagggttcacttatggagttgcaaggacacatcggacgttttcagagacagtgcctggggctgcttagccgctttggagggtccgacagacttcggcagttcaagtttcaggacgacaacgtcgaaggagataaggtctccaaaaaagacgaaatcgaactcgcaatgcaacaaatttgcgccaacgtcatggaatactgccagtctctcatgctccagagttctccgaccttccagcatgccgtgtgcctgttcacaccttccctgtctgagacagtgaaccgcgatggaccgcgtcaagatacacaggcaccggtggtgccttactggaggctgcctggccttggcattatcatctatctactcaaacagagcgctaatgactttttctcctattatgactcacacaggcaaagcgtatctaaattgcagaacgttgaacaattgccgcctgacgaaattaaggagctgtgtcagtcagttatgccagcgggagtcgacaagatcagcaccgcgcagaagtatgtgctcgccagacggaggctggtaaaggtcatcaataaccgggcaaagctactcagcctgtgtagctttattatcgagacttgcctgtttattctgtggcgccatttagaatactacctgctgcattgcatgcctaccgatagtcaagattctttgttcgcatcaaggaccctgttcaagagtcgcaggctgcaggattcattcgcctccgagacaaacctggactttcggtccggacttgccatcgtgtcacagcacgacttggatcagctgcaggccgacgctattaatgcgttcggggagtcgctgcaaaagaaactgctcgatatagaaggcctgtatagcaaggtaaggagtcgctatagcttcatacaggcgctggtccggagaatcagggggctcctgcgaatatcaaggaactac

SEQ ID NO: 233315 - DNA, 750 bp, synthetic construct
  misc_feature 1..750: note = Description of Artificial Sequence: Synthetic coding sequence
  source 1..750: mol_type = other DNA
atgtcactgcgcaactactccgaaagggaggtttcggaccttatcaaggaatgccgccagtcccttgcagagtcactgtttgcctgggcctgtcagagcccactaggcaaggaggacacacttcttctcatcggacatctggaacgcgtgacggttgaggcaaacggaagcctcgatgccgtgaacctcgcactcctgatggcactcctatactgttttgacatctcctttatcgaacaaagtacagaagagcgggacgacatgattcatcagctcccactgttaaccgaaaagcaatatatcgcaaccattcactctcgcctccaggattcacagttatggaaacttccgggtctgcaagccacggtgcgcctggcatgggctctggcactacgcggtatttcacaactcccagatgttactgccctggctgagtttacggaggcagacgaggctatggccgaacttgccatagctgataatgtgttcttgtttctgatggagagcgtagtggtgtccgagtatttttatcaggaggagttctatattaggcgagttcataatttaataacggatttcctcgctctcatgccaatgaaggtgaagcagctgaggaatcgcgctgacgaagacgcccgtatgatacacatgagcatgcagatggggaatgagcctcctattagtcttcgccgtgaccttgagcacttaatgctgctggtatcaaagctgctggtcctgcggcttaattag

SEQ ID NO: 233316 - DNA, 5664 bp, synthetic construct
  misc_feature 1..5664: note = Description of Artificial Sequence: Synthetic coding sequence
  source 1..5664: mol_type = other DNA
atggccgctaggggtagaggtctcctgctcctgaccctgtcagttttgctcgccgcagggccttctgccgcagccgcaaaattgaatatccccaaagttctcctccctttcacgcgtgcgaccagagtaaactttactcttgaagcttccgaaggatgttatcgctggctaagcaccaggcccgaggtggcgagcatcgaaccacttggactcgacgaacagcagtgcagccagaaggcagtagttcaggctagacttactcagcctgccagactgacatcaatcattttcgccgaggatattacaaccggtcaggtcctccgttgtgacgcgatagttgacctgattcacgatatacagattgtgtctactactcgggagctgtacttagaggactccccccttgagctgaagatccaggcccttgatagtgagggcaacacattctcaactctggccggtctggtgttcgagtggactatcgtcaaggatagcgaagcagatcgtttcagtgatagccacaatgcgctgaggatccttacatttttggaatcaacttatatacctccatcttacattagcgagatggaaaaggcagcaaaacagggagatacaatactagtatcaggaatgaaaacaggctcttctaaactgaaagccaggatccaggaagccgtatataaaaatgttagacccgctgaggtgcgcttacttattctggagaacatcctcctgaatcctgcatacgatgtgtatttaatggtgggtacatctatccactataaagtgcaaaagattcgccagggtaagattactgagctatcgatgccttcggaccagtacgagctgcagctccagaatagtatccctggcccagagggggatcctgcacgccctgtcgctgtccttgctcaagacacgtcaatggtaactgctcttcagctgggacagtctagtttggtgctcgggcaccggagcatccggatgcagggggcaagcaggctcccaaatagtactatctatgttgtcgagccgggatacttgggcttcactgtgcaccctggtgataggtgggtactggaaactggcagattatacgagataacaattgaggtgttcgataaatttagcaataaagtgtatgtgtctgacaacattagaattgaaaccgtgctgcccgcagaattttttgaggtgctcagttcaagtcagaatggaagttatcatagaataagggctctaaagcgaggacaaactgccatcgacgccgcactgacctccgtggtggatcaggacggtggggtacacatattgcaggtacctgtttggaatcagcaagaggtggagatccacattccgatcacactgtacccttctatactcacctttccttggcagcccaaaacgggggcttaccagtatactatcagagctcacggcggtagcgggaacttcagctggagctccagctctcatctcgttgccaccgtcaccgttaagggagtcatgactacgggaagcgatatcgggttctctgtgattcaggcacacgacgttcagaaccctctccactttggtgaaatgaaagtgtacgtcattgaacctcattccatggagttcgctccctgtcaagtcgaggccagagtcggtcaggccctcgaactgccgctgcggatcagcggactgatgcctggaggcgcttctgaggtggtaaccttgtcagattgctctcactttgaccttgctgttgaggtggagaatcagggcgtttttcagcccctgccagggcgacttccgcctgggagcgagcattgttctggcattcgcgttaaggctgaagcacagggctctacgactttactggtctcttaccgccacggacacgtgcacctgagtgccaagatcacaatcgccgcttatctgccgttaaaagccgtcgaccccagcagtgtagcattagtgacgctgggctcttccaaggaaatgcttttcgagggtgggcctagaccttggattctggagccaagcaaattcttccagaatgtgactgcagaagatacagactcgattggactggccctgttcgcgcctcatagctcaaggaattaccagcagcactggatcctagtgacttgtcaggccctgggcgaacaagtcatcgcgcttagtgtcggcaataaaccatctttgactaatcctttccctgctgtcgagcccgctgttgtgaagttcgtctgtgcccctcccagcaggctaactctggcgccagtctacacaagtccccagttggacatgagttgcccattgttacagcagaataaacaggtcgtgcccgtctcctcccatagaaatcccagactcgacctggcggcttatgatcaggagggaagacggtttgacaacttttcctccctgtccatccagtgggagagtactaggcccgtcctcgcatcaattgagcccgaattaccgatgcagctggtgagtcaggacgatgaatccggtcagaagaagctgcacgggctgcaggcgatcctggtgcacgaagccagtggaactacggcgattacagccacagccactggctaccaagaaagccacctttcttcagctcgtactaagcagccccatgacccactggtgccgctgtctgcttccatcgaactgatccttgtggaggacgttcgggtgagcccggaggaagtgacgatctataatcatcccggaatacaggctgagttgagaattcgggaggggtccggatattttttcctcaacactagcacagccgacgtggtcaaggtggcttatcaggaggcacgcggtgttgctatggttcaccctttgttgccgggatcctccacaattatgatccacgacctttgcctggtgtttccagcccctgcaaaagctgttgtgtatgtcagcgatatccaagaactgtatattcgcgtcgtcgataaagtggagattggcaaaacagtgaaagcctacgtcagagtcctggacttgcacaaaaaaccattccttgcaaagtattttccctttatggaccttaagctccgcgcagcttcgcccattattaccttggttgcattggatgaggccctggataactacaccataacattcctcatcaggggtgtcgccatcgggcagacctctcttacagcctcagtgactaataaagcaggacagcgcatcaattccgcaccgcagcagattgaggtgtttccgccattccgactgatgccacgcaaagtgacccttctgatcggggctaccatgcaagtaactagcgagggcggtccccaaccccagtccaatattcttttcagcatttccaacgagtcggtggccctggtgagcgctgccggactcgttcagggtctggccattggaaatggcacggtcagtggcttggtgcaggcagttgatgccgagacgggcaaggtggtgattatcagccaagatctagtgcaggtggaggtactactgttaagagctgtgaggattagagcaccaatcatgagaatgaggaccgggacacagatgccgatttatgttaccggtattacaaaccatcaaaatccttttagcttcggcaacgccgttccaggtctgacattccactggtccgtgacaaaacgtgacgtccttgacctccgtgggcgacatcatgaggcttctattcggctcccaagccagtacaactttgccatgaatgtgttaggaagggttaaagggagaactgggctccgagtcgtcgtaaaggcggtcgaccccacaagtggccagttgtacggcctcgcaagagagctgtccgacgagatacaggtgcaggtgttcgagaagttgcagctcttaaacccagaaattgaggcagaacagatcttaatgagcccaaacagttatatcaaacttcagacgaaccgcgatggagctgcgagcctgtcataccgggtcttggacgggcctgagaaagtgcctgtggttcacgtggatgagaagggctttctcgcatccggcagcatgatagggacaagcactattgaagtcatcgcccaggagccattcggggcaaatcagaccattattgtagccgttaaagtctcccccgtgagctatttaagggtttcaatgagccccgttcttcatacgcagaataaagaggccttagtggccgtgcctctggggatgacagtgacattcacagtgcactttcatgacaactctggggatgtgtttcacgcccacagcagtgtcctgaacttcgcaacgaatcgcgacgatttcgttcagattgggaagggccctacgaacaatacttgtgttgtaaggactgtgtccgtcggattgactctcctccgtgtatgggacgcagaacacccaggactgtccgacttcatgcctctgccagtcctccaggcaatctcccctgagctgagtggtgctatggtggtcggagatgtcctttgtcttgccacagtcctgaccagtctcgaaggcctctccggaacctggtccagtagcgccaactcgatcctccacatcgacccaaaaactggtgtagctgttgctagggccgtgggatctgtcaccgtatattatgaggtggcgggtcacctgcgcacctacaaggaagtcgtggtctccgtacctcagcgcatcatggcccgtcaccttcatccaatccagacctcgttccaggaggctacagcatccaaggtaattgttgcggtcggagatcggtcttccaacctgagaggcgagtgtacccccacacagagagaggttattcaggccttgcatcccgaaaccctgatttcatgccagtctcagtttaagcccgcagtgttcgattttccatcacaggacgtctttactgtggagccacaattcgacaccgctctgggacaatacttttgctccattacgatgcaccgactgacagacaagcagcgaaaacacttaagcatgaagaaaactgcgctcgtcgtgagcgcgtctcttagcagttcacactttagcactgagcaagtgggcgctgaggtccctttttcacccggtctctttgcagatcaggccgagatcctgctttcaaaccattacactagctccgaaattagagtgttcggcgctccggaagttttggagaacctcgaagtcaaaagcggttctccggcagtgctggctttcgcgaaagagaaaagctttggttggccatcatttattacctacaccgtgggtgtgctggatccagccgctggctcccagggtccgctatcgacaacactgacttttagcagcccagttaccaatcaggccattgcaatccccgtgaccgttgcttttgtcgtggataggcggggtccgggtccgtacggagctagtctgtttcagcattttctggactcgtatcaggttatgttcttcaccctcttcgccctcctggccggaacggctgtgatgatcattgcatatcacaccgtctgtacccctcgcgacctggccgttcctgcagctctgacacccagagcaagtcctgggcatagcccccactacttcgccgcaagcagccctacatctcccaacgcactacccccagcccgtaaagcgagcccaccgagtggactgtggtcccctgcttacgcatcccattat

SEQ ID NO: 233317 - DNA, 6272 bp, synthetic construct
  misc_feature 1..6272: note = Description of Artificial Sequence: Synthetic coding sequence
  source 1..6272: mol_type = other DNA
atgggggacgagatggacgccatgatccccgagagggagatgaaagacttccagttccgtgcacttaaaaaagtgaggatattcgactcacctgaagagctcccaaaggaaagaagctcactcttagccgtatccaacaagtacggactggttttcgccggtggagcctccgggctccaaatttttcccacgaagaacctgctgattcagaataaacccggtgacgatcctaacaagatcgtcgacaaagtgcaggggcttctggtgccgatgaagtttcctatccaccatctggccctgtcatgtgacaatctgacattatccgcttgcatgatgagttccgaatacgggtcaatcatcgcgttcttcgatgtgcggacttttagcaacgaagctaaacagcagaagcggccattcgcatatcacaaattattgaaggatgccggaggcatggtgatcgacatgaaatggaaccctacggtgccgtctatggttgcggtgtgtctggcagatgggtccattgctgtcctgcaggtgaccgaaacagtgaaagtgtgtgcgacactgcctagcaccgtggctgtgacctctgtgtgctggtcacccaaaggaaagcagctcgccgtaggcaaacagaatggtactgtcgtgcagtacttacctaccctgcaggagaagaaggttatcccttgtccccctttctatgaatctgatcacccagtgagagttttggatgtcctgtggattggaacttatgttttcgcaatcgtttacgcggcagccgacggaactttggaaacatcacccgacgtagttatggccctcctgcccaagaaagaggagaagcatcccgaaatcttcgtcaatttcatggaaccttgctatgggtcttgtacagaaaggcagcaccactactacctgtcctacatagaagaatgggatctggtgctcgctgcgagcgctgccagtacagaggtgagcatcttggccaggcagtcagatcaaattaactgggagtcctggttactggaagattcaagcagggccgaactgcccgttacagataaatctgatgatagtctcccgatgggggtggttgtggactacacaaaccaggtggagatcactattagcgatgagaagaccttgccccctgcccctgtcctgatgctgttgtcgactgatggagtcttgtgtccattttacatgatcaaccaaaacccaggggtcaagagtctgattaagaccccagaacgcttgtcactagagggcgagcggcagcccaaatccccaggcagcactcccaccacgccaacatcatcccaggcaccccaaaagctcgatgcctctgcagcagcagctcctgcgtcacttccaccaagttctccagcggcaccgatcgctacattttctttgctgcccgctggaggagcaccaacggtgttcagcttcgggagttcaagcctaaaatcgagtgccactgtgacaggggagcccccatcctatagcagcggcagcgattcgtccaaggctgccccaggacccggtccatcgaccttttctttcgtgccccctagcaaagcttctctcgctcctacccccgctgcaagcccagtggcccctagcgcagcatccttttccttcggatcctctggattcaaacctacgctcgagtccacaccagttcctagcgttagcgctcctaatattgctatgaagccgtcttttccaccaagtacatctgcagtgaaagtgaacttaagcgaaaagttcactgctgccgctacctctactccagtatctagctcacaatcagctccccctatgagccccttttcatcggccagcaaacccgcagctagtggacccctgtcccacccaacccctttgtccgctcctccctctagcgtcccccttaagtcatctgtgctcccctcccccagcggacggtccgcacaaggcagttcctctccagttcctagcatggtgcaaaagtcacctcggataacgccgcctgccgcaaagccaggatcacctcaggcgaaatcccttcagcccgctgtggcggaaaaacaagggcaccagtggaaagacagcgatccagtgatggccggaatcggcgaagaaattgcccattttcagaaggagttggaggagctcaaggctcgcacttctaaagcctgtttccaggtaggcacctccgaggagatgaaaatgctgagaaccgagtcagacgaccttcatacattccttctggagatcaaagagaccaccgaaagtctccatggggacatctcctcactgaagaccacgctgctggaaggtttcgccggtgtggaggaagcgagagaacagaacgagcgtaacagggatagcggatacttgcatctgttgtacaaaaggccgctggatccaaagtccgaggcccagctgcaagagatcagaaggctgcaccagtatgttaagttcgcagtccaggatgtcaacgacgttcttgatctcgagtgggatcagcacttggagcagaagaaaaagcagcgccacttgctggttcctgagagggagaccctcttcaacaccctggccaacaaccgcgaaatcattaaccagcagcgaaaaagactcaaccacctcgtggacagcctccagcagctgcggttgtacaaacaaacgtcattgtggtccctatcttccgccgtgccttcccagagtagcattcattcattcgatagcgatctcgaatcactgtgtaacgcacttttgaaaactaccattgagtcgcacactaagagcttgcctaaagtgcccgcaaaactgagcccaatgaagcaggcacaactacgtaacttcctggcaaagcgaaaaacccctccagtacgctccacggcacctgcatccctcagcaggtcagccttcttaagccagcgctactacgaggatctggacgaggtatcttcaacttcctctgtctcgcagtccctcgagtcagaagacgccagaacttcttgcaaagatgacgaggcagtcgtgcaagccccaagacacgcacctgtcgttcggactccatccattcagccgagccttctgccacatgctgcaccattcgctaagagccaccttgtccacgggtcaagtcctggcgtcatgggtacaagtgtcgccacgagcgcaagtaagattatccctcaaggagccgacagcacaatgttggccacaaaaacagtgaaacacggagccccatccccctcccatcccatctctgctccccaggccgctgctgcggctgccttaagacggcaaatggcttcccaggccccagctgtgaatacactgaccgagtccaccttgaaaaatgtcccccaagtggtgaatgtgcaggagctaaagaacaatccagccactcccagcacagcgatgggctccagcgttccctactctaccgcaaagactcctcatcccgtgctgactcctgtggctgccaaccaagccaaacagggaagcttgatcaattcactgaagccatccggtcctacacccgcaagcggacagctttcttcaggtgataaggcctccgggacagccaagatcgaaacagccgtcacttccaccccgagcgccagcgggcaattcagcaagcccttcagctttagtccctcaggtactggattcaactttggcatcattacacccacaccttccagcaacttcacagcagcacagggcgctaccccctctactaaagagtcttcccagcccgacgccttttccagcgggggagggtccaagccaagctacgaggccattccggagagtagccccccttctggaatcacttccgcctcaaacaccacccccggagagccagcagcgtctagcagcagacctgtcgcacccagtggcacagctttgtctactacaagctcaaaactggagacacctccatctaagctaggcgagcttttgtttccatcttcattagcgggagagactcttggctctttttctggcctacgggtgggtcaggccgacgactctaccaagcccactaataaagcctctagcaccagtctgacttctacacaaccaaccaagacttctggcgtgccctccggatttaactttactgcccctccagtgctggggaaacacaccgaaccaccggtgacctcctccgcaacaaccaccagcgttgcgcctcccgcagccacttctacctcttctactgctgttttcggcagtctgccggttacatccgccggaagctctggtgtgatttcattcgggggaacgagcctgtctgctggcaaaacatctttttcatttggaagccaacagactaactccaccgttccacccagtgcccctccacctacgacagcggcaacgccccttcctacttcgttcccaacccttagtttcggaagtctcctgagctcggcaaccacaccctctctgcctatgagtgccggacggtccacagaagaggccacatcgagtgccctgcccgaaaaaccaggggactccgaagtcagcgcttcagccgcatccctgctcgaggagcagcagtcagcgcaacttcctcaggccccaccacagacctctgactcagttaagaaagagccagtcctggcccagcccgctgtgtctaactctggaacagctgcgagctctacctctctcgtggcattgtcagcggaagccacacctgcaacaacaggcgttccagacgcgaggactgaggccgtaccgccagctagttccttcagcgtgcctggacagactgccgtgacagctgccgctatcagctcagcaggtcctgtggctgtcgagaccagttccacccctattgcctccagtactactagcatcgtagcgccaggcccatcagccgaggccgctgctttcggaaccgtgacatcaggttcttccgttttcgcccagccccctgccgctagcagcagtagtgcctttaaccaacttactaataatactgccactgcaccaagcgctactcctgtgtttggccaggtagccgctagcaccgcaccaagcctgtttggacagcagacggggtcaacggccagtacagccgcagcaaccccacaggtgagctcctccggattttcaagtccagcttttgggactacagccccaggcgtgttcgggcagaccacattcggacaggctagcgtgttcggacagagcgcctcctccgctgcttctgttttcagcttctcccaacccggtttttctagcgtgcccgcttttggacagcccgctagcagtacccctactagcaccagcggaagcgtttttggggcagcttcctcaacatcctcatcgtcaagcttcagttttgggcagtcatcccccaacaccggcggaggcctgttcggccagagcaatgctccagctttcggacagtccccgggatttggtcaaggcggaagcgtttttgggggtacttctgcggcaacgacgacagcagctactagcggctttagcttttgccaggcatcaggcttcgggagttctaatactgggtccgtgttcggccaggccgcaagtactggcggtatcgtgttcggacaacagtctagcagttccagcggctctgtgttcgggagcgggaacacgggtcggggtggcggattcttcagcgggctcggaggaaagcctagtcaggatgctgccaacaaaaaccctttcagcagtgcctcaggcggtttcggctcaactgccacctccaataccagcaacttgtttggtaactccggagccaaaacttttggaggattcgcgagttccagttttggagagcagaagcccactggcacattttcctctgggggtggatcagtggcgtcccagggttttggcttcagcagtcctaacaagacgggcggattcggagccgctcccgtgtttggctcacctccgacctttgggggaagccctggcttcggaggagtccctgcctttggctctgcccctgcctttacctctccccttgggtcaacaggtggtaaagtcttcggggaagggacagccgctgcgagcgcaggaggcttcggattcggcagcagctcaaacacaacatcttttggaacactagcaagtcagaatgcaccaacgtttgggtctcttagccagcaaacttcaggcttcggcacacagagttcaggcttttccggatttggtagcggcacggggggatttagctttggatcgaataattcatcagtgcagggctttgggggatggagaagcta

SEQ ID NO: 233318 - DNA, 6242 bp, synthetic construct
  misc_feature 1..6242: note = Description of Artificial Sequence: Synthetic coding sequence
  source 1..6242: mol_type = other DNA
atgggcgatgagatggacgccatgattcccgaacgagagatgaaagacttccagtttagagccctgaagaaagtccgtatattcgatagccccgaagagcttccgaaggaacgatccagccttctggcagtgtctaataagtatggccttgtattcgcgggaggagcatccgggctgcaaatttttccaaccaaaaatctcctgatccagaacaagcccggagatgatcccaataaaatcgttgataaggttcagggtctgctggtgcctatgaaattcccgatccaccacctggctctttcatgtgacaacctaactctgagtgcctgtatgatgagcagcgagtatggttcaatcattgcttttttcgacgttaggacatttagtaacgaagccaagcagcagaaacgtccctttgcctatcacaaactactgaaggatgctggcggtatggtcattgacatgaaatggaatcctactgtgccatccatggtcgcggtctgcctggccgatgggagtattgcggtcttgcaggtcactgagactgtgaaagtctgcgctaccctcccatccaccgtggccgtgacttccgtgtgctggtcaccaaaaggtaagcagttagctgtgggcaagcagaacggcacggttgtgcagtacttgcccacactgcaggaaaaaaaagtaataccttgtccccctttctacgaaagcgatcatcctgttcgggttctggatgtgttgtggattggaacgtatgtctttgctatcgtgtatgccgctgccgatggtacattggagacctcgcccgatgtggtcatggcattgctgcccaagaaggaagaaaagcacccggaaatctttgtcaacttcatggaaccttgttacggctcttgtactgaacgccagcaccactattacctttcctatattgaggaatgggatctagttcttgcagcttccgcagccagcaccgaagtgtccatcctggcacggcaatccgatcagattaactgggagtcctggctgttggaggattccagtagagccgagctgccggtgacggacaagagcgatgattcccttcccatgggagtggtggtggactacaccaaccaggtggagattaccatttcagacgaaaagaccctgcccccagccccagtactgatgctgctcagcacagacggcgttctttgccccttttacatgatcaaccagaaccccggtgtgaaaagtctgatcaagactcccgagcgattgtcacttgagggggaaaggcagcccaaatctccagggtccactccgacaacccctacctcttctcaggcgcctcagaaactcgacgcatccgcggctgccgctcccgcaagcctgccgccaagttcccccgctgccccaattgctacttttagtcttcttccggctggtggggcaccgacagtattctccttcggcagcagcagcttgaagtccagtgctactgtaactggcgagccgccaagctacagctcaggaagcgacagttcaaaagcagctccaggacctggacctagtacgtttagcttcgtccctccgtccaaggcttctcttgcccctacaccagccgcttcgccggtggcgccttctgccgcttccttttccttcggctcttcagggttcaagccgacactggaaagtactcctgtcccttccgtcagtgccccaaatatcgcaatgaagccatcatttcctcctagtaccagtgcggtaaaggtgaacctgtccgaaaactctagtcaatccgccccacctatgagccccttcagcagtgcgagcaagcccgcagcctctggcccactgtctcaccctacgccacttagcgcaccaccgagttctgtgcccctgaagagctctgtgctcccgtccccctccgcgggtagatctgcgcagggatcctccagccctgtacccagcatggtgcagaagtcgccccgaatcacaccccctgcagcaaaaccaggctccccacaggctaagagtctccagccggctgttgccgagaagcagggacatcagtggaaagattctgaccctgtcatggccggaattggcgaggagatcgcgcacttccagaaggaactggaggagttaaaggccaggacaagcaaagcttgttttcaggtagggacatccgaggagatgaagatgttgaggaccgaaagtgacgatttacatactttcctgctcgagatcaaggaaactacagaaagcctgcacggggacatatcatcattgaaaaccaccttactggagggatttgcaggagtcgaagaagcccgagagcagaatgagaggaatcgggactccggttacctgcacctcctgtataagcgccctctggaccccaaatcagaggcccagctgcaggagatccgtagattacatcagtacgtcaagtttgcagtccaagacgttaacgacgtcttggatcttgagtgggatcaacacctggagcaaaagaaaaaacagcgacatctgttagtgcctgagagagaaacattgtttaacaccctggccaacaatagagagattattaatcagcagagaaaaagactgaatcacctcgtcgacagtctgcagcagctgcgattatacaagcagacgagcctctggtccctgtctagtgccgtgccctcccaatctagcattcatagtttcgattcggatctggagtcgctgtgcaatgccctgctgaaaacaacgatagaatctcacaccaaaagcctgcctaaggtgcccgcaaagttatcgcccatgaagcaggcccagctccggaactttctggcgaagcggaagacacccccagttagatcaaccgctccggcatctctcagtaggagtgctttcctcagccagaggtattatgaagacctcgacgaagtgtccagcacaagctccgtgtcacagtcattggagtcagaggatgctagaacttcttgtaaagatgacgaggccgtcgttcaggcccctcggcacgctccggtagtgcgcacccctagcattcagccctccctacttccgcatgcggctccatttgctaaatcccatctagtgcacgggtccagcccaggtgtgatggggacctccgtcgccacttctgcctcaaaaattatcccccagggggctgattccacaatgctggctaccaagactgtcaagcacggggcaccttccccctcccatcccatctccgcgccacaggccgcagcagccgcagcacttcgccgtcagatggccagtcaggctcctgcggtcaatacattaacagagagtacacttaagaacgtgccccaggtagtgaatgtccaagagctcaagaataatcctgccactccaagcaccgccatgggcagcagtgttccttatagcaccgctaaaactcctcaccctgtgttaacacctgtcgcggcaaaccaggcaaagcagggcagcttaatcaattcacttaagccgtctggcccaacacccgcttcaggacagctcagctctggggacaaagcttctggtaccgccaagattgagaccgcagttacctctacacccagcgcaagcggccagttcagcaaaccatttagtttctccccttccgggaccggcttcaattttggcatcatcactcccaccccgagctcaaattttactgccgctcagggcgctacccccagcactaaagagtctagccagcctgacgctttctcttccggaggaggctcgaaaccatcctacgaagcaatccccgagagttctcctccgtctggcatcacatctgccagtaataccacacccggtgaacccgcagcctcatctagcagaccagtagctcctagcgggactgccctctccactacatccagcaagctggagacacctccctctaagttaggcgaactgctcttcccttccagcctggctggagagactctggggagctttagcggactgcgcgtaggacaggcagacgactctacaaaacccaccaataaggcctcttctacaagcctcacatcaacacagcccaccaagacatccggcgtgccctctggctttaacttcacggctcctccagttttgggaaaacacactgaacctccggtgacttcttctgctaccacgacatccgttgccccaccagccgcaacctctacttcttccaccgcggtattcggatcccttccggtcacaagtgctgggtccagcggggttatttcatttggcggaacttcactgagcgccggaaagactagcttctcctttggctcgcagcagacaaattccacagtgcccccttcggcccctcctcctacaactgctgccactccacttccaacttcttttcctacactcagttttggctcactgctttcaagtgccaccacaccaagcctccccatgagcgcgggacgaagcactgaagaagctacatcatccgccttaccagagaaacctggagacagtgaggtctccgcttccgcagcgagtttattggaggaacagcaatctgctcagttgccacaggcgccaccgcagaccagtgactccgtcaaaaaggagcccgtccttgctcagccggcagtgagcaacagtggtacggccgcatcctcaacatcgctggtggctctttcagccgaagccacacctgctacaacgggagtgcctgacgctcgcaccgaggcagtgcctcccgcaagttcattcagtgtacccggtcagactgcagtcactgctgcagcgatcagttctgcaggcccagtcgccgtggaaacaagtagtacgcctatcgctagctctaccacttcaatagttgcacctggccctagcgccgaggcggcagcttttggcacagtcacctccggttcctctgtgtttgcccaacctccagcagcctcctcctctagtgctttcaaccagttgactaataacaccgctacggctcccagcgctacacccgtgtttggccaggtggccgcaagtacagccccatctctgtttgggcagcaaacaggcagcaccgccagcacagcagctgccactcctcaggtgagcagctccggattctcttcaccggcatttggaactaccgctcctggcgtgtttggccagacaacatttggtcaggctagtgtatttggacagtccgcttcttccgcagcttccgtatttagtttcagccaacctggctttagtagcgtgcccgcatttggtcaacccgcttcgtctacaccgacatctaccagcgggagtgttttcggcgcagcctcttctacatcttcatcctcgtctttttctttcggacagagtagcccaaatacaggcggaggtctttttggccaatcaaatgcgcctgccttcgggcagagtcccggtttcggccagggaggctccgtgttcggaggcacgagcgccgctaccacaacggcagccacgtccggtttcagcttctgccaggcttccggcttcggctccagcaacactggaagcgtgtttggacaggccgcatccactgggggtattgtcttcgggcagcagtcaagttccagcagcggtagtgtgttcgggagtggcaacactggcaggggtggcggtttcttcagtgggctgggaggtaagccctcccaggacgcggctaataagaacccatttagcagtgccagcggtggatttgggtctaccgccacatccaatacaagcaatctttttggcaattcaggggctaagaccttcggcggttttgccagtagctccttcggcgaacagaagcctaccgggactttcagtagtgggggagggtcggtagcctcccaaggcttcggcttcagcagccccaataaaaccggaggttttggagctgccccagtttttggctcaccaccgactttcggcggatcacccggattcggcggtgtccctgcttttggatccgctcctgcgttcacaagtcctctcggaagtacgggaggaaaggtgttcggagagggcactgctgctgcatccgccggaggcttcggtttcggaagttccagcaacaccacatcgtttggcacactggcgtctcagaatgctccaacattcggatcgctgtctcaacaaacgagtggatttggaacccagagtagcggatttagtggatttggctcagggaccggagggttttccttcggatcaaacaattcatctgtgcagggttttggcggatggaggagtta

SEQ ID NO: 233319 - DNA, 4560 bp, synthetic construct
  misc_feature 1..4560: note = Description of Artificial Sequence: Synthetic coding sequence
  source 1..4560: mol_type = other DNA
atgaaacctagcttccccccttccaccagtgctgtgaaggtaaatctctctgagaagtttaccgctgctgccaccagtactcccgttagttcttcacagagtgcccctcctatgagtcccttttcctccgcctcaaagcctgctgcatccgggcctttgagtcacccgacccccttgtctgcgcctccctcctctgtgcctctaaaatcttcagtcctgccctctccgagcggcagatcagcccaagggtccagtagccctgtgcctagtatggtgcagaagtccccaaggattactcctccggcagccaaaccaggttctccccaggccaaaagcctccaacccgcagtcgcagagaagcagggccatcaatggaaggattctgaccccgtcatggcaggaattggggaggagatcgcacacttccaaaaggagctggaggaacttaaagccagaacctccaaagcctgtttccaagtcggaaccagcgaggaaatgaagatgctgagaactgaatcggatgatcttcacacctttttgctagagatcaaggaaactaccgaaagtctgcacggggacatcagctcactcaaaacaacactgcttgaggggttcgcgggagtggaagaggcgcgtgagcagaacgagcgtaatcgcgactcaggctacctgcaccttttatacaagagaccattggacccaaaatccgaggcacagctacaagaaataaggaggctgcatcagtatgttaagtttgccgtgcaggacgtaaacgacgtcctcgaccttgaatgggaccagcatcttgagcagaagaagaaacagcgtcaccttcttgtccctgagcgtgaaaccctatttaacacactggctaacaaccgagaaatcatcaatcaacagaggaagcgactcaatcacctggttgactcccttcagcagctcaggttgtataagcagacctccctgtggtcactttcttcagctgtcccctcacagtccagtatccattcttttgatagcgacctggaatctctatgtaacgctctcctgaaaactactatcgaaagccacaccaagtctcttccaaaggtccctgcgaagctcagccccatgaaacaggctcagctgaggaacttcctggccaaaagaaaaacacctccggtgagaagcaccgcaccagcttctctgtctagatcagcctttttgtctcagagatactacgaggatctggacgaagtctcgtccacttcttccgtgagccaaagccttgaaagcgaggacgcgaggacctcttgcaaagatgacgaagctgtggttcaagcaccaagacatgctccagtggttagaacaccctcgatccagccaagtctccttccacacgctgcgccattcgctaagtctcatctggtgcacgggagttctcctggcgtgatgggcacgagtgtggcgacttctgccagcaaaatcataccacagggagccgatagcaccatgctggctaccaagacggtcaagcacggggcaccaagtcccagccatccaatttctgcccctcaggcggcagctgccgctgccttacggcgacagatggcctcacaggctcccgctgtcaatacactcactgagtccacactgaagaatgtcccgcaggtggtgaacgtgcaagagctcaaaaacaaccccgctacccccagcacggccatgggctcttcagtgccttactctaccgccaagacaccacatccagtgttaacccctgttgccgctaatcaggcaaagcaaggcagtctgattaacagcctcaagccctccggacccacgccggctagtgggcaactcagttccggcgacaaagcctccggaaccgctaagattgagaccgccgtcacaagtacccccagcgcatcgggccagttctctaaacctttctctttcagtcccagtggcacaggattcaatttcgggattattacccctacccccagtagtaatttcacggctgcacagggcgcaactcccagcaccaaagagtcttctcagcccgacgcattttcctccggagggggttccaaacccagttatgaagcgatcccagagtcaagtcccccttctggcattacctctgcctcaaatacaacccccggtgagcctgccgctagcagctcaagacccgtagccccttccgggactgcgctgagtaccaccagcagtaagcttgagacacctccaagcaaactgggcgaactcctgttcccttcttctttagctggtgaaactctcggctcattctccggactgcgagtgggtcaggctgacgacagcaccaagcctacaaataaggcatcaagtacctcactgacatctactcaacccaccaagacgtcaggtgtcccctctgggttcaattttactgccccacctgtattaggcaaacacaccgagcctccagtgacttccagcgccactaccacttcggttgcacccccagcggctacatccacatcatcaaccgcggttttcggctcgctgccagtgactagtgcgggatcctccggtgtgatctcatttgggggtacctcattgtcagcaggtaaaacatctttctctttcggctcacagcagacaaattcaaccgttcctcctagcgcacctccaccaacaaccgctgccacacccctcccaacttcatttcctaccctgtcttttggatcgctcctatccagcgccacaacacctagcctccctatgtccgctggtcgatctactgaggaagccacctccagtgcattgccagaaaaaccgggtgattcggaggtctctgcctctgccgcttctctgctggaggagcagcaatctgcacagctccctcaagcacctccgcagacctctgactcagtgaagaaggaaccggtgctggcccagcctgctgtgagtaactcgggaacagctgcctcatctacttcactcgtcgcactgtccgcggaggcgactccggctacgacaggtgtgcctgacgccagaaccgaagcggtaccccctgccagcagcttctccgtgcctgggcaaacagcagtcaccgctgctgccattagctccgccggtccagtcgccgtggagacatcctccaccccgattgccagctccaccacatcgattgtcgcccctggaccctctgccgaggctgctgctttcgggacagtgacatcagggtcaagcgttttcgcacagcctccggcagcatctagcagctccgcattcaaccagctgactaataataccgccaccgcaccctccgccacacccgtgtttgggcaggttgccgcttcaactgctccctctttgttcggccaacagaccgggtctaccgcatccactgccgctgcaactccccaagtcagcagtagcggattctcttctcctgcctttggaaccaccgcccctggggtgtttggacagaccacttttgggcaagcctcagtctttgggcaatcagctagctcagcggcatccgtcttttcgttctcccagccaggtttcagttccgtgccagcttttggacagccagccagcagcaccccgacaagcacaagcggctctgtattcggggctgcttcatcaaccagctcctcttcctctttttcattcggccagtcctcacccaacaccggtggaggactcttcggtcagtcaaacgcaccagccttcggccagtcccctggctttgggcagggaggctcggtgtttggaggcacttccgctgctacaaccacagccgcaacttcagggttctctttctgtcaggcaagcggattcggttcttcgaataccggaagcgtatttggtcaggctgcatctactggcggaatcgtcttcggccagcagtcttcatcatcctccggaagcgtgttcggaagcggaaacactggcaggggagggggattcttctctggcctcggagggaagccctctcaagatgctgctaataagaatccttttagctcagcatctggaggtttcggaagtacggcgactagcaatactagtaacctcttcgggaattccggcgcaaagacatttggaggcttcgcctcatcttcatttggcgagcagaagcccacaggcaccttcagtagtggaggcggaagtgtcgcttcacagggtttcggcttctctagcccgaataaaaccggtggtttcggagcggcacctgttttcggatccccaccaacattcggcggtagccctgggttcggaggagttcccgctttcggcagcgcccctgccttcacttctccgctagggtccacggggggaaaagtgttcggggagggcactgctgccgcttccgccggtgggtttggttttggctcatccagcaatacaacatcgtttggcaccctcgcgagccagaacgcaccaaccttcgggtcactgagccaacagacttctggatttggtacacaaagcagcggcttttcaggctttggatctggcacgggcggattctccttcggctccaacaacagttccgtgcagggattcggtggctggaggagctag

SEQ ID NO: 233320 - DNA, 6275 bp, synthetic construct
  misc_feature 1..6275: note = Description of Artificial Sequence: Synthetic coding sequence
  source 1..6275: mol_type = other DNA
atgggggatgagatggatgccatgattccggaacgggaaatgaaggattttcaattccgggctctgaagaaagtgaggatttttgattccccggaggaacttcctaaagagcgttctagtctcctcgccgttagcaacaagtatggactggtttttgctgggggagcctctggcttgcaaatttttccgactaagaacctgctcatccaaaacaagccaggcgatgatcctaacaagattgtggataaagtgcaaggcctactggttccaatgaaatttccgatccaccatctggccttgtcttgcgacaaccttactttgtcagcctgcatgatgagcagcgaatatggttctatcattgcattttttgatgtgcggactttttcaaatgaggcaaagcagcagaaacgcccttttgcttatcacaagctgctgaaggatgccggaggcatggtgatcgacatgaagtggaatcccactgtgcctagcatggtggccgtgtgtctagcagatggaagcatcgctgttctccaagttacggagacggtgaaggtatgtgccacccttcctagcactgtcgccgtgacatctgtgtgttggtcacccaaggggaaacagctagccgtgggaaagcagaatggtactgtggtccagtatctccctaccctacaagagaaaaaagttattccatgcccaccattttacgaaagtgatcatccagtcagagtattggatgtgttatggattggcacctatgtctttgcaattgtctatgccgctgccgatggaacccttgaaaccagcccagacgtggtgatggcgctgttgccaaagaaggaggagaaacatccagaaatcttcgttaatttcatggaaccttgttatggctcttgcactgagcgccagcaccattactaccttagctatattgaagaatgggacctagtgctggcagcgtccgccgcaagcacggaggtgtctatcttggctcggcagagcgaccaaataaactgggagagttggctgctggaggactccagcagagctgagctgccagtcaccgacaagagcgacgactccttgccaatgggcgtggtcgttgactatacaaatcaggtggaaattactatcagtgatgagaagacactcccacctgccccagtgttaatgttactcagcaccgatggagtactctgccctttttacatgatcaaccagaaccccggtgtgaaatcgttaattaagactcctgagcggctttccttagagggcgaacgtcagcccaagagtccaggatccacacctacaacacccacatcctcccaggcaccgcaaaaactggacgcttcagcggcagcggcacctgctagtctgccacccagctccccagccgctcccatcgccacgttcagcctgctgcccgctggaggtgccccaacggtgtttagtttcggaagcagctctttgaaatcttcggctacagtcaccggagagccgccaagttacagttctggaagtgatagtagcaaggcagcccctgggcctggccctagcacatttagcttcgtgccaccttcaaaggcttcactggctccgacaccagcagcctctccggtagctccgtcagctgctagtttctctttcgggagctctggattcaaacctacactggagtccactccggtaccctcagtgtccgctcccaacatcgccatgaagccatcattccctccaagcaccagtgccgttaaagtgaacctaagtgagaagtttaccgcagctgctacatctacccccgtgtcttccagtcagtcagctccaccaatgtcaccctttagttccgccagcaagcctgccgcttccggcccactctctcacccaacccctttgtccgcgccaccttctagcgtgcctttaaaaagttctgttttgccctccccctcagccggacgatctgctcagggatctagttccccggtcccttctatggtccagaagagtccacgcatcactccaccagctgccaaacctggttctcctcaggctaagtccctgcagccagctgtggctgaaaagcagggtcaccagtggaaggacagcgaccctgtgatggcaggtatcggggaggagatcgcccacttccagaaggaactcgaggagctgaaggcacgaacatccaaggcctgtttccaggtagggaccagcgaggagatgaagatgctgcgcacagaaagcgatgaccttcataccttcctgttagaaattaaggaaacaaccgaaagcctgcatggcgatattagctccctgaaaacaaccctcctcgaggggtttgcgggagtggaagaggccagagagcaaaatgaacgcaatcgagatagcgggtacctccatctgctctataagcgccctctcgacccaaagagcgaagcccagctccaagagatccggagactgcatcagtacgtgaaattcgccgttcaggacgtgaacgacgtgctggacttagaatgggaccaacatctcgagcagaagaaaaagcaacgtcacttgttggttcccgagcgcgaaaccttgttcaacactttggctaacaacagagagataatcaatcagcaaaggaaacgcctgaatcacctcgttgactccttacagcagctgaggctctacaagcagacaagcttgtggagcctttcctccgcggtgccctctcagtcttctattcatagcttcgactccgacctggagtccctgtgcaatgccctcctgaagacaacaatcgagagccacaccaagtctcttcccaaagtacccgcaaagttgtcccctatgaagcaggctcagctcaggaacttccttgctaaaaggaagacgccacccgtccgctccacagccccagcgtccttatccagaagtgctttcctgtcccagcgatactacgaagatctggacgaagtgtcaagtacttcatctgttagtcaaagcctggaatccgaggatgcccgaacatcatgtaaggacgacgaagccgtcgttcaggcccctaggcacgcaccagttgtcaggaccccctctatccagccatctctcctgccacatgcagcaccctttgctaagtcgcacctagtgcatggatcctcacctggcgtcatgggcacaagtgtcgctacaagtgcttcaaaaattatcccgcaaggagccgattctacgatgttagccaccaaaaccgtgaagcatggtgccccaagcccctcccatccgatcagtgcacctcaggccgctgccgcagcggctctacggaggcaaatggcctcacaggccccagcagttaacacactcactgaatcaactctgaaaaatgttccgcaagtggtaaatgtgcaggaattgaaaaataatcccgcaaccccatccacagccatgggctcaagcgtgccttacagcaccgcaaagaccccccatccagttcttacacccgtggccgctaatcaagcaaagcaaggttccctcatcaattcccttaaaccaagtggtcctacacctgctagcggccagctgtctagtggagataaagcaagcggcaccgccaaaatcgagaccgccgtcacctctaccccttcagcctccgggcagttcagtaaaccattctcattttcaccaagcgggactgggtttaattttggaatcatcacgccgacccctagtagtaacttcacagccgcacagggagcgacacccagtaccaaggagtcatctcagccggacgctttcagtagcgggggtggatctaaacctagctatgaagccatacccgagtcctctccaccatctgggatcacatccgcaagcaacaccactcctggagagcctgccgctagctcatcccgacctgttgcaccctccgggacagctctatctaccacatcctcgaagcttgagacaccaccgagcaagttgggtgaactcctcttcccttcatccctggctggtgaaactctgggttccttctccgggttaagggtagggcaggccgacgattctacaaaaccgaccaataaggctagctccacatccctgacttccacccaacccactaagacttcaggggtgccttctggctttaactttactgcgccacccgtactaggcaagcacactgaaccacccgtcacgagtagcgccaccaccacatcagtggctccgcctgccgcaaccagcacttcctctacggcggtgttcggatcattgcccgtgacaagcgctggatctagcggtgtaatcagttttgggggaacaagtcttagcgctggtaaaacctcttttagtttcgggtcacaacagactaattccacagtaccaccgagcgcgcctccgcctacaactgcggctacacccctgccgacctcttttcccaccttgtcttttgggagcctcctatcatccgccaccacaccttcgctcccaatgtcagccggacggagcaccgaggaggcgaccagctcagctcttcctgaaaaacccggagattccgaggtgtcggcttctgcagctagcctgctggaagagcaacaatctgctcagctgccacaggcaccgcctcagacatccgattctgtcaagaaggagccagttctcgcacagccagccgtgagtaattccgggaccgcagcctcttctactagcttggtcgccttgagcgccgaagcgacacccgcaactacaggggttcctgacgcacgcaccgaggcagtgccacccgcaagcagtttctctgttccgggtcagaccgccgttacagcggctgctatctcctccgccggtcccgtggcggtggaaacgtcttctactcccatagccagcagcaccaccagcatcgtggcccctggcccatcagcagaagctgcggcttttggcacagtgacatctgggagctctgtcttcgcgcagccacctgccgcaagtagctcaagcgccttcaatcagttgaccaacaataccgccaccgcaccaagtgctactccagtattcggccaggtggcagcaagcaccgcaccctcacttttcggacaacagaccggatccactgcttccaccgcagctgctactccccaggtgtcctccagcgggttctcatctcccgcatttgggaccacagcgccaggtgtatttgggcaaaccaccttcgggcaggcctccgtgttcgggcagagcgcctcctccgcagcctccgtattcagcttttcccagcccggattcagctcagtcccggctttcggacaacctgcttcctccactccgacctcaacaagtggctccgtttttggcgctgctagctccacttctagctctagcagtttttccttcggccagagttctcccaacacaggcggagggctgttcggacagtctaatgctccggcattcggtcagtcgcccggttttggccagggaggctccgtttttggcggaaccagcgctgccaccaccactgctgcaacatctgggttcagtttctgccaggcatcgggctttgggagcagtaacacaggcagcgtgttcggacaagcagccagtaccggcggtattgttttcgggcagcagtctagtagttcctccggaagtgtgtttggtagtggcaataccgggagaggaggagggtttttcagtggactgggaggcaaaccttctcaggatgccgctaacaagaacccttttagcagcgccagtggcggttttggctctacagccaccagtaacacctcaaacttgttcggaaacagcggagccaagacatttggtgggtttgcttcttctagttttggagagcagaagccgacaggaacattttcctcaggcggaggctcagtagcaagtcaggggttcggcttcagctccccgaacaagacgggaggcttcggagcagcgccagtgtttgggagcccacctactttcgggggttccccaggcttcggcggagttcctgcatttggatctgctcccgcatttaccagtcccctggggtccaccggaggcaaagtgttcggtgaggggaccgcagccgctagcgccggtgggttcggcttcggctcctcgtcaaataccacatccttcggaaccctcgccagccaaaatgctccaacgtttgggagcctgagccaacagaccagcggattcgggacccagagttccgggttcagcgggtttggaagcggcacagggggattctccttcggaagtaacaattctagcgtgcagggattcggcggttggaggagtta

SEQ ID NO: 233321 - DNA, 237 bp, synthetic construct
  misc_feature 1..237: note = Description of Artificial Sequence: Synthetic coding sequence
  source 1..237: mol_type = other DNA
ggtgaagggaccgctgcagcttcagcaggcggatttgggtttggaagctctagtaatactacatcctttgggacactggcctctcagaatgcaccaacatttggaagcctgtcccagcagacttctgggttcggaacccagtctagcggattttctggtttcggatcggggacaggtgggtttagcttcggaagcaacaacagctcggtccaggggttcggcggttggagaagctag

SEQ ID NO: 233322 - DNA, 5055 bp, synthetic construct
  misc_feature 1..5055: note = Description of Artificial Sequence: Synthetic coding sequence
  source 1..5055: mol_type = other DNA
ggggcagaaggcaggaaattcgctgtcgagaggcctggttttcggggacagggcagaggtaggcagaggtggctgttgaggcacactacccccacttcaagccaagcgcctcagaaactcgacgcttccgccgctgcagcgccagcctccctgccaccgtcgtctcctgcagcgcctatcgccactttcagcctgctccctgcaggcggtgctcccacagtctttagtttcgggtcctcctctctcaaaagctcggctacagtgaccggcgaacctccgagttacagtagtggaagcgactctagtaaggccgcaccaggccctgggccaagcaccttcagctttgttccaccgagcaaggcttccctagcacctacacctgccgctagtccagtcgccccatctgcagcttcattctccttcggatccagtggcttcaaacctactctcgaaagcacgcctgtgccatccgtgtccgcaccaaacattgcgatgaagccaagctttccaccttccacttccgccgtgaaggtcaacctctctgaaaagttcacagccgctgcaacttctacccctgtatcatcttcacaatccgctcctccgatgagtccgttctcctctgcttccaaacccgctgcaagcgggccactgagccaccctactcctttgtcggccccaccctctagcgtgcctctcaaatccagcgtcctgccctccccatctgctggaagatcagctcaaggctcgagttcaccggtgccctccatggtacagaagtccccgaggatcacaccccctgccgcaaaaccaggctccccgcaggcaaaatccttacagcctgcagtcgccgaaaagcaaggccatcaatggaaagacagtgatcctgttatggctggcattggggaagagattgcccatttccagaaagaactggaggagcttaaagccaggacctccaaggcttgcttccaggtcggaaccagcgaggagatgaaaatgctgaggactgagtcggacgatctgcacactttcctgctcgaaattaaggagaccaccgagtccctgcatggcgacatctcgagtctgaaaacaacactgttagaggggtttgccggagtggaagaggcccgagagcagaacgagagaaatcgcgactcgggatacctccatctgttatataaaagacctctggatcctaaatctgaagctcaattgcaagaaataagacgactgcatcagtacgtgaagttcgcagtacaggacgttaatgacgtcttagaccttgagtgggaccagcacctggagcagaaaaagaagcaaaggcaccttttagtgccggagagagaaaccctgtttaataccttggcaaataatcgtgaaataataaatcagcagcgcaagcggttgaaccatttagttgacagcctacagcagttgcggctctacaaacagacttcactgtggagcctgtcatcagccgtaccctctcagtcttcaatccacagctttgactcagatctggaatccctgtgtaacgctctgctgaagaccaccatcgagtcacacactaagtcccttcccaaggttcctgctaagctgtcgcccatgaagcaagcccagctacggaacttcttggctaaacggaagacaccaccggttcgaagcactgccccagcctctcttagtaggagcgcatttttgtcccagcggtactacgaagacctggatgaggtgagctctacttcaagcgtctcacaaagcctagagagtgaggatgcgagaacttcttgcaaagatgacgaggccgttgtccaagctccccgacacgccccagtagtgaggacacccagtattcagcccagcctgttgcctcatgcagcccctttcgccaagagtcacttagtgcacgggtcaagtccaggagtgatggggacctccgtcgctacatctgccagcaaaatcattccccagggagctgattcaaccatgctcgccaccaagacagtgaagcacggtgcgccttcccctagccaccccatctcagctccccaggcagccgcagctgcggctctacgtaggcaaatggcctcccaggcacccgcagttaacacgctgacagaatctactctaaagaatgtgccacaagtcgtgaacgtgcaggagctgaagaacaatcctgcaactccttcgaccgcaatgggctcctcagttccgtactccacagcaaagacaccacatccagtcctgacccctgttgccgcaaatcaggctaagcagggttcactaattaactctcttaagccctcagggcctactcctgcgagtggacagttgagttccggagacaaggcgagcggcaccgccaagattgaaactgcagtcacctctactccatccgctagcgggcagttcagcaagcctttctcattctctcctagtggaacggggttcaacttcggaatcatcacccccaccccctcttctaacttcacggcagctcaaggcgctacaccgagcactaaggaatcctcacagcctgatgcgttctcatctgggggagggagcaagccttcttatgaagccatccccgagagcagcccgccttctggaattacttcagcttccaacacgacccctggggagccggcagctagcagttcgaggccagtggctcccagcggcaccgcgctaagcaccacaagctccaaactcgaaactccgccatcaaaattaggagaactgctcttcccgagctcgctggccggagaaacactggggagcttctccggcctccgagtggggcaggccgatgactctaccaagcctactaataaagcttccagcacctctttgacctcgacacagcccacgaagacatctggtgtgccctccgggttcaattttactgccccacctgttctgggaaagcatacagagcccccagtgacaagctctgcgacaactaccagcgttgctccacccgcagcgaccagtacaagcagtacagccgtttttggaagcctgccagttacaagcgccggaagctccggagttatcagtttcgggggaacctctctcagtgctggcaaaaccagcttctccttcgggagccaacaaacaaactcaacagtcccgccatccgcacctccaccaacaacagctgccactcctctgcctacaagtttcccgaccctgtcttttgggtctttactctcctctgccactacccccagtttacccatgagtgccggacggtcaacggaggaggctacctcgagcgcgctcccggaaaaacctggggactcagaggtcagtgcatctgccgcaagtctgctggaggaacagcagagcgcccaactgcctcaagctcctccccagactagcgatagcgtaaagaaagagcccgtgcttgctcagcctgccgtgtcgaattcggggaccgcagcctccagtacttcactggtcgcactttccgccgaggccacccctgcgaccacaggggtgcccgatgccagaactgaggctgtgcctccagcgagcagcttctcagtgcctggccagactgccgttactgccgcagccatcagcagcgccggacccgtcgcggtcgaaaccagctccacccccattgcatcatccacaacctcaatcgtcgcgccaggtccctctgccgaagctgctgcttttggcacagttacttctggaagctcagtgttcgcacagccccctgccgcttcctcatcttccgcttttaaccagttgaccaacaataccgcaacagccccttctgccacccccgtattcggccaggtagccgctagcactgcgccttccttgttcggccaacaaactggctccaccgctagtaccgcggctgctaccccgcaggtaagtagcagtggattctcttctcccgcattcggcactactgccccaggagtgtttggccagactacgttcggacaggcttccgtattcggtcaatccgccagctctgccgcttccgtgttcagctttagccagcctgggttcagttccgtcccagccttcggccagcctgcctccagcacacctactagcactagcggcagtgtttttggtgccgcaagctcaacctctagttccagttccttttcttttgggcagtcttcaccaaatacaggaggtggactcttcgggcaatccaacgctccagccttcgggcagagtccaggctttggccaaggaggctccgtgttcgggggtacctccgctgcaacaaccaccgccgctacaagcgggttctcattttgtcaggccagcggattcgggagttcgaacaccgggagtgtgtttggacaggccgctagcaccggtggcattgtttttggccaacagtcctcctcgtcatcagggagtgtgttcgggagcgggaacactggtcgcggagggggattcttctctggtttggggggaaagccctcacaggacgctgccaacaaaaacccatttagtagcgccagcgggggtttcggctctaccgcgactagtaacacctctaatctcttcggaaacagtggcgctaaaacattcggaggcttcgctagcagctcctttggagaacagaagcctaccggcacattttcatccgggggaggatccgtggcctcccagggatttgggttctccagtcccaacaaaaccggaggcttcggagccgctcctgtgtttggctcccctcccacttttggtggatcccccggatttgggggagttccagccttcggttctgctcccgctttcacctctcctttgggatccacgggcggaaaggtgtttggcgagggaaccgcagcagcctcagccggaggatttggatttggttccagctcaaacacgacctcgttcgggacactcgcctcccagaatgctccaaccttcggctcactgtcccagcagactagcggcttcggtactcagagcagtggtttcagtggattcggcagcggaactggtggcttttcctttggcagtaataattcttctgttcaaggatttggaggctggcggtcctag

SEQ ID NO: 233323 - DNA, 6281 bp, synthetic construct
  misc_feature 1..6281: note = Description of Artificial Sequence: Synthetic coding sequence
  source 1..6281: mol_type = other DNA
atgggagacgagatggacgccatgatcccggaaagggagatgaaggatttccagttccgcgctctgaagaaagtcaggatatttgattcccccgaagagctgcctaaggaacggagctctctgttggccgtttctaacaagtatgggctggtgttcgcaggaggcgcaagtggattacagatctttccaacaaaaaacttgttgatacagaataagccaggagacgatcccaacaaaatcgtggacaaagtccaagggttgctggtgcctatgaaattccctattcatcatctcgctctttcctgtgacaatcttacactatctgcctgcatgatgtcttccgagtatgggagcattattgccttctttgatgtaaggaccttctctaatgaggcaaagcagcagaaacgaccattcgcttaccacaaactgcttaaagacgcaggcggtatggttatagacatgaagtggaaccctactgtgccgtccatggtggctgtgtgcctcgccgatggctcaattgcagttttgcaggtgacagaaactgtaaaagtgtgcgcaacgcttccatctactgtggccgtcacctcagtgtgttggtcgcctaagggtaagcagctcgcagtaggaaagcagaacggcaccgtcgtgcagtacttgccaaccctccaggagaagaaagtgatcccttgccctcctttctacgagagcgatcacccagtccgcgtcttggatgtgctttggataggaacctacgtgtttgccatagtctatgcagcggctgacgggacattggaaacgagtcctgacgtggtgatggccctgcttcccaagaaggaggaaaagcacccagagatatttgtgaattttatggaaccatgttacggctcatgtactgagcgacaacaccactactacctgagttatatagaagagtgggatctggtcctagctgcatctgctgcatctaccgaggtctccatcttagccaggcagagcgaccagatcaactgggaaagctggcttctggaagactcgtctagagccgagctacccgtgacagacaagtccgacgactccctgcccatgggggtggtggtggactacaccaatcaggtggaaatcactatctctgacgaaaagacgctgcctcccgctccagtcttaatgctcttgtctaccgacggtgtactctgtccattttatatgattaatcaaaacccaggagtgaaatcattaattaagacaccagaaagactgtctctggaaggggagaggcagcccaaatcacctggatccactcccacaactcccacatcttctcaagcgcctcaaaagttggatgcgagtgcggctgccgcacctgcttccctgccaccctcctctccggctgccccaattgctacgttctctctgctgccagcgggtggcgctccgaccgtgtttagctttggcagctcctctctcaaatcctcagcgacagtaacaggagagcccccaagctactcttccggatccgattcatcaaaggctgcaccaggcccaggtccctccaccttttcctttgttccccctagtaaagcatccctcgcaccgacccccgcagcgtctccagtggctccttccgccgcaagctttagcttcggtagcagcgggtttaagccgacactagagtctacccctgtgccatccgtatctgcccctaacatcgccatgaagcccagctttccaccatccacctctgcagttaaggtgaatttgagcgaaaattctagccagtcagctcctcccatgagcccttttagtagcgcgtccaaacccgcagcaagcggtcccctaagccatccaactccactcagtgcccctccaagctctgtgcctctgaagtcctctgtgctcccatcgcccagcggtaggtcagcccagggatcaagctccccggtgccctccatggtccaaaaatcccctagaataaccccgccagctgccaaaccagggtccccacaggccaagtccttacagccggcagtggcagaaaaacaggggcaccagtggaaggatagcgacccagttatggccggaattggtgaagagatcgctcatttccaaaaagaactggaagaattgaaagccagaactagtaaggcctgtttccaagtgggaacctcagaagagatgaagatgctacggaccgagtcggatgatctgcacacatttctgctcgaaatcaaggaaacaaccgaaagcctccacggagacatcagctcattgaaaactaccctgctcgaggggttcgccggagtggaggaagcacgcgagcagaatgaaagaaaccgagactctggctacctgcatcttctctacaagagaccattggaccccaaatccgaggctcagttgcaggagatacgccgtctgcaccagtacgttaaattcgccgtgcaggatgtgaacgacgtactggatttagagtgggatcagcatctcgagcagaaaaaaaagcagagacatttactggtcccagagcgggagaccctctttaacaccctagctaacaatcgcgagattattaaccagcagcgcaaacgcctgaatcatctggtggattctctccagcagttacggctctacaaacaaacctccttgtggtccctgtcttccgccgtcccttcccaatcctcaattcattcgttcgactcagacctcgagtccttgtgcaacgcccttttaaagaccactatagagagtcatactaagagcctgccgaaagtaccagcgaaactgtccccgatgaagcaggcccagctgcgcaattttttggcaaaacgcaagactcccccagtgagatcgacagcccctgcttccttgagtagatcggcctttctttctcagcgctattacgaggacctagacgaagtcagttccacaagctctgtgagccagtcattggagagcgaggatgccagaacatcctgcaaagacgacgaggcggtggtgcaggctccacgccacgcaccagtggtgaggaccccttcaatccaaccaagtctcctaccacatgctgcgccattcgctaaaagtcacctggttcacggttctagccccggagttatggggacttccgtcgctacaagcgccagcaagattattcctcagggggctgactctactatgctggccactaaaacagtcaaacatggcgctccttcaccatcccatcccatcagtgcaccccaggcagccgcagctgctgctcttcgtcgacagatggctagccaagccccagccgtcaataccctgaccgaatcaactcttaagaatgtgcctcaggtggtgaacgtacaggagttgaagaataaccccgctaccccatcaactgccaaaaccccccatcccgtgctgacaccggttgccgcaaaccaggccaaacagggctctctgatcaattctttaaagccatccggcccaacccctgcatctggccagctgtcctctggggataaggcatctggaacagctaagattgagaccgccgtaacatccacccctagcgcctctggccagttctccaagccattttccttttctccgagtggtacagggtttaacttcggcattatcaccccaacaccttcttctaacttcacggccgctcagggagctacgccaagcacaaaggaatcatcacagcccgacgccttctcatccggaggtggcagcaaaccctcgtacgaggccatccccgaaagcagccccccttcggggatcactagtgcatcaaacactacccccggagagcccgctgcaagttcaagtcgcccagtggcaccctccggtactgctctgtctacaacctccagcaagttggagaccccacctagcaagctcggagagctcttatttccatcctcactggccggagaaacgcttggatccttcagcggactgcgggtgggacaagctgatgacagcactaagccaacaaataaagcctcatctacctctctcacctccacacagccaacaaaaacctctggcgtaccctctggcttcaattttaccgcccctcctgtactcggcaagcataccgagccccctgtcacctctagtgccacaacaacaagcgtggcgccacccgctgctactagtacttcgagcacggcagttttcgggtccctgcccgttacttcagcaggctcgtctggtgtgatttcgtttggaggaacatcattgtctgccggaaagacttcttttagttttggttctcagcagactaatagcaccgtgcccccatccgcacctccacctaccacagctgccacacccttacctacctcctttccaactctgtcttttggatccctgctgagcagcgctaccactccatcccttcccatgtcagcgggtagaagcactgaagaagcaacgtcaagtgccctgccggagaaaccaggggacagcgaggttagtgcttcagctgccagtctcctcgaggagcagcaaagtgcacagctcccacaggcccctcctcagacaagtgactcagtgaaaaaggagcccgtcctggcacagcccgcagtgagcaattcaggaacagctgcatcctccacaagcctcgtagccctctccgcagaggcaactcctgcgaccacaggggtgcccgatgctagaaccgaggccgtgccgccagcctcctcctttagcgttcctgggcaaacagcagtgacagcagctgcaattagttcagccggaccggtggcggtagagacttcgagcactcctattgcatctagtacaacctcaatcgtggctccaggaccatcagcggaggccgcagcatttggaactgtgactagcggcagttccgtgtttgcccagcctcctgccgctagtagcagttccgcattcaatcagttaacaaataacaccgcaactgcacctagtgccacgcccgtcttcgggcaggtcgccgcatccacagctcctagcctgttcgggcagcagaccggatctacagcctctactgcggctgctacccctcaggtttcaagcagtggattttcttcaccagcttttggcaccacagcgcctggcgtattcgggcagaccactttcggccaggcttcggtctttggccagagcgcgagttccgccgcatccgtgttctcgttttctcagccaggtttctcaagcgttcccgcattcggacagcctgccagctcaacacccacctccactagtggcagtgtgttcggagccgcatcttctacatcaagcagctcttctttttcattcggacagtcgagcccgaataccggagggggtttgtttgggcagtcaaacgctcctgcgtttggtcagagtcctggcttcgggcagggcggtagtgtatttggaggtaccagcgcagctactactacggcagcgaccagtggattttctttctgccaggccagcggctttgggtcttccaatacagggtcggttttcggccaggccgctagcactggaggcatcgtgtttgggcagcagtcttccagttcatcgggcagcgttttcggctcaggcaataccggtcgcggaggcggatttttctccggccttgggggaaagccatcgcaggacgccgctaataaaaatcctttttccagtgcatctggaggatttgggagtacagcaactagcaacacgtctaatttgttcggtaattccggcgctaagacattcgggggatttgcttcctcttctttcggcgagcagaagcccaccgggacattctcatcagggggtggtagtgtggcctcacagggcttcggattttcttccccaaataagaccggtggatttggggctgccccagtctttggctccccaccgaccttcggagggagccctgggttcgggggtgtgcccgcttttggaagcgcgccagcattcacctcaccactgggttccaccggcggtaaggttttcggcgagggcactgcagccgcttccgccggaggtttcggaagtctagcaatgtccctttcccccacactgaagggccgactcctcctcatgcggcctaaggccggagggggtagggaacaggcagcccctggaagaaagtccaacgaatcaaggtcgcttgggcacttgtgtatggaacgagccctgactagcccactaaaggtctgggaacaacaacagcaccacatcctaaggcatgctcgcgagtccgagtgcccccacttcagaattaccgtccctaccgacttttggttttgggatccggaata

SEQ ID NO: 233324 - DNA, 1308 bp, synthetic construct
  misc_feature 1..1308: note = Description of Artificial Sequence: Synthetic coding sequence
  source 1..1308: mol_type = other DNA
atgaaaagtagtctcctgctccgcggagtgcatttctgcttccacttgcctggcgctacccctagtaccaaggagagcagccaacccgatgcgtttagcagcggaggtggctctaagccttcctatgaggcgattcctgagagctcacccccttccggtattactagcgcttccaacaccacgcccggagagcccgcagctagtagttcacggcctgttgccccttcaggaacggccttgagtacaacctcctcaaagttagaaactcctccctctaagttaggcgaactgctgtttccttcaagtctagcgggagaaaccttgggctctttttcaggcctacgcgttgggcaagcagacgattcaactaaacctactaacaaggcctcaagcactagtctcacctctacacaacccaccaaaacgagtggagtcccctcgggctttaacttcacggcccctcccgtgctgggaaagcacaccgagccccctgtgacgtcaagtgcaaccacaacctccgtggcaccccctgccgcaacctctactagctctactgccgtctttgggagtctccccgtgactagcgccggttcctccggcgtcatctcattcgggggtacctccttgtcggccggtaagacctctttctcgtttggatcccaacagaccaattcaacagtgcccccatcggctccacctcctacgaccgcagccacccccctgcccacttcttttccaactctttccttcggtagtctcctgagttccgccacaacccccagtctgccaatgtccgccggaaggagcactgaggaggcaactagcagcgccttaccggagaaaccgggtgattctgaggtgtcggcatccgccgcttccctattagaggagcagcagtcagcccaactgccccaggcacccccacagaccagcgactcggtcaagaaagagccagttttagcacagccagccgtgtctaattctggcacagcagcttcttctacaagcctggtcgcattaagcgcagaagcgactcctgcaaccactggtgtgcccgacgcaaggaccgaagccgtcccaccagcttcctccttctccgtgccaggccagacagctgtgaccgccgctgccatctcctccgcgggaccagttgctgtagagaccagttcaacacccatagcgtccagcaccacaagtatagtggccccaggcccttctgctgaagccgctgccttcggtacggtgacgagcggatcctccgtgtttgctcaaccacccgcagcaagcagtagctcagccttcaactag

SEQ ID NO: 233325 - DNA, 981 bp, synthetic construct
  misc_feature 1..981: note = Description of Artificial Sequence: Synthetic coding sequence
  source 1..981: mol_type = other DNA
atggcagctttcgcagtcgaaccccaggggcctgcactgggtagtgagcctatgatgctgggctcacccacaagtcccaaacccggagtaaatgcccagtttctgcctggctttctgatgggtgatctgccagccccagttaccccccagcccaggtccatttccggacccagcgtcggtgtcatggagatgagaagcccattactcgccggaggatcaccccctcagccagtggtgccggctcataaagacaagtctggcgcacccccagtcaggtccatctacgacgatatctcttctcccggactgggctccacgccactgacatcacgtcgccagcccaacattagcgttatgcaaagccccttggtgggggtgaccagtacaccaggaaccggacaaagcatgttcagccctgcctctataggacagccacgcaaaactaccttgtccccagcccagctggacccattttacacacagggagactcgctaacttctgaagatcaccttgacgacagctgggtgaccgtgttcgggttcccacaggcttcagccagctacatcttactgcagttcgcccagtacggtaatattttgaaacatgtgatgtccaacacaggaaattggatgcacatcagataccagagtaagctgcaggcgagaaaggccttgtccaaggacgggcgtatttttggtgagagcattatgatcggtgtgaagccctgcatagataagtctgtgatggaaagttccgaccgttgcgccttgagtagcccctccttagcctttacccctcctatcaagacactgggcacgcccactcagcctgggagcacgcctcgtatcagtacaatgcggcctctcgccaccgcttacaaagctagtacatccgactaccaggttatttccgacaggcagactccaaagaaggacgagtcgctcgtttcgaaagccatggagtacatgtttggttggtag

SEQ ID NO: 233326 - DNA, 930 bp, synthetic construct
  misc_feature 1..930: note = Description of Artificial Sequence: Synthetic coding sequence
  source 1..930: mol_type = other DNA
atgatgctggggtcacccaccagtcctaagccaggggtgaacgcccagttccttcctggctttctaatgggcgatctgcctgcgccagtgactccgcagccacgcagtatctcagggccttctgtcggcgtgatggagatgcggtcgcctctcttggctggaggatctcctcctcagccagtggtgcctgctcacaaagacaagtcaggtgccccacctgtcaggtccatttacgacgacatcagctcccctgggttgggatcaacaccactgacgtcccgtaggcagcccaatataagtgtcatgcagtcaccactcgtgggcgtcactagtacccccggaacgggtcagtcaatgttctcaccggctagcatcggacagccacgaaaaactactttatccccagcacagctcgaccctttctacacacaaggggattccctgacttctgaagaccacctcgacgactcttgggtcacagtgttcggatttccccaagccagcgcctcctatatcttgctgcagtttgcgcagtacggcaatattttgaaacacgtgatgtctaataccgggaattggatgcatattcgttatcaatcgaagctgcaggcgaggaaggctctgtctaaggatggcaggatcttcggggagagtatcatgataggggttaaaccttgtatcgataagtctgttatggagagctcagatcgatgtgctctgtcttccccatcccttgccttcactcccccaatcaaaacgctaggaacacccacccagcccggaagcactccccgtatatctacaatgcggcctctggctactgcctataaagcttctacatcagattaccaggttatctccgatagacagacccccaaaaaggacgaaagccttgtgagcaaggcgatggagtatatgttcgggtggtag

SEQ ID NO: 233327 - DNA, 576 bp, synthetic construct
  misc_feature 1..576: note = Description of Artificial Sequence: Synthetic coding sequence
  source 1..576: mol_type = other DNA
atgttcagccccgctagcattgggcagcccagaaaaactacactgtcaccagctcaattagatcctttttatacgcaaggagattccctgacctcggaagatcaccttgacgactcttgggtcaccgtgttcgggtttcctcaggcatctgcttcatacatcctcctgcagttcgcccagtatggtaacattctgaaacatgtcatgagcaacaccggtaactggatgcatattagatatcagtctaagctccaggctaggaaagcgctttctaaggatgggcgtatctttggggaaagcatcatgataggcgttaaaccttgcattgataaaagtgtcatggagtcttccgatcgatgcgctctctcctctcctagtctggctttcacaccacccattaagaccctcggcacccccacacagcccggttccacaccccgaatttcaacgatgcggccactcgctacagcgtacaaggcttcaacctctgactatcaggtgatcagcgaccgccagacgccaaagaaagacgaaagcctggtcagcaaggcaatggagtatatgttcgggtggtag

SEQ ID NO: 233328 - DNA, 981 bp, synthetic construct
  misc_feature 1..981: note = Description of Artificial Sequence: Synthetic coding sequence
  source 1..981: mol_type = other DNA
atgaagcaagatgcaagtaggaatgcggcttataccgtggattgtgaagattacgtgcacgtcgtcgagttcaatccattcgaaaacggcgatagcggcaatctgatagcctatggcggaaataactatgtggtgatagggacgtgtaccttccaggaggaggaagcagatgtcgagggcatccagtataaaacactgcgcaccttccatcatggtgttcgcgtcgatggcatcgcatggtctccagagacaaggctggattcattgcctccggtgataaagttctgcacttctgctgcggatatgaagattcggttgtttaccagcgatcttcaggacaaaaatgagtacaaggtcttggaggggcacactgatttcatcaacggactcgtgtttgaccctaaggagggccaggagattgctagtgtcagtgatgaccacacatgtaggatttggaacttagagggcgtgcagaccgcacacttcgtgctgcatagcccgggtatgtcggtatgctggcacccagaagagacattcaaattaatggtcgccgagaagaatgggacaatccgcttttacgaccttctcgcgcagcaagctatcctaagcctagagtcagaacaggtgccgctgatgtcggctcactggtgcttgaagaacacgttcaaagtcggagctgtcgccggtaatgattggctgatttgggatataacaagatcaagctacccccagaataaaaggccagtccatatggacagggcctgtctcttccgctggtctactattagtgagaatctattcgccacaaccggctatcccggaaagatggctagtcagttccaaatccatcacctcggccacccacagccaatactaatggggtctgtggcggttggctccggtttgtcatggcatcggactctcccgctgtgcgtcatcgggggtgatcacaaactgctgttttgggttaccgaagtttag

SEQ ID NO: 233329 - DNA, 156 bp, synthetic construct
  misc_feature 1..156: note = Description of Artificial Sequence: Synthetic coding sequence
  source 1..156: mol_type = other DNA
atgaaacaggacgccagccgaaacgcggcatacacagtcgactgcgaagactacgttcacgtcgtcgagtttaatccttttgagaacggtgattctggaaatttaattgcctacggcggaaacaattatgtcgtcatcggaacctgcacattctag

SEQ ID NO: 233330 - DNA, 981 bp, synthetic construct
  misc_feature 1..981: note = Description of Artificial Sequence: Synthetic coding sequence
  source 1..981: mol_type = other DNA
atgaaacaggatgcttctcggaatgccgcttatactgtagattgtgaagattatgttcatgtcgttgagtttaacccatttgagaatggcgattctggtaaccttatcgcgtacggaggaaacaactatgtggtaatcgggacttgcactttccaagaggaggaagccgacgtcgaaggaattcagtacaagacactccggacctttcatcacggcgttcgggtggatggcatagcttggtctcccgaaacgcgtctggattccttgcccccagtgattaagttctgcacaagtgcagctgacatgaagatccgcctatttacatctgatctgcaggataaaaatgagtataaagtgcttgaggggcatacagatttcattaatggtctggtcttcgacccgaaggaggggcaggaaattgcaagcgtatcagatgatcacacttgcaggatctggaatctcgagggcgtgcagaccgcccactttgttctccacagtccaggtatgtcagtctgctggcatccagaagagaccttcaaactgatggtggccgagaagaacggtaccatacgtttttatgacctcctggcacagcaggctattctgtccttagaatccgagcaagtaccattgatgagcgcacactggtgtctgaagaatacgttcaaagttggcgcagtggccggaaacgattggttgatctgggatataactagaagttcatacccccagaataagcgacccgtgcatatggaccgcgcatgcctcttcagatggtctactatcagtgagaacctcttcgcaacgactgggtaccccggaaaaatggcctctcaattccagattcaccatctcggacacccacagcctattctgatggggagcgtggctgtgggatccggcctgtcatggcacagaactctccctctttgcgtgatcgggggtgatcataaactgctattctgggtgacagaggtctag

SEQ ID NO: 233331 - DNA, 1143 bp, synthetic construct
  misc_feature 1..1143: note = Description of Artificial Sequence: Synthetic coding sequence
  source 1..1143: mol_type = other DNA
atggaagagatctacgccaaattcgtgagccagaagatctccaagactcgttggcggcctttacccccagggtcacttcaaacagccgagacttttgccacagggtcctgggataatgaagagaattatatatctttatggtcaataggcgactttggaaatctggacagcgacggtggattcgagggagaccatcagctgctgtgcgatattcgccaccacggagacgtgatggaccttcagtttttcgaccaggagagaattgttgccgctagttcaacaggttgcgtgacagtgtttctgcaccatcctaataaccaaaccctgtccgtgaaccagcagtggaccacagctcactaccacaccggccctggcagcccctcctattccagcgctccatgtactggggtggtctgcaacaacccagagattgtcaccgtgggagaggacggtcgtattaatctgtttagggctgaccacaaggaagccgtgagaactatcgacaatgccgatagcagtaccctccacgccgttacatttctcaggactccagaaatcttgacggtcaactctataggtcaattgaaaatctgggacttcagacagcaggggaatgagccatcccagattctgagcctgaccggggaccgggtgccactccactgtgtggacaggcacccaaatcagcagcacgtggtagcaacaggtggccaagatgggatgttaagtatctgggatgttaggcagggcaccatgcccgtttcccttttaaaagcccatgaggccgagatgtgggaggtgcattttcacccgtccaatccagagcaccttttcacatgctccgaggatggctctttgtggcactgggacgcaagtacggatgtgcctgagaagtcaagcctatttcaccaggggggacgatccagcacttttctgtcacactctatcagcaatcaggctaatgtacatcagtccgtcattagctcttggctgtctaccgatccggctaaagaccgtattgagatcacctctttactcccgagccggtctctgtcagtgaataccctggatgtattgggcccttgtcttgtttgcgggactgacgccgaggctatttacgttactcgccacctgttcagttag

SEQ ID NO: 233332 - DNA, 747 bp, synthetic construct
  misc_feature 1..747: note = Description of Artificial Sequence: Synthetic coding sequence
  source 1..747: mol_type = other DNA
atgggtggcccactatctctgggcacagattgcgcccatacgggctaccgaagagaattgacattgtgttcacaccggctgcgccctaaagtgccgagcaatcagggttctgccggacgtggtggcgcagagagaagggtgctgtgtttgctttttgccgtgcccgcagccgcagcctttggaatggaagagatttatgcgaagtttgtgagtcaaaagatctcgaagacgcggtggcggccactccctcccggttcgttgcagaccgcagaaactttcgcaactggatcctgggacaacgaggagaactatatcagcctctggagtatcggcgacttcgggaatttagatagcgacggcggattcgaaggcgatcaccagttattgtgtgacatcaggcaccacggcgatgtcatggacctccagttcttcgaccaggaaagaatagtggctgcctcttccactgggtgcgtgacagtttttttacatcatccgaacaaccaaacactgagtgtgaatcagcagtggaccaccgctcactatcacaccggtccagggagcccaagctactctagcgccccatgtaccggagtggtgtgcaacaacccggaaattgtcaccgtgggcgaggatggccgaataaatctctttcgcgcagatcacaaggaagctgttaggacgattgggctcgtgaccgaatgccacagcacagtcctgattgacatcccgaccaacagtatgctgtag

SEQ ID NO: 233333 - DNA, 1143 bp, synthetic construct
  misc_feature 1..1143: note = Description of Artificial Sequence: Synthetic coding sequence
  source 1..1143: mol_type = other DNA
atggaggagatttacgcgaagttcgtgtcccagaagataagcaagactcggtggcgtcctctcccgcctggctccctgcagacagcagaaacctttgccacaggatcctgggataatgaagagaactatatatccttatggtcaattggggattttgggaacctagactcagacgggggatttgaaggggatcatcagctcctgtgcgatattcggcatcacggtgacgtaatggatttgcagttcttcgaccaggaacggatcgttgccgcatcatctacaggttgtgtgaccgtgttcctccaccatccgaacaatcaaaccttgtctgtcaaccagcagtggacgactgcccactaccataccgggcctggctccccgtcttattccagtgcaccatgtacaggtgtcgtgtgcaacaatcccgaaatagtgactgttggggaagacggtaggataaacctatttagggcggaccataaagaagcggttcgcaccatcgataatgcggactcctccactttgcatgctgtgacgtttcttcggactccggagatccttacagtgaatagtatcggccagctgaagatctgggacttcagacagcaagggaacgaaccatcccagatcctgtctctgactggcgaccgagtccctctgcactgcgtagatcgacaccccaaccagcagcacgtcgtggctactggcggacaggatggaatgttatccatttgggatgtcagacaggggactatgcccgtttctctgttgaaggcccatgaggcagagatgtgggaggtccattttcacccgtcaaaccctgagcacctctttacatgctccgaggatgggagtttgtggcattgggatgcctccacggatgtacccgagaaaagcagcctgttccaccagggaggtcggtcaagtacttttctgtctcacagcattagcaatcaagcaaacgttcatcagagcgtgatctcctcttggctctcaacagatcctgcgaaggatagaattgagattacatcgctgctgcctagccggtccttgtctgtaaataccttggacgtgttggggccttgccttgtctgcggaaccgatgcggaagccatctacgtcactcgacatctgttcagctag

SEQ ID NO: 233334 - DNA, 1407 bp, synthetic construct
  misc_feature 1..1407: note = Description of Artificial Sequence: Synthetic coding sequence
  source 1..1407: mol_type = other DNA
atggcgaaacgcaatgccgagaaggagctgactgatagaaactgggatcaggaagatgaggcggaggaagtcggtacctttagcatggcaagcgaagaggtcttaaaaaatagagctatcaaaaaggctaagcgtaggaatgttgggttcgagagcgacactggaggagccttcaaagggttcaagggtcttgtagtaccatcgggaggcggtcggtttagcggattcggaagcggggcaggagggaagcctctggaggggctgtccaatggcaacaacatcacctccgcccctcccttcgcctcggcaaaggccgctgccgatcccaaggtggcctttggctcactggcagcaaacggccctactacactggtggacaaagtgagcaatcccaaaacgaacggagactctcaacagccaagctccagcggccttgcaagtagtaaggcctgcgtggggaatgcctaccacaagcaactggctgcccttaattgcagtgtccgggactggattgttaagcacgtgaacaccaaccccctatgcgatctaactccaatcttcaaggactacgagaagtacctagccaacatagagcagcagcacggtaattctgggaggaattcagaaagtgaaagcaataaggtggcagccgagacccaatctcctagtctcttcggcagcaccaagctccaacaggagtctacctttctcttccatggcaataagacagaggacactcccgataagaaaatggaagtggcttcggaaaaaaagactgatccgtcctcccttggcgctacctccgccagctttaacttcgggaaaaaggtggattctagcgttttgggtagcctgtcatcagttccgctgacgggtttttccttctcacctggcaactccagtctgttcggcaaggacacaacgcagagtaagcctgtgtcatctcccttccctactaagccactcgaggggcaggcagagggagattctggagagtgtaagggaggcgacgaagaggaaaatgacgaaccaccaaaggtcgtagtgacggaggtgaaggaggaggacgccttctattcaaaaaaatgcaagttattctataagaaggacaatgaattcaaggaaaaaggcattggaactttacatcttaagccaacggccaaccagaagacccagctgttggtgcgcgctgatacaaacctgggaaatattcttctgaatgtcctgatcccccctaacatgccctgtactagaaccggaaagaataatgtcttaattgtgtgcgtgccgaatcctcctatagatgagaaaaatgcaactatgccagtaacgatgcttattcgggtgaaaacaagcgaagatgccgacgaactgcataagattctgctcgaaaagaaagatgcctag

SEQ ID NO: 233335 - DNA, 1323 bp, synthetic construct
  misc_feature 1..1323: note = Description of Artificial Sequence: Synthetic coding sequence
  source 1..1323: mol_type = other DNA
atggccagcgaagaagtgttaaaaaacagggccattaagaaagcgaaacggaggaatgtggggtttgagtcagataccggcggtgccttcaaagggttcaaagggctagtggtacctagcgggggaggcaggttctctggattcggctccggtgccggaggcaagccccttgaagggcttagcaacgggaacaacataacatccgcgccaccctttgcaagcgcaaaagcggcagccgatcccaaggtggcatttggatcgcttgccgcaaatgggcctacgactctggtcgataaggttagcaatcccaaaacgaatggcgacagccaacagccctcaagctcagggctagcatcaagcaaggcatgcgtcggaaacgcatatcacaagcagttggccgcactgaactgttccgttcgggactggatcgttaagcacgtcaatactaatccactgtgcgatctgacgccaatctttaaagattacgaaaaatacctggcgaatattgaacagcagcacgggaattccggccgaaattccgaaagtgagtccaacaaggtcgcagcagagactcagagcccatccctgttcggaagcacgaaactgcagcaggaatccacttttctcttccacggaaacaagaccgaggacactcctgataagaagatggaggtggctagtgagaaaaaaactgatccatcctcccttggggctacttctgcatctttcaacttcggaaagaaggtcgacagctcggtcctggggtccctgagcagcgttcctcttaccgggttctcgttctcacctggaaattcctcactcttcggaaaagacactacccagagcaagccagttagtagcccattccccaccaaacctcttgaaggccaagctgagggcgatagtggcgagtgtaaagggggagatgaggaggaaaatgatgagcctccaaaggtcgtggttactgaggtgaaagaagaggacgccttttactcaaaaaagtgtaaactcttctataaaaaggataatgagtttaaagaaaagggcatcggcactctacacctcaaacctaccgctaaccagaaaactcagctcctggttcgggctgacactaatctgggcaatatcttactcaatgtgttgatcccgccaaatatgccatgcacccggaccggtaaaaataacgttttaattgtatgcgtccccaatcctcctatcgatgagaagaatgcaacgatgccagtgaccatgttaatccgggtgaaaacatcagaggacgctgatgagctgcacaagattctactcgagaagaaagacgcttag

SEQ ID NO: 233336 - DNA, 1323 bp, synthetic construct
  misc_feature 1..1323: note = Description of Artificial Sequence: Synthetic coding sequence
  source 1..1323: mol_type = other DNA
atggcctccgaggaagtgttgaagaatcgagccatcaaaaaagcaaagagaaggaatgtcggctttgaatcagacactggaggggctttcaaaggttttaagggcctagtagtgcctagtgggggtggacggtttagtggctttggtagcggggcaggaggaaagcctctggaggggctgtctaatggcaacaacattacctccgcgcctcccttcgcttctgcaaaggctgcagccgatcctaaggttgctttcggctctctagcagcgaacggcccaaccactctggtggacaaggtatctaatcccaaaacaaacggcgactctcagcagccttccagctctggcctggcctcctctaaagcttgcgttgggaatgcctatcataaacagcttgctgcactcaattgctccgtgagagattggatcgtaaagcacgtgaatactaaccccctctgcgatttgacacctatcttcaaagattacgagaaatacctggctaacatcgagcagcagcacggcaattccggcagaaacagtgagtcagaatcaaataaagtggccgctgagacacagtccccctccttgtttggatctacgaagcttcagcaggagtccacttttctcttccatggaaacaaaacggaggacaccccggacaagaagatggaagtggcaagtgagaagaagaccgacccaagttcacttggcgcaacctcagctagtttcaacttcggcaaaaaggtggactcttctgtgcttgggagcctgtcttcggtgccgctcaccggctttagcttctcgccaggaaattcgtcactgtttggaaaagacacaactcaaagcaagcccgtgagctccccctttcccactaagcctcttgaaggacaggccgagggtgattcaggtgaatgtaaaggcggagacgaggaggaaaatgatgagccccctaaggtcgttgttacggaagtgaaggaagaagacgccttttattctaagaagtgcaaattattttataaaaaggataatgagtttaaggagaaggggattggcaccctgcatttaaaacctaccgctaatcagaagacccagctactggtacgcgctgatacaaatctggggaatattctcctcaatgtactgataccaccgaacatgccctgtactcgcactggaaagaataatgttctgatcgtctgcgtgccaaacccacccatcgacgagaagaacgctacaatgccagtcaccatgctgatcagggtgaaaaccagtgaagacgctgatgagctgcacaagatccttctagaaaagaaggacgcatag

SEQ ID NO: 233337 - DNA, 27 bp, synthetic construct
  misc_feature 1..27: note = Description of Artificial Sequence: Synthetic coding sequence
  source 1..27: mol_type = other DNA
atggcaagcgaagaggttttgaaatag

SEQ ID NO: 233338 - DNA, 537 bp, synthetic construct
  misc_feature 1..537: note = Description of Artificial Sequence: Synthetic coding sequence
  source 1..537: mol_type = other DNA
atggccaaacggaacgctgagaaggaactcaccgacagaaactgggaccaggaggatgaagccgaggaagtgggcacatttagtatggctagcgaggaagtgctgaaaaacagagctattaagaaagctaagcgacggaatgtgggctttgaaagtgacaccggaggagcctttaagggatttaaagggctggttgttcctagtggcggaggcaggtttagcggtttcggcagtggagctgggggaaagccactagaggggctgagcaatgggaacaacatcacatctgcaccaccattcgctagcgctaaggcagccgcagatccaaaggttgcctttggaggggacgaagaagagaacgacgaaccccctaaggtggtggtcactgaggtaaaagaggaggatgcgttctattccaagaaatgtaaactattttacaagaaggataatgagttcaaagagaaaggtatcggcacgttgcatctcaaacctactgccaaccagaaaacccagctcctcgttcgggcagacacgtag

SEQ ID NO: 233339 - DNA, 138 bp, synthetic construct
  misc_feature 1..138: note = Description of Artificial Sequence: Synthetic coding sequence
  source 1..138: mol_type = other DNA
atggcaaaaaggaatgccgagaaggaattaacagaccggaattgggaccaagaagacgaggctgaagaggtgggaacattttccatggcatccgaagaggtcttgaagaatcgagctataaaaaaggcgaagcgctag

SEQ ID NO: 233340 - DNA, 657 bp, synthetic construct
  misc_feature 1..657: note = Description of Artificial Sequence: Synthetic coding sequence
  source 1..657: mol_type = other DNA
atggaagtggcgtctgagaaaaagactgaccccagttccctgggtgctacctccgccagcttcaactttgggaagaaggtggacagttctgtattagggtctttgagcagcgtacctcttactgggttttccttctcccctggcaactcttcattgtttggcaaggacactacccaaagcaaacctgtgtcttctccatttccaactaaaccacttgagggacaagccgaaggcgattcaggggaatgcaaaggcggagacgaggaggagaatgatgagccccctaaggtggtggtcaccgaggtaaaggaagaggacgccttttacagcaaaaaatgtaaactgttctacaaaaaggataacgagttcaaagagaagggcattgggaccttgcacctcaaaccaaccgccaatcagaaaactcaattgctggtgcgagccgatactaacctgggaaatatcttattgaatgtcttaatacctccaaacatgccttgcaccagaacaggtaaaaacaacgtgctgattgtctgtgttccaaatccccctatcgacgaaaaaaacgcaacaatgccagtgaccatgttgattcgcgtcaaaaccagtgaggatgcagacgagctgcacaaaatccttctggagaagaaggacgcctag

SEQ ID NO: 233341 - DNA, 231 bp, synthetic construct
  misc_feature 1..231: note = Description of Artificial Sequence: Synthetic coding sequence
  source 1..231: mol_type = other DNA
atggcaaagaggaatgcagagaaagagctgaccgaccgcaactgggatcaggaggatgaggccgaagaagtagggacatttagcatggccagtgaagaagtgctgaaaaatcgagctattaaaaaggcaaagcgacgtaatgtgggtttcgaagtcttgctactccaaatggccctccccccttggctgataaaattccaaattcctaaattgatgggcacggtttcatag

SEQ ID NO: 233342 - DNA, 15 bp, synthetic construct
  misc_feature 1..15: note = Description of Artificial Sequence: Synthetic coding sequence
  source 1..15: mol_type = other DNA
atggctaaaagatag

SEQ ID NO: 233343 - DNA, 33 bp, synthetic construct
  misc_feature 1..33: note = Description of Artificial Sequence: Synthetic coding sequence
  source 1..33: mol_type = other DNA
atggcaaaacgaaacgcggaaaaagagctatag

SEQ ID NO: 233344 - DNA, 1524 bp, synthetic construct
  misc_feature 1..1524: note = Description of Artificial Sequence: Synthetic coding sequence
  source 1..1524: mol_type = other DNA
atggccttcaactttggggctccttctggcacatccggaactgcagctgccaccgccgctcctgcaggcggatttgggggattcgggaccacaagtaccaccgcgggttccgccttcagtttcagtgccccaaccaacacaggcaccacagggctttttggcggaacgcagaataagggattcgggtttggcaccgggtttggcactaccacagggacgagtactggactggggaccggcttgggaaccggcctaggctttggcggatttaacactcagcagcaacagcagaccacgctcgggggacttttttcccagccaactcaggcccctactcagtccaatcagctgataaataccgcctctgcactgtcggcgccaacacttctcggcgacgaacgtgacgctatcctggctaagtggaaccaactacaggctttctggggaaccggtaagggctatttcaataacaacatcccgcctgtagagtttacccaggaaaatcctttttgccgcttcaaggctgtcgggtactcttgtatgcccagcaacaaggatgaggacggtctggtggtcctcgtgttcaataaaaaggaaaccgagatacgcagccagcaacagcagctggtggagagcctccacaaagttcttgggggaaatcagacgcttactgtcaacgtggaaggtaccaaaactcttcccgatgaccagaccgaagtggtgatctatgtggttgagcgatcgcccaacggaaccagtagacgcgtgccggctacaacgttgtacgctcacttcgagcaagctaacatcaagacacagctacagcagctgggcgttacgctgtctatgacacgcacagaactttcccccgctcagatcaagcagctgctgcagaaccccccagctggggtggatccaatcatttgggagcaagcaaaagtagataatcccgattctgagaaactcattcctgttcccatggttggcttcaaggagctgctccgacgcctgaaagtgcaggatcagatgaccaaacagcaccagactaggctggacatcatttctgaagacatctccgagcttcagaaaaatcagaccacgtctgtcgccaagatagctcagtacaaaagaaagctgatggatctctctcatcgcacactccaggtcctcatcaaacaggaaatccagaggaagtccgggtacgcaattcaggccgatgaagaacagctccgggtacagctcgataccatccagggagagctaaacgctccaacacaattcaagggcaggcttaacgaactcatgtctcaaattagaatgcagaaccacttcggcgcagtgcggagcgaggaaaggtattacattgatgccgacttgcttcgagagatcaaacagcacctgaaacagcagcaagaaggtttgagtcacctcataagtatcatcaaggatgacttagaggacattaaactcgtggagcacggactaaacgaaacaatacatatcagggggggtgtgttcagttag

SEQ ID NO: 233345 - DNA, 876 bp, synthetic construct
  misc_feature 1..876: note = Description of Artificial Sequence: Synthetic coding sequence
  source 1..876: mol_type = other DNA
atgcctagcaacaaggatgaagacggcctggtcgtcctcgtatttaataagaaggagaccgaaatccgctctcaacagcagcagctcgtcgagtcactccataaagtcctgggaggcaatcagacacttaccgtgaacgtggagggcaccaaaacattgcctgacgatcagacagaggttgtgatctatgtcgttgagaggtccccaaacggaacctcgagacgagttcctgcaacaactttatacgcgcattttgagcaggcgaatatcaaaacccagttgcagcaattgggcgtcacgctctccatgacaaggaccgagctttcacccgcacagatcaaacagcttctacagaaccccccagcgggtgtggatccgattatttgggaacaggcaaaagtagacaacccagacagcgagaagctcattcccgttcccatggtaggttttaaagaactactgagaaggctgaaggtccaggaccagatgaccaagcaacatcaaactcggttggacgttctcatcaaacaggaaatccaaaggaagtctggctatgcgattcaggccgacgaggagcagctgcgggtacagttagatacaatacagggagagctcaatgcccctacccagtttaaaggacgcctgaacgaattaatgtcacagattaggatgcaaaaccacttcggagccgtgcgaagcgaggagaggtattatatcgacgccgatctgctacgggaaattaaacagcacctgaaacaacagcaggaagggctctcacatttaattagtattataaaggatgacctggaggacattaagctcgtcgaacacgggctaaacgagactattcatattcggggaggtgtcttttcctag

SEQ ID NO: 233346 - DNA, 984 bp, synthetic construct
  misc_feature 1..984: note = Description of Artificial Sequence: Synthetic coding sequence
  source 1..984: mol_type = other DNA
atgccttccaataaggacgaggacggactggtcgtgctcgtgttcaataagaaggaaactgagatacgctcacaacagcagcagctggttgaaagcctgcataaagtgctcggcggaaaccagaccctaactgtgaacgtggagggcaccaaaactttacccgacgatcagacagaggtggtgatttacgtggttgagcggtctccgaacggtacttctcggagggtaccagccaccacgttatatgctcacttcgagcaagcaaacattaagacccagctgcagcaactgggtgtgacactttccatgacccgaaccgaactcagtcctgcgcaaataaaacagttactccagaatccgcctgcaggcgtcgacccaataatctgggagcaggctaaggtggacaatcctgattccgaaaaactgatcccagtgcctatggtcggattcaaggaacttctgcgcaggctgaaagtgcaagaccaaatgactaagcagcaccagacacgtctcgacatcattagcgaggacatcagcgagctgcagaagaatcagacaacctctgtggccaaaatcgcccagtacaaaagaaagctgatggacctgtcgcatagaactctccaagtgcttataaaacaggagatacagcggaagagtgggtatgctatccaagccgatgaagagcagctcagggtgcagctcgacacaatccagggcgaactcaacgctccaacccagttcaaaggtagacttaacgagctcatgtcacagattcggatgcagaatcactttggtgctgtccgctccgaagaacggtattacatcgacgcagacctgctgagagaaatcaagcagcatcttaagcagcagcaggagggactgtcccatctgataagcataattaaagatgacctggaagatatcaagctggtggaacatggactgaatgaaaccattcacattagggggggagtctttagctag

SEQ ID NO: 233347 - DNA, 1380 bp, synthetic construct
  misc_feature 1..1380: note = Description of Artificial Sequence: Synthetic coding sequence
  source 1..1380: mol_type = other DNA
atggccttcaactttggtgcgcctagcggtacctctggcactgcagctgctacagcggctccggcaggcggattcggcggtttcgggactacatctaccaccgccggatccgcctttagctttagcgctccgaccaacaccggcacgactgccttgggcggactgttctctcagcctactcaggcccctacccagtctaatcaacttattaatacagcttccgccctctccgcacctacgttgctgggcgacgaaagagacgcgattctggcaaagtggaatcaacttcaagccttttggggcacaggcaaagggtatttcaacaacaacatcccaccagttgaattcacacaagaaaacccattctgcagatttaaagctgtgggttatagctgtatgccttctaacaaggatgaagacggccttgtggtgctggtgtttaacaagaaggagaccgaaatcaggtcccagcagcagcaattggtcgagtctttgcacaaggttctgggcggtaaccagaccctgactgtcaatgtggaagggaccaagactctgccagacgaccagactgaagtggtgatctatgtggtggaacgcagtcctaatggaacgtcaagacgcgtgcccgctactacgctctacgctcactttgagcaagccaacatcaaaacccaactccaacagttgggggtcacgttgtcaatgactcggacagaactaagccccgctcagatcaagcagctgctgcaaaatccacccgctggggtcgacccaatcatttgggagcaggctaaggtcgacaatcctgattcagaaaaactgattcccgtgccaatggtcgggtttaaggagctgctgcggagattgaaggtacaggaccaaatgaccaagcagcatcagacccgacttgacataattagcgaagacattagcgagctgcaaaagaaccagacgacatccgttgctaagattgcccagtataagcgaaaactgatggacctgtctcaccgcacactccaggtgctcattaaacaggagattcagaggaagtcaggatacgctatccaggccgatgaagagcagttgagggtacagcttgacacaattcagggggaactaaatgctcctacccaatttaaaggcaggttgaacgaactgatgagtcagattaggatgcagaatcactttggcgctgtgaggtctgaggaacggtactatatcgatgccgacctattgagggagatcaagcagcacctgaagcagcagcaggagggcttgtcccatcttatatccattataaaagatgatctcgaagatattaagctggtggaacacgggctgaacgagaccatccacattaggggaggtgtcttctcatag

SEQ ID NO: 233348 - DNA, 582 bp, synthetic construct
  misc_feature 1..582: note = Description of Artificial Sequence: Synthetic coding sequence
  source 1..582: mol_type = other DNA
atgagcggtttcaactttggaggtaccggcgcacccactgggggattcaccttcggcacggccaagactgcaacaaccacacccgctactggatttagtttcagtacctcgggcaccggagggtttaatttcggtgccccttttcagccagccacctccacaccttcaacgggccttttttctctggctacccagacccctgccacacaaacaacaggcttcacttttgggactgctacgctcgcctctggagggacaggtttcagcctcggaatcggcgcatctaaacttaatttgtcaaacactgccgcaacaccagccatggcaaacccatctggttttgggctgggcagctccaatctgacgaatgcgattagctccacagttaccagtagccagggcactgcacctaccggctttgtatttggtccttcaacaactagcgtggcacctgcgactacctccgggggattctccttcactgggggatcaactgcccaacccagcggcttcaatatcgggagcgcagggaactcggcgcaacctaccgctcccgcaactttgccgttcactccagcttag

SEQ ID NO: 233349 - DNA, 1569 bp, synthetic construct
  misc_feature 1..1569: note = Description of Artificial Sequence: Synthetic coding sequence
  source 1..1569: mol_type = other DNA
atgtcgggttttaattttggcggaacaggagctcctacaggtgggttcaccttcggtacagcgaagaccgcgacaactacaccagccacaggctttagtttcagtacttctggtaccggagggtttaatttcggcgctcctttccagcccgcaaccagcacgcctagtactggactattttctctggctacacagacgcctgctactcagaccacaggcttcacatttggcacggcaacacttgcatcagggggtaccggattctcacttggtattggagccagcaaactcaatctctccaacactgccgcaacccctgctatggcaaacccctctggctttggattagggagcagcaacctgaccaacgcgattagtagcaccgtcacttcttctcagggaacagcaccaactgggttcgtgtttggtccgtccacaaccagcgttgctcctgctacaacttccggaggcttctccttcacagggggatcaaccgcacaacctagtgggtttaatattggcagcgcgggaaactctgcccagccaaccgcccctgcaaccctgccatttacccccgcaactcccgcagctaccacagcaggcgctactcaaccagctgcccctaccccaacagctaccatcacttctactggccctagcctgtttgcctccattgctacagctcctacaagtagcgctacaaccgggctatctctgtgcacacccgtgacaaccgcaggagccccaactgctggtacccagggcttttctctgaaggcgcctggggctgctagtggcacttccaccacaactagtaccgctgcaacagccaccgctaccacaacttcatcatcttcaaccacaggcttcgctctgaatttgaaaccactggcccctgccggaattccatccaacacggccgcagctgtcacagcacccccaggccctggcgcagctgccggagcagccgcatctagcgccatgacgtatgcacagttagagtctctcattaacaaatggtctcttgagctggaagatcaagagcggcatttcctgcagcaggccactcaagtcaacgcgtgggacagaacactgatcgaaaacggagagaagatcacttcgctccatcgcgaagtggaaaaggtcaaattggaccagaagagactggatcaggagcttgatttcatcctttctcagcagaaggaactggaagacctcctgtctccccttgaagagctcgtcaaagagcagagcgggacgatatatctgcagcacgctgacgaagaacgcgaaaagacatataagctcgccgaaaacattgacgctcagctgaagcggatggcccaagacttgaaggacattatcgaacacctgaacaccagcggcgctcctgctgacacttctgatcccctccagcagatctgtaagattctgaatgcccatatggactcccttcagtggattgatcagaactctgcgctgctgcagaggaaagtggaggaggtgacaaaagtctgcgaggggagaaggaaagaacaggaacgaagtttccggatcacttttgattag

SEQ ID NO: 233350 - DNA, 1569 bp, synthetic construct
  misc_feature 1..1569: note = Description of Artificial Sequence: Synthetic coding sequence
  source 1..1569: mol_type = other DNA
atgagcgggtttaacttcggaggcaccggtgctccaacgggcggttttacatttggcaccgccaagacggccaccacaacacctgccactggtttctcatttagcaccagtgggacaggcggattcaatttcggtgctcccttccagcctgccacaagcacaccctccacaggcttattcagcttggctacacagaccccagcaacacagactactggcttcacctttgggactgcaaccctcgcgtcaggcggaactgggttctcactcgggattggagcctccaagttgaacttgagcaataccgccgcaacacccgctatggccaacccgagtggattcggcctggggtccagtaacttaacaaacgcgatctcatcaaccgtaactagttcccaaggaactgccccaactggctttgtgtttgggccttctacaacgtcagtggctcccgcaacaacctcagggggattcagcttcacaggcggaagcaccgcccagccgtcagggttcaatattggatcagctggcaacagcgctcaacccactgccccagctactctaccctttacccccgcaaccccagcagcgaccacggctggggctacccaacctgccgctcctactcctactgcaacgattacaagcactggtccatcgttgtttgcatcaattgctacagctcccactagctcagctaccaccggcctcagcctgtgcacccctgtgaccacggccggtgcccctactgccggtacgcagggcttttccctgaaggcacctggcgctgcatccggtacttcaacaacgacatccacagcagctaccgcaaccgccaccacgacgagtagttcgtccaccaccggttttgccctcaacctaaaaccgctagcccctgccggaatcccttcaaatacggccgcagccgtgacagcccctccaggacctggcgctgccgctggggctgctgcttcctcagcgatgacatatgcccagctggagtcccttataaacaaatggagcctggaactagaggaccaggaaaggcactttctccagcaagcaactcaggtgaacgcatgggatcgaacactgattgaaaacggggagaaaatcacttctctgcaccgagaggtagaaaaggtcaaactagatcaaaaacgtctcgatcaagaactggacttcatactgtctcagcagaaggagctcgaggatctcttgagccctctcgaagagctcgtaaaggagcaaagcggcaccatttatttgcagcatgcagacgaagaaagagagaagacgtacaagctggccgaaaacatcgacgctcagttaaagagaatggcacaggatttaaaggatatcatcgagcatctgaacaccagcggggctccagcagacacatccgaccctttgcagcagatctgcaaaattcttaatgcccacatggattccctccagtggatagaccaaaattctgctctgttgcagcgaaaagtcgaagaggtgacgaaggtctgcgagggaaggcgaaaggagcaggaacgctctttccgaattacttttgactag

SEQ ID NO: 233351 - DNA, 1569 bp, synthetic construct
  misc_feature 1..1569: note = Description of Artificial Sequence: Synthetic coding sequence
  source 1..1569: mol_type = other DNA
atgtcaggcttcaactttggcggtacgggcgctcctactggcggtttcaccttcggcaccgccaaaacagccaccacgacccctgcaactgggttctcattcagtacatcgggaaccgggggttttaatttcggggcaccttttcagcctgcaacctccacaccatccacgggcctgttctctttagccacacagactcccgctacccagactacgggatttacctttgggaccgcaaccctcgctagcggcggaactggcttttctttaggaattggagccagcaagttaaatctgtccaacactgccgctactcccgctatggcaaatccgtccgggttcggacttggaagttctaatctgacgaacgccatttcctctactgtgactagttcccagggcacagcccctaccggctttgtctttggcccttccacgactagtgtcgctccggctactactagtggcggtttttctttcactggcggatcaaccgcccagccaagtggttttaatatcggctccgccggtaacagtgcgcagcccaccgctcctgccaccttacctttcacccctgccacgcctgctgcaaccactgctggtgccacccagcctgcggcacccaccccaaccgccacaatcacaagtaccggccctagcctctttgccagcatagccactgcaccaaccagctccgctactacaggactgtcgctgtgtacaccagtcacaacagctggtgccccaacagcagggactcaaggatttagcctgaaggctcctggcgcagcctccggcactagcacgacaaccagcacggctgccactgccaccgccacgaccacaagttcctcttctaccacagggttcgcactaaacttaaagccacttgctcctgccggaatcccaagcaacactgccgctgctgtgaccgccccaccgggtcctggcgctgccgcaggcgctgccgctagttcagccatgacctacgcccagttggagtccctgataaacaaatggtcgctggagctggaggaccaggagcggcacttcctgcagcaagcaactcaggttaacgcctgggaccgaactctcattgaaaatggcgagaagattactagtctccacagggaggtcgaaaaagtcaaactggatcagaagaggctggatcaagagctggattttattctgtctcaacagaaggagctggaggaccttctcagccctctcgaggaactggttaaggagcagagcggcacgatttacctgcagcacgccgacgaggagcgcgaaaaaacttataaactcgcggagaacattgacgcacaactcaagcgcatggcccaggatctaaaggacatcattgaacaccttaacacatcaggtgctcctgccgatacgtctgaccccttgcagcaaatctgtaagatccttaatgcgcacatggactccctgcaatggatcgaccagaactctgcgctcttgcagcgcaaggtcgaagaagtgactaaagtgtgcgaagggagacgaaaggagcaggagagaagcttcagaatcacctttgactag

SEQ ID NO: 233352 - DNA, 1971 bp, synthetic construct
  misc_feature 1..1971: note = Description of Artificial Sequence: Synthetic coding sequence
  source 1..1971: mol_type = other DNA
atggaggaactggacggtgaacctacagtgactttaatcccgggagttaacagcaagaaaaatcaaatgtatttcgactggggaccaggggagatgctcgtgtgtgaaacatcgttcaacaaaaaagagaaatccgaaatggtcccctcttgcccctttatttacattatcagaaaggatgtggacgtctacagccaaattctgcgtaaattgtttaatgagagccacggcatattccttggtctgcagaggatcgacgaggaacttactgggaaaagtcggaagtcccagcttgttcgagtatctaaaaattacagaagtgttatccgcgcatgtatggaggaaatgcaccaggtggcgatcgctgccaaggacccagccaatggcagacaattcagcagtcaggtgtcgattctcagtgccatggagttaatttggaacctgtgcgaaatcctttttatcgaggtagcccctgctggcccattacttcttcaccttctagactgggtccgcctgcatgtgtgtgaagtcgattccctaagcgcggatgtactggggagcgagaaccccagcaagcacgacagtttctggaacttggtgaccatactggtactccagggcaggctggatgaggccagacagatgctttctaaagaggcagatgcaagtcctgcttctgcgggaatttgtcggatcatgggagatctgatgaggaccatgcctatactgtcgcctggtaacacacagaccctcaccgagcttgagctgaaatggcaacattggcatgaagaatgcgagcggtatctgcaggactccacttttgctacttcaccccacctggagtccctactcaaaatcatgcttggcgacgaggcagccctcctggagcaaaaggagctactgagtaactggtaccattttctggttaccagattgctatactctaatccgaccgtgaaacccattgatctgcactactacgcccaatcaagcttagatctgttcctaggcggagaatccagtccagagccactggataatattttactcgctgcgttcgagtttgacatacaccaagtcatcaaagagtgcagtatcgctctgtccaactggtggtttgtggctcacctgactgacctgcttgatcactgtaaactcctccaatcgcacaatctgtactttggatctaatatgagggagttcctgctgctggagtacgcttctggcttgttcgcacatccgagcttatggcaactaggagtggactacttcgattattgcccagagcttggcagggtctcacttgaactacacattgagaggatccccctcaacactgagcagaaggccttgaaggtgcttcggatttgcgagcagcggcaaatgaccgaacaagtgagatcaatctgtaagatcctggcaatgaaagcggtgcgcaataataggctgggttctgctctgtcttggtctatccgggctaaagacgccgcattcgctacgttggtgtctgaccggtttcttagagactattgtgaaaggggatgtttttctgacttagaccttatcgataatctgggaccagccatgatgctttccgatcgactgacttttttagggaagtatagggaatttcatcgcatgtacggtgagaaaagattcgccgacgctgcgtcactcctactctccctgatgactagtaggatcgcacccaggtctttttggatgacactgctgactgacgcactaccccttctggagcaaaagcaggtcatcttctctgctgagcagacttatgaactcatgcgatgtctggaagatcttacctcgaggagacccgtacacggtgaatccgacactgagcagcttcaggatgatgatatcgaaactactaaagtggagatgttacgcctgtccctcgctagaaacctcgccagagctatcataagagaggggagcctggaaggcagctag

SEQ ID NO: 233353 - DNA, 1389 bp, synthetic construct
  misc_feature 1..1389: note = Description of Artificial Sequence: Synthetic coding sequence
  source 1..1389: mol_type = other DNA
atggccgcttcctccgctgcaaggagccccttctgtcaacagtggtccagcagcggcacctgcgtgagattctttttgctcaaatggccccaggtcaccatcctggttctgcagggccgtctcgacgaagcccgacagatgctgtcaaaggaggccgacgcttcccctgctagcgctggcatctgtcggataatgggcgacctgatgcgcaccatgcccattctttcacctggtaatacacagactcttaccgaactcgagctcaagtggcagcattggcacgaggaatgcgagcgctaccttcaggattctacttttgctaccagcccacatctggagagcttgctgaagatcatgttaggtgacgaagccgcactactcgaacagaaggaactgctgtcgaattggtaccatttcctggtgaccaggctgctgtacagtaatccgaccgtaaagcctattgatctgcactattacgcgcagtcctccctagatttattcttaggcggtgaatcctctccggagccattggacaatatcctcttagccgcatttgagtttgatatccatcaggtgataaaagagtgttctattgccctgtctaactggtggtttgtagctcatctgactgatttactagatcactgtaaacttctacaatctcacaatctgtatttcggatcaaacatgagagaatttttgctgttagaatatgcttccggcctgtttgctcatcccagcctctggcagctgggcgtggattactttgactattgtccagaattgggccgtgtgtcgctggagctgcacattgaacgtattcctctgaacaccgaacagaaggctctcaaggttctgcgcatctgcgaacagagacagatgactgagcaagtccgaagcatctgtaaaatactggccatgaaagcggttcgcaacaacaggctcggtagcgcactgagttggtcgatacgggcaaaagacgctgctttcgccaccctcgtgagtgaccgatttcttcgtgactattgtgagcgcggatgtttctcggacctagatctcattgataacttaggccctgccatgatgctatcagatcgcctcacctttctgggtaagtatcgcgagtttcaccgcatgtatggcgaaaagcgcttcgcagacgccgcatctttattgctatccctgatgacctctaggattgctccccgttctttctggatgacccttcttaccgacgccctcccactcctcgaacagaaacaggttaaggtcgcggctgcagtcgtgttttttgcttgtcagtctctgctggagctttcctgcatcgctgtggctgacgtgagggtgtcaagtttcgtagtgttgccagtgagagtgtactctccctag

SEQ ID NO: 233354 - DNA, 975 bp, synthetic construct
  misc_feature 1..975: note = Description of Artificial Sequence: Synthetic coding sequence
  source 1..975: mol_type = other DNA
atggtgccaagctgtccattcatttatatcatccggaaggacgtcgacgtttactctcaaatccttcgcaaactatttaacgaatctcatggcatctttttgggactgcaacgaatagatgaggagctgacagggaagagccgtaagagtcagctggtcagagtcagcaaaaattatcgctcggtcataagggcctgtatggaagaaatgcaccaagttgccattgccgctaaggaccccgctaatggacggcaattctctagccaagtgagcatattatctgcgatggaattgatctggaatctttgtgagatcctgtttatcgaggtggcccctgccggtcctctgctcctgcacctccttgattgggttcggctgcatgtgtgtgaggtggactccctgtcggcagacgtgctggggagtgagaacccctccaagcacgactccttttggaaccttgtcaccatcctcgtgctgcaaggcaggttggacgaagctaggcagatgctgtctaaagaagccgatgcttcccctgccagtgccggaatttgccgcattatgggagatttgatgcgtacaatgccaatcttgagtccaggcaacacccagacattgactgaactggagctcaagtggcagcattggcacgaggaatgtgagaggtacctgcaggattcgacgtttgccacttccccccaccttgaatcactcctcaagattatgcttggagatgaagccgctttgttggagcagaaggaattgctatccaactggtatcactttcttgtaacgcggcttctgtactcaaatcccacagtgaagccgattgatctccactactacgcccagagttccctggacctattcctcggaggggaaagctctccagaacccctagacaatattttgctggccgcttttgaattcgatatccaccaggtaatcaaggaatgcagggatgtacatctgaagtag

SEQ ID NO: 233355 - DNA, 780 bp, synthetic construct
  misc_feature 1..780: note = Description of Artificial Sequence: Synthetic coding sequence
  source 1..780: mol_type = other DNA
atgcgggagtttttgctgttggagtacgccagcggactcttcgcccacccatccctttggcagttgggggtggactattttgattactgtcccgaactgggacgtgtgtctctggagctacacatcgaacggattccgctcaacacagaacagaaagcactgaaagtgctaagaatctgtgagcagagacagatgactgaacaggtccgaagtatctgcaaaatccttgcaatgaaagctgtccgtaacaaccggctgggtagtgcactgtcctggagcattcgggcaaaagacgcagcattcgcaacgctggtatccgataggtttttacgggactattgcgagcggggttgcttcagcgatctggatctcatcgataatctgggtccggcaatgatgttatccgacaggctcactttcctcggcaagtatcgcgagtttcaccggatgtatggagagaagagatttgcagacgccgcttctctcctcctttcactgatgaccagccggattgcacctagaagcttctggatgacactcctcacagacgctctgcctctcctggaacagaaacaggtgattttttcagctgaacaaacatatgaactcatgcggtgtttggaagacctcaccagccggagacctgtccatggtgagagcgatacagagcagcttcaggatgacgacatcgagacgaccaaggttgaaatgctccggctgtctcttgcaagaaatctggctcgggcaattatcagagaaggttccctggaaggctcatag

SEQ ID NO: 233356 - DNA, 1833 bp, synthetic construct
  misc_feature 1..1833: note = Description of Artificial Sequence: Synthetic coding sequence
  source 1..1833: mol_type = other DNA
atggtccctagctgccctttcatctatattatccggaaggacgtggacgtttacagtcaaattctgagaaagctgtttaacgaaagtcacggcattttcctgggactgcagcggatcgacgaagaactcactgggaaaagcaggaagtctcagcttgtcagggtctccaagaactatcggtcggtgatacgcgcttgtatggaagaaatgcaccaggtggcaatcgcagctaaagaccctgctaatggtaggcaattcagcagtcaggtgtcaatcctctcagctatggaacttatttggaatctgtgcgagatcttattcatcgaagttgctcccgctggcccacttctactacacctgttggattgggtgaggcttcatgtttgcgaagtcgactctcttagtgcggacgtacttggctccgagaatccttcgaaacacgattcattctggaaccttgtgacaatcctggtgctgcagggccgtttggatgaggcacggcaaatgttgtcgaaggaggccgatgcttctccagctagcgccggaatttgccgaattatgggagacctcatgcgtaccatgcctatcttatccccgggtaacactcagacactgacagaactcgagctcaagtggcagcattggcatgaagagtgtgaacggtatctacaggatagcactttcgctacatcaccccacttggagagcctgctgaaaatcatgctgggcgatgaggccgctctactggaacagaaagaactgctgtccaactggtaccattttctcgttacacgcttgctgtacagcaacccaacagtcaagcctattgacttgcattactatgcccaaagttccctcgacttgttcctgggcggagagtcctcccccgagcccctagataacattctgctggccgcatttgaattcgatatacaccaggtgatcaaagaatgcagtatcgctctcagtaattggtggttcgtggcgcacttaacagatctgctggatcactgcaagctgcttcagtcccataatctctactttggctctaacatgcgggaattccttcttctggagtatgcctctgggctgttcgctcatccaagcctctggcagctaggagtggattatttcgactattgccctgagctcggtcgggtcagtctggaactccacatcgagcgtattcccctgaatacagaacaaaaagccctcaaagttctcaggatatgtgagcagcggcagatgaccgagcaggtcagatctatctgcaagatcctggccatgaaggctgtcaggaataatagactaggcagtgctctgtcatggagtatccgtgctaaggacgcggctttcgcaactttggtgtccgacaggttcctgcgggactactgtgaaagaggctgtttcagcgacctggatctgatcgacaatctgggacctgcaatgatgctgagcgaccgactgacgttcctgggaaaataccgcgagtttcacaggatgtacggcgagaaaagattcgcggatgcagcctcacttttattgtcactgatgacaagccggattgcccctaggtctttttggatgacactgcttactgatgcactacctcttctcgagcaaaaacaggtaattttttcagctgagcagacctacgagctcatgcggtgcctcgaagaccttaccagcagacgcccagtgcatggcgaaagtgacactgagcagctgcaggacgatgacattgaaactaccaaagtggagatgttgagacttagtctagctaggaacctggcacgggctatcatccgagaagggagccttgagggaagttag

SEQ ID NO: 233357 - DNA, 846 bp, synthetic construct
  misc_feature 1..846: note = Description of Artificial Sequence: Synthetic coding sequence
  source 1..846: mol_type = other DNA
atgaagctggctgcgatgattaagaagatgtgcccaagtgacagcgaactaagtatcccagctaaaaattgttacaggatggtgatcttggggtcttctaaagtggggaagacggccattgtctcccgcttccttacaggcaggttcgaagacgcgtatacccctaccattgaagatttccaccggaaattctactcaatcaggggcgaggtctaccagcttgacatactcgatacttcagggaaccatcccttcccagccatgagacgtctgagcatattgacgggcgatgtgtttattttggttttttcgttggacaacagagacagctttgaagaggtgcagcgcctgaggcagcagatactggacacaaaatcctgccttaagaacaagaccaaggagaacgtcgacgtccccctggtgatctgtggaaataaaggcgatagagacttctacagggaagtggatcagagagagattgagcaacttgtaggggacgatccccagagatgtgcatatttcgagatttctgctaagaagaacagcagcctcgaccagatgttcagagcactgtttgctatggcaaagctccccagcgagatgtctccggaccttcaccgaaaagtctccgttcagtactgcgacgtacttcacaaaaaggccttacggaataagaagctcctcagggcaggctcaggcggaggcggtggagatcccggtgatgccttcggcatcgtagccccttttgcgaggagaccatccgtgcattctgacttaatgtatataagggagaaggctagcgctggtagccaggctaaggacaaggagcgatgcgtgattagctag

SEQ ID NO: 233358 - DNA, 1881 bp, synthetic construct
  misc_feature 1..1881: note = Description of Artificial Sequence: Synthetic coding sequence
  source 1..1881: mol_type = other DNA
atggttttggagctgccgaagcgttggggtaaaaattctgagtttgagggcggtaagtctacagttaactgctctaccaccccagtagcagaacgtttcttcaccagctcgacatcccttaccttaaagcacgccgcatggtatcccagcgagatcctcgaccctcacgtggtgctcctgacatctgataatgtgatcagaatctattcactcagggagccacagacaccaacaaacgtaatcattcttagcgaagctgaggaggagtctctggttcttaataagggaagggcctacaccgcctcactcggcgagactgcagttgcctttgattttggccctctcgcagccgtgcctaagacccttttcggtcagaatggtaaggatgaggtggtggcttaccctctttatatcttatatgaaaatggggagacctttcttacatacatatcactgctgcattcccccggaaacataggaaaactacttggcccactgccaatgcatcctgccgcagaggacaactatggctatgacgcatgcgctgttttgtgtctgccgtgtgttccaaacattctggtcattgccactgagagtggcatgctttaccattgtgtggtcctcgagggcgaagaggaagatgaccatacatcagagaagtcttgggatagtcgcatcgacctgattcctagcctttatgtcttcgaatgcgtggagctagagctggcactgaagctggcttcgggtgaagacgatcctttcgactcagacttttcttgccctgtaaagctgcacagagatccaaagtgcccaagccgctatcactgcacacatgaagcaggagtgcactcagtgggacttacctggatccataaattgcacaaattcctaggaagcgatgaggaggacaaggatagcctgcaggaactgtctaccgaacagaagtgcttcgttgagcacattctctgcacaaaacccctgccttgtcgtcagcccgcacctatccgtggcttctggattgtaccagacatcttaggaccaaccatgatctgcattaccagcacctatgagtgtctgatttggcccctactgagcaccgtccacccagccagtccccctctcctctgtacaagagaggatgtggaagttgcagagagtcctctgcgagttttggcagagacacctgattccttcgaaaaacacattcgttccatcctgcagagaagcgtggccaaccctgccttcctgaattgcttcacccaactccgaaagattaaggttgaaactctttttttgcgggcttctgaaaaggatatagcgcctccccctgaggaatgtcttcagctgctgagcagggccacccaggtgtttcgagaacagtacattcttaaacaggacttggcaaaggaagagatacagagaagagtcaagctcttgtgcgaccagaagaagaagcagctggaggatctaagctattgccgcgaggagcggaagagtctcagggaaatggccgagaggctcgccgataaatacgaagaggccaaagaaaagcaggaggacataatgaacagaatgaaaaagctgctgcactccttccactccgagctccccgtcctttccgattctgaaagggacatgaaaaaggaattgcagctgattccggaccagctgcgccacctcgggaacgccattaagcaggtgactatgaagaaggattaccagcagcagaagatggagaaggtgctcagcctgcctaaacctacaattattctgagtgcgtatcagcgcaagtgcattcagagtattttgaaggaggaaggggaacacattagggagatggtcaaacagattaacgacataagaaaccatgttaatttttag

SEQ ID NO: 233359 - DNA, 2226 bp, synthetic construct
  misc_feature 1..2226: note = Description of Artificial Sequence: Synthetic coding sequence
  source 1..2226: mol_type = other DNA
atggccgctgctgaaggcccagtgggagatggtgagttatggcagacctggttacccaaccacgtagtttttctacgcttaagggaaggcctgaagaatcagtcccccactgaggctgagaagccagcttcctcctcgcttcctagcagtccaccaccccagcttctcacccggaacgtcgtatttggtctcggaggagaattgtttttatgggacggcgaagattcttcattcctcgtagtgagactgcggggaccctccggcggaggggaagagccagccctatcacagtaccaacgtctgttatgcatcaatcccccactatttgagatatatcaggtcctcctcagtccaacgcagcaccatgtggctctgattgggatcaagggcctcatggtgctggagttacccaagaggtgggggaagaacagcgaattcgagggaggtaaatctacagtgaactgcagcactacccccgttgccgaacgcttttttacttcatcaaccagcctcactctgaagcatgcagcttggtacccatcagagatcctggaccctcacgtggtgctgctgacctcggacaacgtgattcgaatttatagcttacgggagccgcagacaccaacaaacgtcattatcctgtctgaggctgaagaggaatcattggtcttgaacaaaggacgggcatacacggcaagcctcggtgagactgctgttgcgtttgatttcggacctctcgccgctgtacctaaaacgctttttgggcaaaatggaaaagacgaggtggtggcatatccactgtatatcctttatgagaatggagagacatttctgacttacatcagtctcctgcactcaccgggaaacatcgggaaactgcttgggcctttgccgatgcacccagcagccgaagacaactacgggtacgacgcctgtgcggtcctatgtcttccatgtgtgccaaacatcctggtcatcgctacagaatcaggcatgctctaccattgtgtggtactcgagggtgaagaggaggatgaccacacgagcgagaagagttgggatagtcggatcgatctgataccaagcctctacgtgttcgagtgcgtggaactcgagctggcacttaagcttgctagtggggaagacgacccctttgattctgatttttcttgtcccgtgaagcttcacagagatcctaaatgcccaagccggtaccattgtactcacgaagccggtgtgcatagtgttgggctcacctggatccacaaactccataaattcctcggatccgatgaggaagataaggactccctccaggagctaagcacagaacagaagtgcttcgtagaacatattctgtgtacgaagccactaccttgtcgccagcctgctcccattaggggtttctggatcgtccccgatatattaggtccaacaatgatctgcattacaagcacatatgagtgcctgatttggccacttctgtcaacagtgcaccccgcttccccgccactgctttgcactagggaggatgtagaggtggccgagtctccccttcgggtgctggcagagaccccagattccttcgagaagcacattcgcagtattctgcaacgatctgtagcaaatccagcttttctgaaggcatccgaaaaagatatagccccacctccggaggagtgtctgcagctgctaagccgagctacacaggtcttcagagaacagtatattctgaagcaggaccttgctaaggaggagatacagcgaagggtgaagctcctgtgtgaccagaagaagaagcagctggaggacctgtcctactgtcgggaagagaggaagagcctgagggagatggccgaacgtctggccgacaaatatgaagaggctaaagagaagcaggaagatatcatgaatagaatgaaaaaacttttacactcttttcatagtgagctgcctgtgttgagtgactccgaaagggacatgaagaaagagttgcagttgattccagaccagctgaggcacctggggaatgcaatcaaacaggttacaatgaagaaagactaccaacagcagaaaatggaaaaggttctctccctgccgaaacctaccattattctcagcgcctatcagcgcaaatgcatccagtccattctgaaggaggagggcgaacatatccgggaaatggtcaagcagattaacgatatcagaaatcacgttaacttctag

SEQ ID NO: 233360 - DNA, 2460 bp, synthetic construct
  misc_feature 1..2460: note = Description of Artificial Sequence: Synthetic coding sequence
  source 1..2460: mol_type = other DNA
atggatacagaaggcttcggggagcttctccaacaggctgagcagctggctgccgagactgagggcatcagtgagttacctcacgttgagagaaatctgcaagaaattcagcaggcgggtgaacgattaagaagccggactctgaccagaacatcccaggaaaccgctgatgtcaaagcctcagttctactaggcagccggggactcgacatatcccacatcagtcagagactggagagtctctctgccgcaacaacgttcgaaccccttgagcccgtcaaagataccgatatccagggctttctgaagaatgaaaaggacaatgccctactgtcagccattgaagagagccgtaagcgaacattcggaatggctgaggagtaccatagagaatctatgctggttgagtgggaacaggtcaaacagaggatccttcacaccctactggctagtggggaggatgccctcgactttacacaagagtctgaaccatcttatatcagtgacgtgggcccacctggacgctcatccctggacaacatcgagatggcatatgctaggcagatctatatctataatgagaagatcgtgaatggccacctgcagcctaacttggttgacctgtgtgctagcgttgcggagctggacgataagtccattagtgatatgtggactatggtaaaacagatgaccgacgtgttgttgacaccagccactgatgccctcaagaatcgttccagcgtcgaggtgagaatggagttcgtgaggcaggccttggcatacctcgaacagtcctataaaaactatacactggtaaccgttttcggcaacttgcaccaggctcaattagggggtgtgcccggaacctatcagcttgtgaggtccttcctaaacattaaactccccgcacctcttccgggactccaggacggggaggtggagggtcacccggtgtgggccctgatctactactgcatgaggtgtggtgacctgctggctgcatcacaggtagtgaatagagcgcagcaccagctgggagagttcaaaacctggttccaggaatacatgaattccaaggaccgacgcctgtcccctgccacagagaacaaactacggttgcattaccggcgtgccttgcgcaataatacagacccttacaaacgggctgtatattgtattataggtaggtgtgatgtaactgacaaccagtccgaagtcgcagacaaaaccgaggactatttgtggcttaagttgaatcaagtgtgttttgacgacgatggcactagctctccccaggataggctgaccttgtctcaattccaaaagcagctgcttgaggattatggcgaaagtcactttacggtgaatcagcagccttttctgtacttccaggttctctttctcacagcccaattcgaggccgctgtcgccttcctcttccgcatggaacgactgaggtgccatgccgtgcacgtagccctcgttctgttcgaacttaagctcctgttgaagtcgtctgggcaatccgcccaactcctcagccatgaacccggtgatccaccatgcctgagacggctgaattttgtccgcctgttgatgctgtacactcgtaaattcgagtccaccgaccctagggaggcacttcagtatttttattttcttagagatgaaaaagattcccagggcgaaaatatgttcttgcgttgcgtctcagagctggtgattgagtcccgcgagtttgacatgatcctcggtaagttggaaaatgacggatcgaggaaacctggcgttatcgacaagttcacatccgatactaagcccatcattaacaaagtggcgtcagtagccgaaaataaaggccttttcgaagaggccgctaagctgtacgacctggccaaaaacgccgacaaagtgttggaactaatgaataagctcctcagcccagtggtgccccagattagcgccccacagtccaataaggagaggcttaagaatatggccctgagcatagccgaaagataccgggctcagggtatcagcgcaaacaagttcgtggatagtacattctatttgttgcttgatcttatcacattcttcgacgagtaccactctggccacattgacagagcctttgacatcattgagcggcttaagttagtgcctttgaatcaggagtccgtagaagagagggttgctgcattcaggaatttctccgacgaaatccggcataatctgtcagaggtgctgctcgcaaccatgaatatcctgttcacccagtttaagcggctgaaaggcacctcgccctcctcttcctcacggccacagagggtgatcgaagaccgtgacagccagctaaggtcccaggctcgcacacttataactttcgccggaatgatcccctatcgtacatctggtgatactaacgcacgacttgtccagatggaggtgcttatgaattag

SEQ ID NO: 233361 - DNA, 2091 bp, synthetic construct
  misc_feature 1..2091: note = Description of Artificial Sequence: Synthetic coding sequence
  source 1..2091: mol_type = other DNA
atggctgaggagtaccaccgcgagtctatgcttgtggagtgggagcaggttaaacaacgaatcctgcacactctgttagcgtccggcgaagatgcgctggatttcactcaagaaagtgaacccagctacatcagcgacgtcggccctccgggtagatccagtctagataacattgaaatggcctacgcccgacagatctatatctataacgaaaagattgtgaacggccacctgcagcctaacctggtggacctctgtgctagtgttgcggagctggatgacaagtctatctcagatatgtggaccatggtcaagcagatgactgacgtcctgctgacaccagctactgatgcactcaaaaaccgttctagcgtcgaggtgcggatggagttcgtgcggcaagcgttggcatacctagaacagagttacaaaaactatacactcgtgacagtctttggcaacctgcatcaagcccagctgggaggtgtcccgggtacgtatcagttggtgcgctcttttctcaatattaaattgccagctccattgcctggacttcaggacggcgaggttgaaggacacccggtatgggcactgatatactactgcatgagatgtggagatttgctcgccgctagtcaggttgtgaacagagcacagcaccagttgggcgagttcaagacatggttccaggaatatatgaactccaaagatagaagactaagcccagcaacggaaaacaaactgcgcctccactacagacgggctttgcggaacaacactgacccctacaaacgagctgtgtactgtataattggccgttgtgatgtcacagataaccaaagcgaggtggcagacaaaaccgaggattacctatggttaaagctcaaccaagtctgcttcgacgacgatgggacttcttctcctcaggacaggctcacactgtcccagtttcaaaagcagttgctggaagattacggggaaagccacttcacagtcaatcaacaacctttcctgtactttcaggtcctattcctcacagcccagttcgaagctgccgtggccttcctttttcgaatggaaagactgagatgtcacgcagtgcatgtagcattagtactttttgagttaaaactactcctcaaatctagtggccagtcggcccagctcttatctcacgaacccggtgaccccccttgcctgcggaggctgaacttcgtacggctcctgatgctgtacaccagaaagtttgagtctaccgacccacgtgaggccctccagtacttttactttctgagagacgaaaaagattcacagggggagaacatgttcctaaggtgtgtctccgaactcgtaattgagagtcgggaattcgacatgatactgggcaaactcgaaaatgacggctccagaaaaccaggcgtaatcgacaaattcaccagcgacactaagcccattatcaataaagtcgcgagcgtcgccgaaaataagggcttgttcgaggaggcggctaagttgtatgacctcgccaagaatgcagacaaggtgttggagctgatgaacaagttactgagtcccgtcgtgcctcaaatttcagcccctcagtccaataaagagcggctcaagaatatggcactgtctatcgccgagaggtacagagctcagggcatatcggcaaataaatttgtagatagtacattttacctcctcctggacttgattactttcttcgacgaatatcactcgggccacatcgatcgggcattcgacattattgagcggctcaaactcgtgcccctgaatcaagagtcagttgaagagcgcgttgcagccttccggaacttctccgacgagatccgacataatttgtctgaagtcttattagccacaatgaatattctgtttacacagttcaagaggctcaaggggacctcgcccagcagctcctcccgtccccaaagagtaatcgaggacagggattcgcagttacgtagccaggcccgtactttaatcacattcgcagggatgatcccataccgaaccagtggcgacacaaacgctcggctggtgcagatggaggtcctgatgaactag

SEQ ID NO: 233362 - DNA, 2091 bp, synthetic construct
  misc_feature 1..2091: note = Description of Artificial Sequence: Synthetic coding sequence
  source 1..2091: mol_type = other DNA
atggcagaagagtatcacagagagtccatgcttgttgagtgggagcaggtaaaacagcgcatcctgcacactctgctcgcttccggcgaggacgccctcgacttcacccaggaatccgagccctcttacattagtgacgtgggccctcccggacgatcttctcttgacaatattgagatggcatatgctcgacagatatatatttataacgaaaagatcgtaaatggccacctgcaacccaatctcgtggatctgtgtgcctcggtcgctgaactggatgataaaagcatttccgacatgtggacaatggtgaaacagatgacggatgtgctcctcacacctgctaccgacgccctgaagaatagaagctcagttgaggttcgtatggagtttgtacgacaggctctggcttatcttgagcaatcctacaagaattataccctcgtgactgtcttcggaaaccttcaccaggcccagttggggggagtgccgggaacttaccagctggtgagatcatttctgaacatcaaactcccagcccctctgcccggattacaggacggcgaagtggaaggacatccagtctgggcccttatctactattgcatgcgctgtggagacctgctggcggcttcccaagttgtgaaccgggctcagcaccagctcggtgagtttaagacttggtttcaggagtacatgaatagcaaggatcggaggctcagccccgctaccgagaataagttgagactccactaccggagagctttaagaaataacactgacccttataagagagccgtgtattgtatcattggtcggtgcgatgtgaccgataatcagagcgaagttgcagataagacggaagactacttatggctaaaactgaatcaggtgtgcttcgacgacgacggaacttcatcccctcaggacaggctgacactttcccagttccaaaaacagttgctggaagactacggggaaagtcacttcacagtgaatcagcagccgttcttgtattttcaagtgcttttcctgaccgcccaattcgaagccgcagtggcgttcctatttaggatggaacgtctgcgttgccacgccgtacatgtggcgctggtgctgttcgaactcaaacttctgcttaagagctccgggcagtccgcacaattgctgtcccacgaaccaggggaccctccgtgtctcaggagattgaatttcgtgaggctgcttatgttgtatactaggaaatttgaatcgacggatcctagagaagcgttgcaatacttttattttctcagagacgagaaagattcccagggcgagaacatgttcttaagatgcgtctccgagctggtgatcgaaagtcgcgagttcgatatgatcctgggcaaattagagaacgacggctcccggaagccaggggtgatcgataagttcacctccgacacaaagccgattattaacaaggtggcttcagttgccgaaaacaaaggtctgtttgaggaggcggcaaagttgtacgatctggctaaaaacgccgacaaggtgttagaactcatgaacaaattactttcacccgtggtcccacaaatctcagcacctcaaagtaacaaagaacggcttaaaaatatggctctgagcatcgctgaaagatatcgagctcagggcatctcggccaacaagttcgtggacagcacattttacctcttgcttgatctgatcaccttcttcgatgagtaccatagtggccatatcgatcgagctttcgatatcatcgaaaggttgaaactggtgcctctaaaccaggaatctgttgaagagcgagttgctgcattccgcaacttctctgacgaaattaggcataatctatctgaggtgctgttggcaactatgaatatccttttcacccagttcaaacgcctgaaaggcacttctccttctagctcctcaaggccacagcgggtgattgaggatcgagactctcagttgaggtcacaggcaagaaccctgattacttttgctggcatgatcccttacagaacttcaggcgatacaaatgccagactggtccagatggaagttcttatgaactag

SEQ ID NO: 233363 - DNA, 5402 bp, synthetic construct
  misc_feature 1..5402: note = Description of Artificial Sequence: Synthetic coding sequence
  source 1..5402: mol_type = other DNA
atgttcaacaagtctttcggaaccccgtttggtggcggaacgggcggatttggtaccacatcaaccttcggacaaaatacaggcttcgggaccacttctggtggagccttcggcacatccgcattcgggtccagcaataataccggagggttgttcggaaactcccagaccaaacccggaggattatttggtacaagctcgttctcgcagccagctacctctacctcgacgggatttggtttcggcaccagtactggcactgcaaacacactgtttggcactgcttcaactgggacgagcctcttttcctctcagaacaacgcctttgcgcagaacaagcccaccggttttggcaattttggtactagcacctctagcggcggattgtttggaaccacaaatacaacaagtaaccctttcggctccacctctggctcactttttggtccatctagcttcactgcagcaccaacagggacaaccatcaagttcaaccctcctacaggaactgacaccatggtcaaggccggagtaagcaccaacataagcacaaagcatcagtgcataaccgcgatgaaggagtacgagtccaagtctttggaggaactgaggctggaggattatcaagcaaaccgtaaaggcccacaaaaccaagtcggcgcagggaccaccactgggttgttcggctcttccccggctactagcagtgccactggtctgttcagcagctccacaaccaacagtggcttcgcttacggccagaacaagacggcttttggaacctctaccacaggcttcggcacgaacccaggcggactgtttggccaacagaaccagcagaccaccagtctgttcagcaaaccatttggccaggcaacaaccactcagaataccggctttagttttggcaacactagcaccatcggtcagccctcaactaataccatgggcctgttcggggtgacacaggcaagccagccaggaggcctgtttggcaccgccacaaatacgtcaactgggactgctttcgggactggaactggactgtttggccagacaaatactgggttcggcgcagtcggttctaccctcttcggaaacaataagctgacgactttcgggtcttccaccacatccgcccctagtttcggcaccacgtccggaggtctgttcggctttggaacaaacacctcgggtaactccatcttcggatccaaacccgctcctggtactcttggcaccggcctaggagcaggcttcgggactgccctgggcgcaggacaggccagcctctttggcaataatcagcctaaaatcgggggtccactgggcacaggcgcttttggcgcaccaggtttcaacactacaaccgccacgctaggctttggagcaccacaagcacccgtcgctctgaccgacccaaacgcctcagcagcccagcaagccgtattgcagcaacacattaactctctaacctacagtccatttggtgattcccctctgttccggaatcctatgtccgatcctaagaaaaaggaagaaaggctaaagccaacaaatcctgctgcccagaaagctttgacaactccaacacattataaactcactccacgtcctgccacccgcgtgcgccctaaagctttacagactactggtacggctaaatcccacttatttgatgggttggacgacgacgagccgtctctggccaatggcgcttttatgcccaaaaaatctatcaaaaagctcgtgctgaagaacctgaataactctaatctgttctcacctgtaaaccgggatagcgaaaatctggcctctccctccgagtacccggaaaacggggaacgcttttcattcctgtcaaagcccgtcgatgaaaaccatcagcaggacggggatgaggattctttagtcagccacttttacacaaacccaattgccaagccgattccccaaacccccgaatctgccggaaataaacatagcaattcaaactctgtggatgataccatcgttgccctaaatatgagagccgctctccgaaatgggctagaggggagctcggaagagacctcatttcatgacgagagccttcaagacgaccgggaggagattgaaaataacagttaccatatgcatcctgccggaataattctgaccaaagttggctactatactattccgagtatggatgatttagcaaagattactaatgagaagggcgaatgcattgtgagcgatttcaccatcggccgtaaggggtatggatcaatatactttgagggagacgtcaaccttaccaacctgaatctggatgatattgtgcacatccgcagaaaagaggtggtggtgtacctggacgacaatcagaaacctccggtcggggaggggctcaaccgaaaggcagaggtgaccctggacggggtatggccaaccgacaaaacatccagatgcctgattaagagcccagacagactcgcagatatcaactacgaaggaagactcgaggcggtctcacgaaagcaaggagcacagtttaaggagtaccgcccagagactggctcgtgggtgtttaaggtgagtcatttctccaagtatggcctgcaggattctgacgaggaggaggaagagcatccaagcaaaacctcaaccaagaagctcaagacagctcccctcccccctgctagtcagactactcctttgcagatggccctgaatggaaagcctgctccccctcctcaatctcaatcacctgaggttgaacagttgggccgtgttgtggagctcgacagcgatatggtcgacatcacacaggagcccgtgttggataccatgttggaggaatctatgcccgaagaccaggaacccgtaagtgcttctactcatattgctagtagtctcggcataaatcctcatgtccttcagatcatgaaggcttcactgttgacagacgaggaggatgtggacatggccctagaccagcgcttctctcggttaccaagtaaggcagacacttctcaggagatctgctctccacgactgccaatctccgcgtctcatagctccaagactcggtccctggtcggaggactactacagagtaagtttaccagtggagcgttcctgtcaccatctgtgagtgtgcaagaatgtaggaccccacgcgcagcctcactaatgaatataccttcaaccagcagctggtcagtgccccctccccttacgagtgtgttcactatgcccagtccagctcctgaagttcctttaaaaactgtggggacacggcgtcagctgggcctggtgcccagggagaagtctgtgacatacggcaaaggtaaactgttgatggacatggccctgttcatggggagatcatttcgggtggggtggggccctaattggactttagccaacagtggtgagcaattaaatggaagccacgagctggagaatcatcagatcgccgactccatggaattcgggtttttgcctaatcccgtggccgtgaagcctctcactgagagcccatttaaagtccatttagaaaaactttccctgagacagaggaagccggacgaagacatgaagttgtaccagacgccgttggagcttaagttgaaacacagcaccgtccatgtcgacgagctttgccctctgatagtgccaaatctgggcgtggcagtgatccacgattatgcagattgggtgaaggaagccagcggcgatctccccgaggcccagatcgttaaacattggtccctgacctggactctttgtgaagccctgtggggccacctgaaggagttggatagtcagttaaacgagcccagagagtatattcagatcttagagcgtcgacgagcttttagtcggtggttgtcctgtacagcaacgcctcagatcgaagaagaggtgagcctgacgcagaagaactcaccggtggaggccgtgtttagttacctgaccggcaagcgaatctctgaagcctgtagtcttgcccagcagtccggcgaccaccgccttgctcttctgctgtcccagttcgtggggagccagtctgtaagggaactgctaaccatgcagcttgtcgactggcatcagctgcaggccgactcctttattcaggatgaacggctacgcatctttgccctgctagccggtaaaccagtgtggcagctgagcgagaagaaacagattaacgtgtgctctcagcttgactggaaacgctcactcgccatccatctctggtatctgctgcctcccacagcctcgatctctagagcgctcagcatgtacgaggaggcatttcagaataccagcgatagtgaccggtatgcctgctctccattaccatcttatttggagggctctggatgcgttattgcggaggagcagaattctcagaccccactccgtgacgtgtgcttccaccttcttaaattgtacagcgaccggcactatgatctcaatcagctcctggaacccagaagtatcacagccgatccattagactacagattgtcatggcacctgtgggaggtgctaagagcccttaactatacacacctttcagcacagtgtgagggcgtattacaggccagctatgccggacagctggaatctgagggcctctgggagtgggccatcttcgtgcttttgcatattgataacagtggtatccgcgagaaggccgttagggagcttctaacacggcattgccagctgctggagacaccagaatcctgggcaaaggagacttttctcacccagaaactccgtgtcccagccaaatggatacacgaagccaaggcagtgcgtgctcacatggaaagcgataagcacctggaagccctttgtctgttcaaggcagagcactggaacagatgccataagctgatcatcaggcacctcgcctcagacgccatcatcaacgaaaattacgattacttgaaaggatttctggaagaccttgcccctcctgaacggtcttctcttatccaggattgggaaacttctggcctcgtttatctggactatatccgggtgatcgaaatgctgcgccacattcagcaagtggactgcagtggcaacgacctggagcagctccacataaaggtgacatcactctgcagtcgtatcgaacagattcagtgctatagtgccaaggatcggttggcccagtcagatatggctaaacgggtggccaacctgctgagggtcgtgctcagtctccaccatccacccgaccggacatctgacagcacccctgaccctcagagggtgcccttgcgcctgcttgccccacatataggaagactccctatgccagaagattacgcaatggacgaactacgatcccttacgcagtcttaccttagggagctcgcagttggatcactgta

SEQ ID NO: 233364 - DNA, 5180 bp, synthetic construct
  misc_feature 1..5180: note = Description of Artificial Sequence: Synthetic coding sequence
  source 1..5180: mol_type = other DNA
atgtttaataagtctttcgggaccccattcggcggagggaccggaggcttcgggaccacttcaacctttggtcaaaacactggtttcggaactacttcagggggagcctttggcacatcagcctttggaagctctaacaacactgggggtctcttcgggaattcgcaaaccaagcccggagggctcttcggaacatctagtttctcacagccggcaacttcaactagcacaggctttgggtttggaacctccaccggcaccgctaatacgctgtttggaaccgcttcaactggaacctcccttttctcaagccaaaataacgctttcgctcagaataagccaaccggatttggcaacttcgggactagcacttctagtggtgggttattcggtactaccaataccacttctaatccatttggcagtacaagcggcagccttttcggtcctagtagtttcaccgctgcgccaaccggaacgacaattaaatttaatccacctacgggcactgataccatggtcaaagccggtgtgagtacgaacatctcaacaaagcatcagtgcattacggccatgaaggagtatgaatccaagagtctggaggagttacgtctcgaagattatcaggctaatcgcaaaggaccacagaatcaggtgggggctggtacgaccacaggcctgtttgggtcatctccagcaactagttctgccacaggcctcttttcctcctctacgactaacagtggattcgcttacgggcagaataagaccgccttcggtacctccactactggctttgggaccaatcccggtggcctctttggccagcagaatcagcagaccacttctctgttctccaagcctttcggacaggcaactactacccagaataccggtttctcattcggcaatacaagcaccattgggcagcctagtacaaacaccatggggttattcggggtgacacaggcctctcagccaggtggactctttggtactgcgactaatacaagcacaggtactgctttcggcacgggaacgggactattcggtcagaccaatactgggtttggtgccgttggctctaccctgtttggcaacaacaagcttacaacatttgggtcctccacgacttcagctccaagcttcggaaccacttccggagggctgttcggattcggtaccaataccagcggaaacagcatcttcgggtccaagccggcacctggcaccctgggcaccggactgggggcaggctttggcactgccctaggggcagggcaggcctcactgtttggtaacaaccaacctaagatcggcggacctctgggcaccggagcattcggtgccccaggtttcaataccacaaccgccactctcggctttggggctcctcaggcaccggtcgcactcactgatccaaatgcctcggctgctcagcaggctgtgttacaacagcacataaactcactcacatacagtccctttggagacagtccactgttccgtaatcccatgtcggatcccaagaaaaaggaggagaggctcaaacccaccaatcctgccgcacagaaagcactgaccacgcccactcactataagttaacacctaggcccgcaactcgcgtccggcctaaggccctccagaccaccgggaccgccaagtcgcacctcttcgatggacttgacgacgatgagccttccctggccaatggcgcatttatgccaaagaagagtatcaagaaactcgtcctaaagaatctgaacaactccaatctcttcagtcctgtgaatcgggattccgaaaatctggccagtcccagtgagtaccccgaaaatggcgagcggttctcctttctatcaaagcccgtcgacgagaaccatcaacaggatggggatgaagactcactggtgtcacatttttacactaatccaatagcaaagccaatcccgcaaacccccgagtccgccggtaataaacacagcaatagcaattcagtggatgatactattgtcgctcttaatatgcgtgccgctctccgaaatggcctggaaggtagtagtgaagagacctccttccacgacgagagcctgcaggatgaccgggaggaaatcgagaataactcttaccatatgcaccccgctgggattatcctgactaaggtaggatattatactatcccatcgatggacgacttagctaaaattaccaatgagaaaggcgagtgtattgtatccgattttaccataggacgcaaggggtatggctcgatctacttcgaaggggacgttaatctcaccaatctgaatcttgacgacattgtgcatatcagaagaaaggaagtggtagtgtatctcgatgacaatcagaagccgccagtcggtgaaggactcaaccggaaagcagaagtgacactggatggagtatggcccacagataagacaagtcgctgtctgatcaaatcgcccgacaggcttgccgatattaattacgaaggccgattggaggcagtcagccggaaacagggcgctcaatttaaggagtatcgccctgagacaggcagttgggtctttaaggtctcccatttctctaagtacggactccaggattcagacgaagaggaagaggagcacccatcaaagacttctacaaaaaagctgaagacggccccactcccacctgcctctcagaccacaccactgcaaatggctctcaatgggaaacccgcaccaccaccccaatcccagagtcctgaagtagagcaattgggtcgggtagtcgagctcgactcagacatggttgatatcactcaggagccagtgcttgatacaatgttggaggagtcaatgccagaggatcaagaacccgtgtcagcttccacccacatcgcttcctctctaggcattaaccctcacgtcctgcagattatgaaggcttctctcctaaccgatgaagaggacgtggacatggcattggatcagcgcttctcccggctgccctctaaagctgacactagccaggagatttgttcacctaggctgcccatctccgctagccactccagcaagaccaggagccttgtgggcggattgctgcagagcaaattcacgagcggagccttcttgagtccctccgtcagcgtgcaagagtgtaggacccctagagccgcatcactcatgaacatcccctctactagttcctggtcagtgcccccacccttgacctctgtatttaccatgccatccccggcacccgaggttcccctgaagactgtgggcactcgcagacagttagggctggtgcccagggagaaatctgtgacctacggcaaggggaagctcttgatggacatggcactgtttatgggacggtctttccgggtcggttggggccctaactggactctagccaatagcggtgaacagcttaacggctctcacgagctcgaaaatcatcaaattgcagacagcatggaatttgggttcctgcccaatccggtagccgtcaagccactgacggagagcccattcaaggtccatctcgagaagttgtcactgcgccaaaggaagccagatgaggatatgaaactgtaccaaactccattggagctgaagctgaagcacagcacagttcacgttgacgagctgtgcccactcatcgtgcccaacttaggcgtggccgtgatccatgactacgctgattgggtcaaggaagccagcggcgacctgccagaagcccagattgtgaaacattggagcctgacatggacgttatgtgaagccctgtgggggcaccttaaggaactcgacagtcaactcaatgagcctcgcgaatacatccagattttggagcggcgaagggccttctcgcgctggctgtcttgcaccgcgaccccacagattgaagaagaggtctcactgactcagaaaaactcacctgtggaggcagtgttctcctaccttaccggcaaacgaatttcagaagcctgtagtctagctcagcagtctggggaccatcggctggcccttctactctcgcagttcgtaggttcacagtcagtaagagagcttttgacaatgcagctcgtggactggcaccagctccaggctgatagttttattcaggacgagagactgaggatttttgctctcttggctggcaagcccgtgtggcagttaagtgaaaagaagcagataaacgtgtgtagccagctcgattggaaacgatcattagctatccacttgtggtacctcctgccacccacagcctccatcagcagggctctgtccatgtatgaggaagcattccaaaatacctcggacagcgaccgatatgcctgctctccccttccatcctaccttgagggttccggctgcgtgatcgcagaagagcagaattcccagacgcccctgcgggatgtttgttttcatctccttaagctttatagcgacagtattagagaaaaggcagttcgcgagctgctgacccgacattgtcagttgctggaaacaccagaatcctgggctaaagaaacgtttctcacccagaagctgcgcgttcccgcaaagtggatacatgaagccaaggctgtccgagcacatatggaaagcgacaaacacctcgaggcactctgcctattcaaggccgagcactggaaccgatgccataaactaatcattaggcatctggccagcgatgccatcatcaacgagaattacgattatctaaagggtttcctggaggatcttgctccaccagaacgatcttctctaatacaagattgggaaacatccggacttgtctatctcgattatattcgggtgattgagatgctaaggcacattcagcaggtggactgctctggaaacgacctggaacaattgcacattaaggtcacatctctgtgctctcgcattgagcagatccaatgctattccgctaaagacagacttgcccagtcagatatggctaagcgggtggcaaacctgctcagagttgttttgagccttcaccatcctccagatagaacctcagacagcacacctgacccacagcgggtacctctccggttactggccccacacattggccgactgccaatgcctgaggattatgctatggacgaattgagaagcctgacccaatcctatctcagagaactggctgtgggaagtttata

SEQ ID NO: 233365 - DNA, 4916 bp, synthetic construct
  misc_feature 1..4916: note = Description of Artificial Sequence: Synthetic coding sequence
  source 1..4916: mol_type = other DNA
atgttcaacaagtccttcggcacaccatttggtgggggtaccggaggattcgggacgacctccacttttggacagaatactggcttcggaactactagcggcggagccttcggaacctctgcattcggcagcagtaacaatacaggagggttgttcgggaacagccagacgaagcctggcggtctgtttggaacaagcagctttagccagcctgcaacttctacctctacaggcttcggattcgggaccagcaccggcacagcgaatactcttttcggcacggctagcactgggaccagcctcttctcatctcagaacaatgcattcgcccagaataaaccgacgggattcggaaattttggcacttctacctcatctggcggactattcgggacaacaaacactacatctaatccattcgggtccacctccggctcacttttcggtccgtctagcttcacagccgcacctaccgggactaccattaaattcaacccaccaaccgggactgacaccatggtcaaagccggagtgtcaactaatataagcaccaagcaccagtgtataacagccatgaaggagtacgagagtaagagcctggaagaattacggttagaggattatcaggccaacagaaagggcccacagaatcaggtgggagccggaaccacaaccggcttatttggatcctctcctgcgacttcaagcgccaccggtctgttcagttcctctacaaccaattcaggatttgcttatggccagaataagacggcattcggcacatcaaccacaggctttggtacaaacccgggtggtttattcggtcaacaaaaccaacagaccacaagtctttttagtaagccctttggccaggccacgaccacgcagaatactggattttctttcggcaacactagcaccattggccagcctagcaccaatacaatgggactatttggcgtgacacaggccagccagcctggaggactattcggcacagctacaaacacatccaccggcaccgcattcggaaccgggactggcctgttcggccagacaaacaccggatttggtgctgtcggaagcaccctatttggcaacaacaaactgaccactttcggcagcagtactacgtcagcaccaagtttcggtactacctccgggggtctgtttggcttcggaacgaacacgagtgggaacagcatattcggtagtaagccagcaccaggaaccttgggaactgggctcggggctggttttggcaccgctctgggagctggacaggcttcactgtttggcaataaccagccaaaaataggcggaccactcgggacaggcgcattcggcgctccaggctttaacacgacaactgctaccctgggcttcggggcaccccaggcccctgtcgccctcaccgatcccaacgccagcgctgcacagcaagccgtactgcagcagcatatcaactcgttgacgtatagtccgtttggggattccccccttttccggaatcccatgtcggatcccaaaaagaaggaagagcgactgaaaccaacgaaccctgctgcacagaaggccctgacaacacccactcactacaagctaacaccaaggcctgccacccgtgtgaggcctaaggctttgcagaccacaggaactgccaaatcccatcttttcgacggactggacgacgacgagccaagccttgcaaatggagcatttatgccgaagaagtcaatcaagaaactcgtactgaagaacctgaataattccaatttattttctcccgtcaatagagactcagaaaatctggcatcaccttcagagtacccagaaaacggtgagcgtttttcttttctgtcaaagccagtggacgagaatcaccagcaggacggcgatgaggattcattagtttctcatttttatacaaaccccatcgcaaaaccaatcccacagactccagagagcgctgggaacaaacattctaacagcaatagcgtggacgacacaattgtcgcactcaatatgagagccgcactgcgaaatgggctcgagggatcttcagaggagacatccttccacgatgaaagtctccaagatgatagagaagagatcgaaaacaactcctaccatatgcatcctgcgggtatcatccttacaaaagtggggtactacacaataccctctatggacgaccttgcaaaaataaccaacgaaaaaggcgaatgtattgtatcagatttcactatcggtcgtaaaggctacggttcaatttacttcgagggagacgtcaacctcaccaatctaaacctggacgatatcgtgcacatcaggagaaaggaggtagtagtgtatctcgacgacaatcaaaagccgcctgtgggtgaggggttgaatcgcaaggctgaggtgactctggatggcgtgtggccgacggacaagacgagtcgttgccttatcaaaagcccggacagactggcggatatcaactatgaaggacggctcgaagctgtgtctcgtaaacagggtgcccaatttaaagagtatcgccctgaaacaggcagctgggtcttcaaggtcagtcacttctcgaagtacggactgcaagacagtgatgaggaggaagaagaacaccctagtaagacgagtaccaagaagcttaagaccgctccccttccccctgcgtcccagacaacgcctttgcagatggcactgaatggtaaaccagcccctccgcctcagtctcagagtccagaagtcgaacaacttgggagggtagtggaactcgattcagacatggtcgacattacacaggaacctgtcctggacactatgttggaggagtccatgccagaagaccaggaaccggtgtccgcttccacacacatagcctctagtctgggcatcaacccacacgtcttacagatcatgaaggcttctcttctgacagatgaggaagacgtagacatggctctagatcaaagatttagtaggctgccctccaaagctgacacatcgcaggaaatctgtagccctcgattgcccatttccgcatcccattcctcaaagactagaagtctggtaggcggactgctccaaagcaagttcacgtctggtgcctttctgtccccatcagtatcggtacaggagtgtaggaccccaagagcggcttcactgatgaatattcctagtacctccagctggagtgtccctccccctctgacttcagtgtttactatgccttctcccgcaccagaggttcctctgaaaactgtgggaacaagacgtcagttaggcttggtgccacgagagaaatcagtgacttacggtaagggaaagcttctgatggacatggcactgtttatgggaagatcctttagggtcggctgggggccaaactggaccttagcaaacagtggtgaacaactgaacggttcgcatgagttggagaaccaccagattgcggacagtatggagtttggattcctcccgaacccggtcgcagtcaaaccactcacagaatcgccatttaaagtgcacttggagaagctgtctctgagacagagaaagcctgatgaagatatgaaactttatcaaaccccactcgaactcaagttgaagcacagcactgtgcacgtggacgagctgtgccccctgatcgtgcctaatttgggcgtcgcagtcatacacgattacgccgactgggtcaaggaagcttccggggatctcccagaagctcagattgtcaaacactggtcactaacctggaccctctgtgaagcactgtggggtcacttgaaagaacttgattcccaactgaatgaaccacgcgagtacatccagatactggaaagacggagggctttttcccgctggctgtcatgtaccgcaaccccccaaatagaggaagaggtatccttgactcagaaaaatagtccagttgaagccgtgttttcatatctgacaggcaagcgcatcagtgaagcttgctctcttgctcagcaatcgggcgatcatcgactcgctctcttgctgagtcagttcgttggatctcagtcggtgcgtgagctcctgactatgcagctggttgactggcatcagctgcaggcagatagcttcatccaggatgagagactgcgaatctttgctctgctggccggtaagccagtctggcagctgtccgagaagaagcagataaatgtctgcagccaactcgattggaagagaagcttggctattcacttatggtaccttttgcccccaactgcatctatctcaagagccctttccatgtatgaagaggcatttcaaaatacctcggattcagaccggtatgcctgcagtccattgccatcttacctggaagggagtggatgtgtcatcgcagaagagcagaacagccaaacgccactgcgggacgtatgcttccacctcctcaagctctacagtgacagcattagagagaaagccgtgagggagctgttgacacgacactgtcagttgttagagacacccgagtcctgggcgaaggaaacattcctgactcagaagttgagagtgccagccaagtggatccacgaagcaaaggcagtgcgggcacacatggaaagtgacaagcatctcgaagctctgtgcctgtttaaggccgagcactggaacagatgccataagctcattattagacacctggcttccgacgccatcatcaatgagaactatgattacctgaagggtttcctcgaggacctggcacccccagagagatcaagtttgatccaggattgggagaccagcggcttggtttacttagattatattcgggtcattgagatgctcaggcacatccagcaaatagctttgttttgcgtggagtggattgctcaggtgatgacttggagttcatacacatcaaagta

SEQ ID NO: 233366 - DNA, 2763 bp, synthetic construct
  misc_feature 1..2763: note = Description of Artificial Sequence: Synthetic coding sequence
  source 1..2763: mol_type = other DNA
atgtttaataaatctttcggcacaccattcggtggcggaactggaggctttggaaccacgagcacgttcggacagaacactggctttggaaccacgtctggcggagccttcggtaccagcgccttcggtagcagcaataatactggtggcctgttcggcaactctcagactaaaccagggggactgtttgggacaagttcgtttagccagccagccaccagcacttctactggcttcggatttggtactagcacagggaccgctaacaccctcttcggcaccgctagcactgggaccagcttgttttcttcacagaacaacgcgttcgcacagaataagcctaccggctttggaaacttcggcacatctacatcctcaggagggttgtttggaaccacaaacactactagtaacccgttcggttctacaagcggatctcttttcggcccatcgtcattcaccgctgctcctacaggcacgactattaaattcaacccacctacagggaccgacaccatggtcaaggcaggagtttcgacaaacatcagcacaaagcaccagtgcatcactgccatgaaagagtacgagagtaaatctttggaggaactgagactggaggactaccaagcgaatcgtaagggccctcagaatcaagtgggtgccggtactacaaccgggcttttcggatcatcacccgctacatcaagtgcgactggcctgttctccagctccacaacaaactccggctttgcctatgggcagaacaaaaccgctttcgggacttctaccacaggcttcggtacaaaccccggagggttgttcgggcagcaaaaccaacaaactaccagtttgttttcaaagccttttggccaagccaccacgacgcagaacaccggatttagtttcgggaatacatctaccattggtcagccatcgacaaacaccatgggcctgttcggggtgacacaggcatcccagccagggggactctttgggaccgctactaatacatcaacgggtacagcctttggcacagggactggcctcttcggacagacaaatactggatttggagccgttggtagcacactgttcgggaacaacaagttaacaacattcggaagcagtactacaagcgctccatcctttggtaccacaagtggaggcctgtttggcttcggcacaaatactagcggtaacagtatctttggatcaaagcctgcacccggtaccctgggcacgggactaggagcagggtttggaacagctttaggtgcagggcaggcctctttgtttggcaataatcagccaaagattggcggtcctttgggcacgggcgctttcggggctccgggatttaatacgactactgcgacccttggatttggagctccacaagccccagtcgccctgaccgatcctaacgcgagcgctgcccagcaagctgtgctgcagcagcatatcaattcgctaacatacagcccttttggggatagtccactgttcaggaacccgatgtctgaccccaagaaaaaagaggagagactgaaacccaccaatccagctgcccagaaagccctaacaactccaactcactataagctgacgcccagaccagccacgagagtaaggccaaaggccctccagaccacaggcactgctaaatcccacctgtttgacggactggacgatgatgagcctagcctcgccaacggcgcattcatgccaaagaaatccatcaagaaactcgtcctgaaaaacctgaacaactccaacctcttcagcccagtgaaccgggacagcgagaatttggcctctccctcagagtaccccgaaaatggagagcgattttccttcctgagcaaacctgtggatgagaaccatcaacaggatggggacgaagatagcttggtgtcccatttctatacaaaccctatcgcgaagcctatcccgcagacaccagagagcgcgggtaataaacattccaattctaattcagtggatgatactatcgtcgcactcaatatgcgagcagcactccgaaacggtctagaagggtcttcagaggagactagtttccatgacgaatccctccaggatgaccgtgaggagatagagaacaattcgtaccacatgcatcccgctggcattatcctgactaaggtgggctactatacaattcccagtatggacgacctcgccaagattaccaatgagaagggtgagtgtattgtttccgatttcaccatcggtcggaaagggtatggctccatctactttgagggggacgtgaatctgaccaacctgaacctggacgatattgtgcacattcggcgaaaggaggtagtggtctatcttgatgacaatcagaagccacccgtgggggagggactcaataggaaggctgaggtcacactcgatggtgtgtggccaacagacaaaaccagccgctgtcttatcaaaagcccagatagattagcggacatcaactacgagggaaggctagaggccgtgtccagaaagcagggagcgcagtttaaggagtatagacccgaaactgggtcatgggtcttcaaggtctctcattttagcaagtatggcctgcaggacagcgatgaggaagaagaggagcacccttctaagacatcaaccaagaaactgaaaaccgccccactccccccagcctctcagactacccccctgcaaatggccctcaatggtaagcccgctcctccgccacaggtggagaagaagggacagtag

SEQ ID NO: 233367 - DNA, 2814 bp, synthetic construct
  misc_feature 1..2814: note = Description of Artificial Sequence: Synthetic coding sequence
  source 1..2814: mol_type = other DNA
atgttcaacaaatcctttggaacaccattcggaggcggtactggcggtttcgggacaacatcaaccttcgggcagaacaccggttttggcacgacttctggaggggctttcggaacctctgcattcggatcatcaaacaacacaggcggtctcttcggcaacagtcagactaagcccggagggctcttcggcacatcatcctttagtcaaccggctacctcaacctccactggtttcggcttcggaacgagtaccggcaccgctaacacacttttcgggaccgcatctacaggcacatccctgttctccagtcaaaataacgcctttgcccagaataagcctacagggttcggcaacttcggaacctccaccagcagcggcggactgtttggaactacgaacacgacctccaatcccttcggctccacttcaggcagcctttttggaccttccagcttcaccgccgcacctaccgggaccactatcaagttcaaccctcctaccggaactgacacaatggtgaaagccggtgtgtcgaccaatataagtacaaagcatcagtgcattaccgcaatgaaggaatacgaaagtaagtccctggaggaactgcgcctggaggactaccaggccaaccggaaagggccacagaaccaggttggcgcagggacaaccactgggctcttcgggtcttcccccgcaacatccagcgccaccgggttgttctctagctcaacgaccaattctgggttcgcatacggtcagaataaaacagcctttggaacatccaccactggatttgggaccaacccagggggactgttcggccaacagaaccagcagacgacttccctgttttcaaagcccttcggacaggccaccacgacccagaataccggctttagcttcggcaatacatccactattgggcagccttcaaccaacacaatggggctgttcggggtgacccaggccagccaacccggaggactgtttgggaccgccacgaacacctcaactgggactgctttcgggacaggaaccgggttgttcggccagaccaatacaggatttggggctgttggctcaaccctcttcggaaataataaacttaccaccttcggcagttcaaccacttctgccccttcctttgggacaactagcggcggtcttttcggaaataaaccgacgcttaccctcggcactaacactaacacaagtaacttcggttttgggacaaatacgtccggaaacagcatttttgggagcaagcccgcaccaggaactttagggacaggacttggggcaggctttggcacagctctgggagcaggccaagccagtctgttcggtaataatcagcccaaaatcggaggaccactcggaaccggcgcttttggcgctcctgggtttaatacaactacggccaccctggggtttggggcaccgcaggcaccagtggccctgaccgatccaaatgcatccgcggctcagcaggccgtgttacagcagcatattaattccctgacatactccccctttggtgattcacctctcttcagaaatcccatgtccgaccctaagaagaaagaagagaggcttaagcctacaaaccccgcagcccaaaaagctttgactacaccaacccactacaaactcacccccaggccggctactcgggtacggcctaaggcactgcagacaacaggaacagccaaaagccacctgtttgacggcttggacgatgatgagccaagcctggctaatggtgccttcatgccaaagaagagcatcaaaaaacttgtgctgaagaatcttaataactctaatctcttttctcctgtgaatagagattcagagaacctggcttcacccagcgagtatcccgaaaacggcgagagatttagctttctttccaaacctgttgatgaaaatcatcagcaggacggtgatgaggattcactggtatcgcatttctataccaatccaattgctaaacccattccccagaccccagaatctgcgggaaacaaacattcaaactcgaactccgtggacgatacgatagttgctctgaatatgcgcgctgcattgcgcaacggtctggaaggatcatccgaggagacaagcttccatgatgaatcattgcaggatgatcgggaggagatagagaataattcctaccatatgcatccggcagggattattctcacaaaagtgggttactacaccataccgtctatggatgatcttgccaagatcacgaacgaaaagggggaatgcattgtgtcggactttacgatcggacgtaaaggctacgggtctatctacttcgagggcgacgtgaatctgacaaatctcaatttggatgatatcgtgcatatacgcagaaaagaagtcgtcgtatatctggatgacaatcagaaaccgccagttggggaaggcctgaacagaaaggccgaggtgaccctggacggagtgtggcctacagataagactagtcgctgtctcatcaagtcacctgaccgtctagccgacattaactatgagggcaggctggaagctgtgtctaggaagcaaggggctcaatttaaggaatacagacccgaaacaggcagctgggttttcaaagtctcccacttttcgaaatatggactccaggactccgacgaggaggaagaagagcaccccagcaagaccagcactaaaaaactgaagaccgccccactccccccagcgtcccaaactacacctctgcaaatggccttgaatgggaagcctgccccacccccacaggtggagaaaaaaggccagtag

SEQ ID NO: 233368 - DNA, 1731 bp, synthetic construct
  misc_feature 1..1731: note = Description of Artificial Sequence: Synthetic coding sequence
  source 1..1731: mol_type = other DNA
atgtccacagggttttctttcgggaccggggctagtagcaacccaagcgttggcttgaattttggaaatctgggctctacctcgacacccgcaaccacatcagccccatcttctggtttcgggaccggtctcttcggctctaagcctgctactggcttcaccttggggggaaccaataccggaatcgcaacgaccatcacaacagggctgactctgggaacgccagcgaccaccagtgccgctacgaccgggttctcgttgggcttcaataagcctgccgcaagcgccacaccatttgcattgcccataacgagtacatcagcatccggactgactctatcctctgcgctgacctcgacgcctgcagccagcaccgggtttactctgaacaacttaggagggacaaccgctaccacaactaccgcgtcaacaggtttgtctctgggcggagccctcgctggcctcgggggatccctgtttcaaagtaccaacactggcacctctggcctcggacagaacgctctcggcttaactctcgggaccaccgccgctacaagcacagcagggaatgaagggctcggcggaatcgatttttcctcgagttcagataagaagtctgataagacaggcacccggcctgaagacagtaaagcacttaaggacgaaaacctgccacctgtcatttgtcaagacgttgagaacttgcagaagttcgtgaaggagcagaagcaggtccaggaggagatctcgcgcatgagctccaaagccatgctgaaggtccaagaagacataaaggccctcaagcagctgctgagcctggccgcaaatgggatccagagaaatacattaaacatcgataagttgaaaatagagacagctcaggagctgaagaacgcggaaattgcgctccggacgcaaaaaacaccaccaggcctgcagcatgagtacgccgcacctgccgactattttagaatccttgtccaacagttcgaggtccaactgcaacaatatcggcagcagattgaggagcttgaaaaccacctagccacccaagccaataattcccacatcaccccacaggacctgagtatggccatgcagaaaatctaccaaaccttcgtcgccctggctgcccagctgcaatccattcacgagaatgtcaaagtgttgaaggaacagtacctagggtaccggaagatgtttcttggcgacgctgtggatgtgtttgagacacgcagggccgaggccaaaaaatggcagaacactcccagagtgacgaccgggcctacgccgttttctaccatgccaaacgcagcagccgtggcgatggctgccaccctgacccagcagcagcagcccgcaacaggaccccagccctccctgggcgtctctttcggtacaccattcggcagcggaatagggaccggactgcaatctagcgggctgggcagctctaatttggggggtttcggaacttctagcgggttcggatgttctactaccggcgcatctactttcgggttcggcacgaccaacaaacctagcggctctctgtcagcagggtttggatcctcctccacctcaggattcaacttctccaaccccggaattacagcttcagcaggcctgacattcggggtctccaatcccgcttccgcaggctttggcaccgggggacagctactgcagttaaagaagcctccggcagggaataaaagaggcaagcgctag

SEQ ID NO: 233369 - DNA, 1764 bp, synthetic construct
  misc_feature 1..1764: note = Description of Artificial Sequence: Synthetic coding sequence
  source 1..1764: mol_type = other DNA
atgagtacaggcttttctttcggttccggcactctgggaagcaccacggttgctgcagggggtacctccacaggcggagtattctcatttgggactggtgcctccagcaatccctccgtaggcctgaattttgggaatttaggcagtacctctacccctgcaaccacctcagcacccagcagcggctttggtactgggctgtttggatctaagccggcaacaggctttaccttggggggtaccaacaccggtactccggctacaaccagcgctgcaacaacagggttctcccttggttttaacaagcctgctgcctcggctactccctttgcactcccaatcaccagcacaagcgccagtggtctgacattgagttccgctctcacttccaccccagcagctagtacaggcttcactctcaacaacttggggggaaccacggccaccaccacaacggctagcaccggtctcagcctggggggagcgctggcaggtctcgggggtagccttttccagagcactaataccggcaccagtggtctgggtcaaaacgcccttgggcttaccctgggcaccaccgccgctacatcaacggccggtaacgaaggactcggaggaattgactttagtagttcatcagataaaaaatccgacaaaaccgggacccggccagaggactccaaggccttgaaagacgagaatctgccacctgtgatttgtcaggacgtggagaatctgcagaaattcgtgaaagagcaaaagcaagtgcaggaggagataagtagaatgtcatcgaaggccatgctgaaggtgcaagaagacatcaaagccctgaaacagttgctgagcctggctgccaacggcatccagcgaaatacactaaatatcgacaagctcaagattgagactgctcaggaactcaaaaacgcagagatcgcactcaggacccagaaaacacccccaggtctgcaacatgagtacgctgctcctgccgactacttccggattctggttcagcagttcgaagttcagttgcagcaatacagacagcagatcgaagagctggagaaccacctggctacacaggctaacaattcccacatcaccccccaggatttatccatggctatgcagaaaatttaccagactttcgtggccctggccgctcagttacaaagcatccatgaaaatgttaaggtcttaaaggagcagtacttgggatatagaaaaatgttcctgggcgacgccgtggacgtttttgaaacacgacgtgcggaggcgaagaagtggcagaacacaccaagagtcacaacagggcctactcccttcagcactatgcctaacgcagccgcagtggctatggcagctaccctgacccagcagcagcagcctgcaacgggacctcaaccatcactgggagttagtttcggcacacccttcgggagtggtattggcactggcctgcagtccagtggtctcggatcctccaatctggggggattcggtacatcctctggtttcggctgctccactactggcgctagcacatttggatttggtacgactaataaaccatcaggaagcctcagtgctggtttcgggtcctcgagtacatctggatttaatttttctaatcccggaatcacagcttctgccggtctcactttcggtgtcagcaatcctgctagtgcaggctttgggaccgggggacagctgctgcagcttaaaaaacctccagccggtaataagcgaggcaagcgctag

SEQ ID NO: 233370 - DNA, 1800 bp, synthetic construct
  misc_feature 1..1800: note = Description of Artificial Sequence: Synthetic coding sequence
  source 1..1800: mol_type = other DNA
atgagcaccggcttctcgttcggctccggcaccctgggctctacaaccgtggccgcaggtgggactagcaccggcggtgtctttagtttcggcaccggtgcgtcctcaaatccatcagtcggcctgaatttcggtaatctgggctccacttcaacccctgccaccacaagcgcgccatctagtgggttcgggacagggctgttcgggtccaagcccgctaccggcttcaccctgggcggtactaacactggtatcgccacaacgatcacaacggggcttacccttggcaccccagccacaacatcggccgctacaactgggttcagcctgggcttcaacaaacccgcagctagcgcaaccccttttgcgctgccaataactagcacaagcgcttcggggctgaccttgtcaagtgctctgacatcaactccagccgcttccactggattcaccttgaataatctcggcggaacaacagccactaccacaacggcctctaccggcctatctctaggcggagcactcgccggactggggggaagcctgttccaatctactaataccggcacaagtggactaggacagaacgctttaggtctcactctcggcaccaccgccgctacttccacagctgggaatgagggcttgggcggtattgatttcagctctagctcggataagaagtcagacaagaccggcacgcggccagaagattctaaagcgctcaaagatgagaatctccctcccgttatctgtcaggacgtggaaaacctgcagaaatttgtgaaggaacagaaacaagtgcaagaggagattagtaggatgtcaagtaaggcgatgcttaaagtgcaggaagatataaaggccttgaaacaactgctgtccctcgcggctaatggtattcaaaggaacactcttaatatcgataaactgaagatcgaaactgcacaagagttaaaaaacgccgaaatcgctcttcggacgcaaaaaacacccccagggctccaacacgaatacgccgcacctgccgattattttcggatcctcgtgcaacagtttgaggtccagcttcaacagtacaggcagcaaattgaggagctggagaatcatctcgcaacccaggcgaataattcacacataaccccccaggacctgtctatggcgatgcaaaagatttaccagacattcgtcgccctagccgctcagctgcagagtattcacgagaatgtgaaggtgttaaaggagcagtaccttgggtaccgaaagatgtttcttggggatgcggtagacgttttcgagacgcgtcgggctgaagctaaaaaatggcagaacacgcccagagtaactaccggacctacacccttctctactatgccgaatgcggcagccgtagccatggctgccacactcacgcaacagcagcagcccgctacaggaccacagccgagtctgggcgtcagttttggaacccccttcggctccggcatcgggacaggtctgcagtccagcggattaggaagttctaatttgggaggcttcggaaccagcagcggattcggatgctcaactacaggcgcttccacatttggattcggaactaccaataaaccttctggttcactttcagccggtttcggctcctcctctacctctggttttaacttcagcaatcccggaattacagcgagcgctggtctcaccttcggagtgtcaaatccagcttccgctggatttggaacaggtggtcagcttctacagcttaagaaacccccagccggtaacaaacgcggaaagcggtag

SEQ ID NO: 233371 - DNA, 1515 bp, synthetic construct
  misc_feature 1..1515: note = Description of Artificial Sequence: Synthetic coding sequence
  source 1..1515: mol_type = other DNA
atgtcaaccgggttctctttcggctcggggactttaggaagcacaactgtcgctgccggaggcaccagcaccggcggagttttcagttttggcacaggcgcatcaagcaatcccagcgtgggcctgaatttcggcaacctggggagtacctcaacccctgccaccacgagtgctccaagcagcggatttggcaccgggctgttcggttcgaagcccgctacaggctttacactggggggaactaacaccgggacaccggctacaacatcagccgcaaccactggtttttcactaggattcaataaaccagcagcgtcggccacccctttcgcactgcctattacaagcacaagcgcctctggtttaacactgagttccgcccttacatccaccccagctgcttccactggctttaccctgaataaccttgggggaactactgcaaccactaccactgcgtctaccggccttagccttggcggtgctctagcgggattagggggatctctcttccaaagcacaaacaccggcacctcgggcctcgggcagaatgcattgggtctgaccctgggcaccactgctgccaccagcaccgcagggaatgagggtctgggtggtatcgatttttctagtagcagcgacaaaaagtctgacaagacaggcacaaggcccgaggactccaaagccctgaaggacgaaaacctcccacctgtcatctgccaggacgtggagaacctgcagaagttcgttaaagagcagaagcaggtgcaggaggaaataagtaggatgtcaagcaaagcgatgcttaaggtccaagaggacatcaaggctttgaaacaactgctgagcctagctgctaatgggattcagcgcaataccctgaatatagacaaactgaagatcgagacagcccaggagctgaagaacgccgagatcgccctgcgaacacaaaagactccccctggcttgcaacacgaatacgctgcaccagctgactatttccgcattctggtacaacagttcgaagtgcagctgcagcagtaccggcaacagattgaagagctcgaaaaccatttggccacacaggccaataacagccacatcactcctcaggacctatctatggccatgcaaaaaatttatcagacattcgtggcccttgcagcccaattgcagagtattcatgagaatgtgaaagtgctgaaagaacagtacctgggatataggaaaatgtttctcggggacgccgtggatgtcttcgagacacgacgcgcagaagccaaaaagtggcagaacactcctcgagtgacgacaggtcccaccccattttccacaatgcccaacgccgctgcagtggctatggcagccacactaacacagcaacagcagcctgcaaccggggacaagtggtgtaacgtggccgaacttaagaatcgcactcagctgtcactttttgtgaataagttggaactctcctgttactgcgtcattgatctgttatacaacgaacaatag

SEQ ID NO: 233372 - DNA, 1458 bp, synthetic construct
  misc_feature 1..1458: note = Description of Artificial Sequence: Synthetic coding sequence
  source 1..1458: mol_type = other DNA
atgtctacgggtttctcattcggctcaggtacacttggaagcaccactgtggctgctgggggaacttccacgggcggtgtcttctcatttggcactggggctagttccaacccaagtgtaggactaaacttcggcaatctcggttccaccagcacgcccgcaaccacgagtgctccaagctcagggtttggcacgggattatttggctccaagccagctaccggttttactcttgggggaaccaatacaggcattgccacaactatcacaacaggcctgactctaggcactcctgcaactacttcggcagccactactggcttctccctgggtttcaataaacctgcagcatcagctactccttttgccttgccaatcaccagtacttccgccagcggacttaccctctccagcgccctgactagcacccccgcagctagcacaggcttcactctgaataatctgggagggacaaccgctactactaccacggcctccaccgggctgtcgctggggggtgccctggccggtttgggcggttcgctttttcaatctacaaataccggcacttccggtctgggccaaaacgcgctgggcctgaccctaggcactactgccgcaacctccacggcgggaaatgaagggctggggggaattgatttcagttcttcctcggacaagaagtccgataagactggcacccggcctgaggactcaaaggccctaaaggatgaaaacttacccccagtgatatgccaggatgttgagaatctgcagaaattcgtgaaggagcagaaacaagtacaggaggaaatctcgcgaatgagcagtaaagccatgctgaaagtgcaggaagacatcaaagcgttgaaacagctgctgtctttggccgctaacggcatacagcgcaacactctgaacatcgacaaactcaaaattgagacagcacaggaattgaagaacgcagagatagctctgcgcacccagaagaccccgcctggcctccaacacgagtacgccgctcccgctgactactttcggatcctcgtacagcagttcgaggtgcaacttcagcagtatcggcagcagatcgaagaacttgagaatcacctcgcaactcaggccaataacagccacattaccccacaggacctgtctatggcaatgcaaaaaatataccagaccttcgtcgccctggccgctcaactgcaatctatacacgagaacgtgaaagtccttaaagaacagtaccttggatatcggaagatgttcctcggagacgctgttgacgtgttcgaaactagacgggcagaggctaagaaatggcagaacaccccgcgtgtgaccacagggcctactcctttctctacaatgcctaacgcggcagcagtggcaatggcagccaccctcacccagcagcagcagcctgccacaggcctgaacgccttcaaactgtag

SEQ ID NO: 233373 - DNA, 1308 bp, synthetic construct
  misc_feature 1..1308: note = Description of Artificial Sequence: Synthetic coding sequence
  source 1..1308: mol_type = other DNA
atgagcggattcctggaagaactactcggtgagaagctcgtgacaggtggaggcgaagaggtagatgtccactctctgggtgctcgtgggatctctctgttagggctttactttgggtgctccctgtctgccccatgtgcgcagttgagcgcgtctctggccgctttttatggtcgtttacgcggagatgcagccgctggaccaggccctggcgcaggcgctggcgctgcagccgagccagaaccacgtcgacgtctcgagatcgtttttgtgtcgtccgaccaagatcagagacagtggcaggatttcgttcgggatatgccttggttagccctgccatacaaggagaaacacagaaagcttaagctgtggaacaagtacaggatatccaatatcccatccctgatttttctcgatgctaccacaggaaaagtagtgtgccgtaatgggcttttagtcatcagagacgaccccgaaggattagagtttccatggggccctaagccttttagggaggtgatcgcaggtccccttttgcggaacaatggccagtctctggagagttcaagtctcgagggaagtcacgtcggggtgtatttctccgcacactggtgtcctccctgcagaagccttacgagggtgctggtggagagctatcggaaaattaaagaggccggacagaattttgagatcatttttgtgtcagcagatcgcagcgaagaatcgtttaagcagtatttttctgagatgccgtggctagccgtgccctatactgacgaagccaggaggagcagactgaaccgtctttatgggatccaaggcattccgacactgatcatgctcgatcctcagggagaagtcattaccagacagggacgcgtcgaggtactgaatgatgaggattgtcgagagtttccatggcaccctaagccagttctggaactttccgatagtaacgccgcacagctgaatgaagggccttgtttagtgcttttcgtggactcagaggatgatggcgagtctgaggctgctaagcagttaatccaacccattgccgagaagataattgccaagtacaaagctaaggaagaagaagctcccctgctgtttttcgttgcaggcgaggatgacatgaccgattctctgagagattatactaacctcccggaagcagcccctctcttgaccattctagacatgtcagcacgagccaaatatgtcatggacgtcgaagagatcactccagcgatcgtcgaagcttttgtgaatgacttcctggccgagaaacttaaacccgaacctatttag

SEQ ID NO: 233374 - DNA, 984 bp, synthetic construct
  misc_feature 1..984: note = Description of Artificial Sequence: Synthetic coding sequence
  source 1..984: mol_type = other DNA
atggccgacgtatcactccacagaaacccggctacacttaagctatggaacaagtacaggatttcaaacatcccgagccttatatttctggacgccaccacagggaaggttgtctgccgcaacggtcttctggtaattcgggacgatccagagggcctcgaattcccgtgggggcctaaacccttccgggaggtgatagccggacccctgctaaggaataacgggcagagtctagaatcatctagtctcgaaggtagtcatgtgggagtgtatttctctgcccattggtgccccccatgtcggagccttacgcgcgttttggttgaatcttaccggaaaatcaaagaagccggtcaaaatttcgagatcatctttgtgtcagccgatcggtcagaagagtcgtttaaacaatacttctctgaaatgccttggcttgcggtgccatataccgacgaggctagacgcagccggctgaacaggttatacggcatccaaggtatcccaactctgataatgttggacccacaaggcgaagtaataactcgacaaggaagagttgaggtgttgaatgacgaggactgcagggagttcccctggcatccgaagcctgtactcgagctttcggattctaacgccgctcagttaaacgaagggccatgcctggtacttttcgttgattccgaggacgatggggaaagtgaggccgcaaagcagctgatccaacccatcgccgagaagattattgccaagtacaaagccaaagaggaggaggcaccactgctgttcttcgtggccggagaggatgacatgaccgattctctgagggactatactaatctccccgaagccgcacccctgctgactatcttggatatgtcagcacgggctaagtatgtcatggacgtcgaagagattaccccggcaatagtggaggcattcgtcaacgatttcctggcagagaaactgaagcccgaaccgatttag

SEQ ID NO: 233375 - DNA, 381 bp, synthetic construct
  misc_feature 1..381: note = Description of Artificial Sequence: Synthetic coding sequence
  source 1..381: mol_type = other DNA
atgccctggctagcggttccgtacacggacgaagcgaggcgatccagattaaatcgtctgtatggaattcaggacagtgaagatgacggtgaaagtgaagccgcaaagcagctgatccagcctatcgccgagaaaattattgccaaatacaaagcaaaggaggaagaagccccactgctgttctttgtggccggtgaagacgacatgacagacagtttgcgagattatactaacctcccagaggctgcccctctgcttaccattttagacatgtccgctcgggctaagtacgttatggacgtcgaggagatcactcccgctatagtggaagcgttcgtcaatgacttccttgcggagaagctcaaacccgagccaatttag

SEQ ID NO: 233376 - DNA, 984 bp, synthetic construct
  misc_feature 1..984: note = Description of Artificial Sequence: Synthetic coding sequence
  source 1..984: mol_type = other DNA
atggccgacgtgagcttgcacaggaatccagcgacactgaagctttggaacaagtaccgcatctccaatattccttctctgattttcctggacgcaaccactggaaaggtggtgtgcagaaacggcctccttgtgatcagagacgatccagagggtcttgagttcccatggggaccgaaaccatttagagaggtgattgccggacccctcctgcggaataatgggcagagtctggagtcttccagcctggaaggttcccatgtgggggtatacttctccgcccactggtgcccgccttgcaggtctctcaccagggtcctcgtcgaatcttaccgcaaaatcaaggaggctggacagaactttgaaatcatcttcgtttccgccgacaggtctgaggaaagctttaagcagtactttagtgagatgccttggctggcggtgccttacaccgacgaggcacgccgatcccgactgaatcgtctctatgggatccaaggtattcccacacttattatgctcgatccccagggggaggttatcacacgccaggggagagtggaggttttaaacgacgaggactgcagagaatttccatggcaccccaaacccgtgctggagctgtccgattccaacgcagcgcagctaaacgaagggccatgcctggtgttgtttgtggactccgaagatgatggcgaaagtgaggccgctaagcaactcatacagccaattgcggagaaaataatcgcaaagtataaggcaaaagaagaggaagcacccttgctattttttgttgctggcgaggacgatatgaccgacagcttacgcgattacaccaacctcccagaagcagcaccactgcttacaatcctggatatgtcagccagggccaaatatgttatggatgtggaggagattacgccggctattgttgaggcctttgtgaacgattttctagccgagaagctgaaacctgagcccatctag

SEQ ID NO: 233377 - DNA, 1176 bp, synthetic construct
  misc_feature 1..1176: note = Description of Artificial Sequence: Synthetic coding sequence
  source 1..1176: mol_type = other DNA
atggccgacattgataacaaggaacagagcgaactggaccaggacttagacgacgtcgaggaagttgaagaggaagagactggcgaggagacaaaattaaaggctcgccagctgaccgtacagatgatgcagaatccacagattctcgcagccctgcaggagagattagacggattagtggagacgccaacaggatatatagagagtttgcctcgggtggttaaaagaagagtgaacgctcttaagaacctccaagttaagtgtgctcagatcgaagccaaattctacgaggaagtgcacgatctggaaagaaagtatgcagtcctgtaccaaccactcttcgacaagcggttcgaaattatcaacgctatctatgagcccactgaagaggaatgcgagtggaagcccgacgaagaagacgagattagtgaagaacttaaggagaaagctaaaatcgaggacgaaaaaaaggacgaagaaaaagaggaccctaagggcattcccgagttctggctaacagtgttcaagaacgttgacttgttgagcgatatggtccaagagcacgacgagcctatcttgaaacacctcaaagatatcaaagtgaaattttccgatgccggtcaaccaatgagttttgtgttagagtttcacttcgaaccaaacgagtatttcaccaatgaagtactgacaaagacatacagaatgaggtcagagccagatgactcagatccgtttagctttgacggccctgagattatgggctgcacaggttgccagatagattggaaaaaaggaaagaatgtgactctgaagacgattaagaagaagcagaaacacaaggggagaggtactgtgcggaccgttacaaaaacagtgagcaatgattcattcttcaatttcttcgcccctcctgaggtccctgaaagcggcgatcttgacgacgatgctgaagcgattttggccgcagactttgagatcgggcacttcctccgcgagcgcatcatacccagatccgttctctatttcacgggggaggcgattgaggatgacgacgacgattacgatgaagaaggcgaagaagcagacgaggagggtgaggaagagggggacgaagaaaatgatcctgactacgacccaaaaaaagaccagaacccagcggagtgcaaacagcaatag

SEQ ID NO: 233378 - DNA, 1176 bp, synthetic construct
  misc_feature 1..1176: note = Description of Artificial Sequence: Synthetic coding sequence
  source 1..1176: mol_type = other DNA
atggccgatattgataataaagagcaatctgaattggatcaggacctggatgatgtggaagaagtcgaggaggaagaaacaggcgaggagacaaagctcaaagctcgccagttaactgtgcagatgatgcaaaatccccagatcctggctgctctgcaggagcgccttgacggcctggtcgaaacgcccaccggatacattgagagccttccgcgtgtggtgaaaaggcgggtcaatgcattgaagaacctgcaggtgaagtgtgctcagatagaggcgaaattctatgaggaagtccacgatctcgagcgaaagtacgcggtgttataccagcccctcttcgataaacggtttgaaattattaacgctatttacgagcctaccgaggaagaatgcgagtggaaacctgatgaggaggatgagatttctgaggagcttaaggaaaaagctaagatcgaggacgagaagaaagatgaggaaaaagaagaccccaagggtattcccgaattctggctgacagttttcaaaaatgtggatttactgagtgacatggttcaggaacacgacgaacccattctgaaacacctcaaagacatcaaggtgaagttctcagatgctgggcaacctatgagcttcgtactggagtttcacttcgagcccaacgagtacttcaccaacgaagttctcactaaaacctatcggatgcgaagtgagccggatgactcagatccttttagtttcgacggcccagaaattatgggctgtaccggatgccagatcgactggaaaaaaggtaaaaatgtcacactgaagactattaagaagaaacagaaacataaggggcgtggtactgttagaaccgttactaagacagtgtcaaacgacagcttcttcaatttcttcgccccacccgaggtgccagagtctggcgacctcgacgatgacgcagaggctatcttggccgcagactttgaaattggacatttccttagagaaaggattattcccaggtccgtgctttacttcaccggggaagccattgaggacgatgacgatgactacgacgaagaaggcgaagaagcagacgaggaaggcgaggaggagggagacgaggagaacgaccctgattacgaccctaagaaggaccaaaatcccgcagagtgtaaacagcagtag

SEQ ID NO: 233379 - DNA, 972 bp, synthetic construct
  misc_feature 1..972: note = Description of Artificial Sequence: Synthetic coding sequence
  source 1..972: mol_type = other DNA
atgatgcagaacccacagattctggctgctttacaagagcggctggacggcttggtagaaactccgacgggatatatagagtcccttccacgagttgtgaagaggcgtgttaacgcacttaaaaatctacaggtaaaatgcgcccaaattgaggcaaaattctatgaggaagtgcatgatctcgaaagaaaatacgccgtcctctaccagcccctgttcgataaggaagagttgaaggaaaaggccaagattgaggacgagaagaaggacgaggagaaagaggaccccaagggcatcccagagttctggcttaccgttttcaaaaatgttgatctcctctctgacatggttcaggaacacgacgaacccatactgaaacacctgaaagatattaaagtgaagttttcagatgctggacagccaatgtcgtttgtgctggagttccattttgaacccaatgaatactttactaatgaggtcttgaccaaaacctaccgtatgagatccgagccagacgactcagaccctttctctttcgacgggccagagattatgggctgcaccggctgtcaaatcgattggaaaaaaggaaaaaatgtcacactcaagactattaagaaaaagcagaaacataagggtaggggtactgtacgcacagtgactaagacagtgtcaaatgactccttttttaactttttcgcacctccggaggtgcccgagagcggggaccttgacgatgacgccgaagcaatcctggctgccgattttgaaataggacattttctacgggagcgcatcatcccacgctccgtgttgtacttcaccggggaggctatcgaggacgacgatgatgactatgacgaggagggcgaagaagccgacgaagagggagaggaggaaggcgacgaggagaacgaccccgactatgacccaaagaaggaccagaatcctgcagaatgtaagcagcagtag

SEQ ID NO: 233380 - DNA, 1050 bp, synthetic construct
  misc_feature 1..1050: note = Description of Artificial Sequence: Synthetic coding sequence
  source 1..1050: mol_type = other DNA
atgatgcagaatccccagatactggctgctctgcaggagaggctggatgggctggtggaaacacctaccggatacatcgagagtctccccagagttgtgaaaagacgggtaaacgcgctgaaaaaccttcaggtcaagtgtgctcagatcgaggccaaattttacgaagaggtacatgatttagagaggaaatacgccgttctgtaccagcctttgtttgacaagcgcttcgagatcataaatgccatctatgaacctacggaagaggagtgcgagtggaagccagatgaggaggatgaaatctccgagttgaaagagaaggctaaaattgaggacgaaaaaaaggacgaggagaaggaggatcccaaaggaataccagagttctggctaactgtgttcaagaatgtggacttactgtcggacatggttcaagagcacgacgaaccaatcctgaaacatctgaaggatattaaggtgaagttttccgatgctgggcagccaatgtcttttgtgttggagtttcacttcgagcccaacgaatactttactaacgaagtgttgaccaaaacctacaggatgagatctgaaccagacgacagtgatccctttagcttcgatgggcctgagattatggggtgtacagggtgtcagatcgactggaagaaaggtaaaaacgtcaccttaaagacaatcaaaaaaaaacaaaaacacaagggccgtggaacagttcgtacagtgacaaaaactgtctccaacgatagttttttcaatttctttgcaccacccgaagtcccggagagtggagatctagatgacgacgccgaagctatcctggcagcagattttgagatcggtcactttctgcgggagcgtataatcccacggtccgttctgtacttcacaggtgaggctattgaagatgacgatgatgactacgacgaggagggagaggaggcggacgaagagggcgaagaggagggggatgaagagaatgacccagattacgatcccaagaaggatcagaatcctgccgagtgcaaacaacagtag

SEQ ID NO: 233381 - DNA, 627 bp, synthetic construct
  misc_feature 1..627: note = Description of Artificial Sequence: Synthetic coding sequence
  source 1..627: mol_type = other DNA
atggtacaagagcacgatgagcctattctgaaacatttgaaagatatcaaggtcaagtttagcgatgccggacagccaatgtcatttgtcctcgaattccatttcgagcctaatgagtacttcaccaatgaagttctgactaaaacataccgcatgagatccgaacccgatgactctgatccgttttctttcgatggaccagaaattatgggctgcactgggtgccagattgactggaaaaaaggtaaaaatgtgacgctcaagacgattaagaagaagcaaaagcacaaaggccgagggaccgtgcgcaccgttaccaagacagttagcaatgattcattcttcaactttttcgccccaccggaggtgcctgagtccggggatctagatgacgatgccgaagcaattctggctgctgattttgaaattggtcattttctgagagagcgcattatcccacggtctgtgctgtacttcactggcgaggcaatcgaggacgatgatgatgactatgacgaggaaggagaggaggccgatgaggagggggaggaggagggggacgaggagaacgaccccgactacgaccccaagaaggaccagaatcccgcagaatgcaagcaacaatag

SEQ ID NO: 233382 - DNA, 987 bp, synthetic construct
  misc_feature 1..987: note = Description of Artificial Sequence: Synthetic coding sequence
  source 1..987: mol_type = other DNA
atggccgatattgacaatctccccagagtggtgaagcgcagagtcaacgccctgaagaacctccaggtcaagtgcgcccagatagaagcaaagttctacgaggaagtgcatgatctcgagcgtaaatacgccgtgctgtatcaaccactgtttgacaagcgcttcgagatcatcaatgcaatctacgagccaacagaggaagagtgcgagtggaagcctgacgaagaggatgaaatttccgaggagctcaaagaaaaagcaaagatcgaggacgagaagaaggatgaggagaaagaagacccgaaggggatccccgagttctggctgacagtgtttaagaatgtggacctacttagtgacatggtccaggagcacgacgaaccaattcttaaacatttgaaagacatcaaagtgaaatttagcgatgccggacagccgatgagttttgtcctcgaattccacttcgaaccaaatgagtattttaccaatgaagtccttaccaagacctaccgcatgaggagcgaaccagatgactccgaccctttttcctttgatggcccagagataatgggctgcaccggctgtcagatcgactggaaaaagggtaaaaacgttacactaaagacaattaagaaaaaacagaagcataaaggtaggggaacagtgagaactgttactaaaactgtctccaacgacagcttcttcaatttctttgccccacctgaggtgcccgaatcaggcgacctagatgatgacgcagaggccattctggcagcagattttgagatcggacacttcctgagggagcggatcattcccagatctgttctgtacttcacaggagaggctatcgaagatgatgatgacgactacgacgaggagggtgaagaagccgacgaggaaggcgaagaggaaggagatgaggagaacgatcctgattatgaccctaagaaagaccaaaaccctgcggagtgtaaacagcagtag

SEQ ID NO: 233383 - DNA, 1107 bp, synthetic construct
  misc_feature 1..1107: note = Description of Artificial Sequence: Synthetic coding sequence
  source 1..1107: mol_type = other DNA
atggcagatatcgacaataaagaacagtcagagttggaccaggacctggatgatgtcgaagaagtggaggaagaagagacaggcgaggaaaccaaactgaaagctagacaactgacggtgcaaatgatgcaaaacccgcagatcctggccgcactgcaagagcgtctcgatgggctggtggaaactcctaccggctacattgagtccctgcctcgcgtggtgaagcgcagagtgaatgccttgaaaaacctccaagtgaagtgtgctcaaatcgaggcaaagttttacgaggaggtgcatgacttagaaagaaaatatgcagtgctttatcaacccttatttgacaagagatttgagatcattaacgctatttatgaacccacagaggaggaatgtgaatggaagcccgatgaggaagatgaaatctccgaggagcttaaggagaaggccaagattgaagacgagaagaaggacgaggaaaaggaagaccctaagggcattcctgaattctggctcacagtcttcaaaaatgtggacctcctctcagatatggttcaggaacacgacgagcctatacttaagcacctgaaagacataaaggtcaagttcagtgatgcaggtcaaccaatgagcttcgttctagaattccatttcgagcctaacgaatattttactaacgaagttctgacaaaaacctatagaatgaggagcgaaccggatgattctgatccgttctcttttgacggaccagaaatcatggggtgcaccggttgccagatcgactggaagaagggaaaaaatgtgacactgaagacgattaagaagaagcagaagcataagggacgagggacggttcgcacagtcactaagacggttagtaatgattctttcttcaatttcttcgctccccctgaagtgcctgagtctggggacttggacgatgacgccgaggccatcctggctgcagattttgagattggccactttttgagggaaaggatcatccctaggtccgtgctgtactttactggcgaagctattgaggacgacgatgacgactacgatgaggagggcgaggaagcagatgaggtgatgttcaccaaatag

SEQ ID NO: 233384 - DNA, 795 bp, synthetic construct
  misc_feature 1..795: note = Description of Artificial Sequence: Synthetic coding sequence
  source 1..795: mol_type = other DNA
atggctgacatagataataaggaacagagtgagctggaccaggacctggacgatgtggaagaagtggaagaggaagaaacaggggaggaaactaaacttaaagcgagacaacttactgtgcaaatgatgcaaaaccctcagattctggccgctctgcaggagcgactggatggactggtggagacgcctacaggatacatcgagagcttgcctagggtagttaagaggcgggtcaatgctctgaaaaatctgcaggtgaagtgtgcccagatcgaggccaaattttatgaagaagtccatgacttggagcgcaagtacgctgtgctgtaccagcccctctttgacaagaggtttgagatcattaacgcaatctatgagcctacggaggaggagtgcgaatggaaaccagatgaggaggacgagatatccgaggagctcaaagagaaagccaagattgaggatgaaaagaaagatgaagagaaagaggatcccaagggcatccctgagttctggctgaccgtgttcaagaatgtggatctgctcagcgacatggtgcaggaacacgatgaacccatcctgaagcatcttaaagacattaaagtaaagttttctgacgctgggcagccaatgtcgttcgtcctagagtttcacttcgagcctaatgaatacttcactaatgaagtcttgacaaagacttatcggatgcgcagtgagcctgatgatagcgaccctttctcctttgatgggcctgagattatgggctgcaccggatgccagattgattggaagaagtag

SEQ ID NO: 233385 - DNA, 1158 bp, synthetic construct
  misc_feature 1..1158: note = Description of Artificial Sequence: Synthetic coding sequence
  source 1..1158: mol_type = other DNA
aaggaacagtccgagctggaccaggaccttgatgacgtggaagaagtggaggaggaggagaccggggaggagacgaagctcaaggctagacagctcactgtgcagatgatgcaaaacccgcagattctggccgcacttcaggagaggctggatggcttagtggagactcctaccggctacatcgaatccctcccaagggtggttaaaaggcgcgtgaatgccttgaagaaccttcaggtgaagtgtgcccagatcgaggcaaagttctacgaagaggtgcacgatctggaacgcaaatacgcagtgttgtatcagcctctgttcgataagaggtttgagataattaacgcgatttacgaacctaccgaggaggagtgcgaatggaaacctgatgaagaagacgagatttctgaggaattgaaggagaaggccaaaattgaggatgaaaaaaaagacgaagagaaggaggatccaaaaggcattcccgaattttggttgactgtctttaagaatgtggatctcctctctgacatggttcaggaacatgacgaacctattctcaaacacttgaaagacataaaggttaagttttctgatgcagggcagcctatgagcttcgtgctagagtttcactttgaaccgaacgaatacttcacaaatgaggtgttaacgaagacctaccgtatgcgctccgaaccagatgactctgaccccttttccttcgatggccctgagattatgggctgtacgggttgtcaaattgactggaagaagggcaagaacgttaccttaaagaccatcaagaagaagcaaaagcacaagggccgaggcactgtcagaacagtgaccaaaacagtgtcaaatgattcgttctttaatttctttgctcctccagaagtccctgaatctggtgacctcgatgacgacgcagaagctatcctggcagccgatttcgaaatcggccactttttaagagaacgcatcatcccacgttccgtgttatattttaccggggaggcaattgaggacgacgacgacgactatgacgaggaaggagaggaggccgacgaggaaggcgaagaggagggagatgaggaaaacgaccccgactatgatcctaaaaaagatcagaatcccgcagagtgtaagcagcagtag

SEQ ID NO: 233386 - DNA, 1521 bp, synthetic construct
  misc_feature 1..1521: note = Description of Artificial Sequence: Synthetic coding sequence
  source 1..1521: mol_type = other DNA
atggcagaagctgacttcaagatggtgtctgagccggtggcccacggagtggcagaggaagagatggcatctagcacatcagacagcggagaagaatctgattccagctcctccagcagctccacatcagactcctccagcagtagttcgacctccggctcctctagcggctccggcagcagctctagcagcagcgggtccactagctcccggtcgcggctctaccgcaaaaaacgcgtgccagagccttccagacgagccagacgcgcacctctgggcaccaactttgtggaccgactcccacaagctgtaagaaatagggttcaggccctccgcaatattcaggacgagtgtgacaaggttgacaccctattcctgaaagcaattcatgatctggaaagaaagtacgccgaactgaataagcctctgtatgaccgcaggttccaaatcatcaatgcagagtatgaacccacagaggaggaatgtgagtggaactctgaggatgaagaattcagttccgacgaagaagtgcaggacaatactcccagcgagatgcctcctctggagggagaagaagaggaaaatccaaaggaaaaccccgaggtcaaggccgaggaaaaggaggtacctaaagaaattccagaagtgaaagacgaggaaaaagaggttcctaaggaaattcctgaggtgaaagccgaagagaaggcggacagcaaggactgtatggaggcaactcctgaggtcaaagaggaccccaaggaagttcctcaggtaaaggctgacgataaggaacagcctaaagcaactgaggctaaagctcgagccgcagtacgcgaaacacataagcgggtacccgaagagaggttgcaagatagcgtggatcttaagagagctcgtaaaggaaagcccaaaagggaagacccgaaaggcatcccggattactggctgatcgtgttaaaaaacgttgataaactcggaccaatgatccagaaatatgacgaaccaattctgaagttcctatccgacgtgagtttaaagttcagtaagccgggacagccggtctcctacaccttcgagttccactttctgcccaatccctacttccgcaacgaggtccttgtgaagacatacatcatcaaagcaaaacccgatcataacgatccatttttttcctggggatgggagattgaagactgtaaagggtgtaaaatcgattggcgacgcggtaaggacgtcacagtgactaccacccagagccggaccacagctaccggggaaatcgagatccagcccagagtcgtgcctaatgcaagcttctttaatttcttctcccctccagagatccctatgattggcaagcttgagccacgagaggatgctatcctggatgaagattttgaaattggacagatacttcatgacaacgtaattctgaaaagtatctattattatactggagaggttaatggcacatattaccaattcggcaagcattacggaaacaagaagtatagaaagtag

SEQ ID NO: 233387 - DNA, 1500 bp, synthetic construct
  misc_feature 1..1500: note = Description of Artificial Sequence: Synthetic coding sequence
  source 1..1500: mol_type = other DNA
atggttagtgaaccagtcgctcacggagtggctgaagaggaaatggcttcaagtaccagtgactctggtgaagagagcgatagctcctccagttcttccagcacgagcgattcgtcctctagttcgagtacctccggttcatcttcaggctccggatcatcttccagctcctcaggttcaacaagtagtcgttccaggctgtacagaaaaaagcgggtgcctgagccatcaaggcgagccaggcgggctcccctggggaccaatttcgtggacagactgcctcaggcagtccgcaacagagtgcaggcattgcgaaacatccaggacgagtgtgataaggtcgatacgcttttccttaaagccatccatgacttggagcggaaatatgctgaacttaacaaaccgttatatgaccggaggttccaaataatcaacgcggaatacgaaccaacggaagaagagtgcgaatggaactctgaggatgaagaattcagcagtgacgaggaggtgcaggacaacacgccatctgaaatgccacccttggaaggagaggaagaagagaatcccaaggaaaacccagaagtgaaggcagaggaaaaggaggtgcccaaggagatcccggaagtcaaggatgaagaaaaagaggtgccaaaggagattcctgaggtgaaggctgaagagaaagctgattcgaaggactgcatggaagccaccccagaggtgaaagaggatcccaaggaggtcccccaggtcaaagcagatgataaggagcagccaaaagccacggaggcaaaagctagagcagcggttagggaaacccacaaaagagtccccgaggaacgactgcaagattcagtcgatctcaaaagggcaagaaaggggaagccgaagcgcgaagacccaaaagggatccctgactattggcttatcgtgcttaagaacgtggataaactggggcctatgatccagaaatatgacgaacctattctaaagtttctgagcgatgtttccctgaagttttctaaaccaggccagccagtgtcctatactttcgaatttcacttcctgccgaatccatactttcgaaacgaagtgctggttaaaacctatatcataaaagcgaagcctgatcacaacgacccgtttttctcttgggggtgggaaattgaggactgcaagggctgcaagatcgactggagaaggggtaaagacgtgaccgtcactaccacccagagtcggacgacagccactggggagattgaaatccagcctcgggtggtgcctaatgccagcttcttcaacttcttttccccccctgaaattcctatgattggtaagctggagcctcgtgaagatgcaattcttgacgaagactttgagattggccaaattctacacgacaacgtgatactgaagagcatttactactatacaggcgaagtgaacggaacgtattaccagtttggaaaacactacggtaacaagaagtatcggaaatag

SEQ ID NO: 233388 - DNA, 1128 bp, synthetic construct
  misc_feature 1..1128: note = Description of Artificial Sequence: Synthetic coding sequence
  source 1..1128: mol_type = other DNA
atggccgaccacagtttcagtgatggcgtgcccagtgattccgtcgaggccgctaaaaatgcatccaacaccgagaagctcaccgaccaagtgatgcagaatcccagagtccttgccgcactgcaagagagactggataatgtgcctcatactcccagcagctacatagagactcttccaaaagcagtgaaacgtcggattaatgcactgaagcaattgcaagtgaggtgcgcacacatcgaagcgaagttttacgaggaggtacacgatctcgagcgaaaatacgcagccttatatcagcccctattcgataaacgaagggagtttatcaccggcgacgtggaaccaacagacgccgagtctgaatggcactctgaaaacgaggaggaggagaagctggccggagatatgaagagtaaagtggtggtcaccgaaaaagcggcagcgacagccgaagagccagacccaaaaggtatacctgaattttggtttacaatttttcggaacgtggatatgctgagcgaactcgtccaggaatatgatgaacccattcttaaacaccttcaagatatcaaggttaagttcagcgacccaggacagcccatgtcttttgtgttagaatttcactttgagcccaacgactattttacaaatagtgtgcttacaaagacttataaaatgaagtctgagcccgacaaggccgaccccttttctttcgaaggacctgagatcgttgactgtgatggctgcactattgactggaaaaaaggaaaaaacgtgactgtgaagaccatcaagaaaaaacagaagcacaaagggcgagggacagtgaggaccatcactaagcaggtacctaacgaatctttttttaacttttttaatcccctcaaggctagtggagacggggagtccctggatgaagactcagaattcacacttgcctctgacttcgagattgggcacttttttcgggaacggatcgtgcctagggccgtcttatatttcacaggagaagctatcgaagatgacgacaattttgaggagggcgaggaaggagaagaagaggagctggagggggatgaagagggggaagacgaagacgacgcggagatcaacccaaaggtctag

SEQ ID NO: 233389 - DNA, 1161 bp, synthetic construct
  misc_feature 1..1161: note = Description of Artificial Sequence: Synthetic coding sequence
  source 1..1161: mol_type = other DNA
atggctgaccacagctttagtgacggagtgcccagcgatagcgtcgaagccgctaagaatgcctccaatactgagaaacttaccgatcaggtgatgcaaaaccctcgagtgttagcagcattacaggagcgactcgacaacgtgccgcatacaccttcgagctatatcgagaccctccctaaagcggttaagcgtaggattaatgccctgaagcagcttcaggtgcgctgtgcccatatagaagcaaaattttatgaagaggtgcacgacctggagaggaagtacgcagcactctaccaacccctcttcgacaaaagaagagaatttatcaccggagacgtcgaacctactgacgcagaaagcgagtggcactcagagaacgaggaggaggagaagctcgctggggatatgaaatccaaggtggttgtaactgagaaagccgctgctactgccgaagaaccagatcctaagggaatcccggagttttggttcactattttccgcaacgtagatatgcttagcgagctggtccaagagtacgatgaaccaatcctgaaacacttacaagacatcaaggtgaagttttccgacccaggtcagcctatgtcctttgttttggaatttcattttgaacccaacgattacttcacaaatagtgtcctcacgaagacatacaagatgaagagtgagcccgacaaagctgacccattttcttttgagggtccggagattgtcgattgcgatgggtgcaccatcgactggaagaaaggcaagaacgtgaccgtcaaaaccatcaaaaaaaagcaaaagcataaaggacgtggcaccgtccggacaataaccaagcaggtgcctaatgaatctttctttaactttttcaacccccttaaaggtaagggccagtccaaatctaaagacgaagatagtgagtttacccttgcaagcgattttgagatcggacacttttttagggaaagaatcgtgccacgcgctgtgctgtacttcaccggcgaggctattgaggacgatgacaactttgaagaaggagaggagggcgaggaggaagagcttgaaggggacgaggaaggcgaggacgaggacgacgctgaaattaacccaaagaaggagccttcacaaccagccgaatgtaagcaacagtag

SEQ ID NO: 233390 - DNA, 537 bp, synthetic construct
  misc_feature 1..537: note = Description of Artificial Sequence: Synthetic coding sequence
  source 1..537: mol_type = other DNA
atggccgatcacagcttttccgacggcgtcccctcagactccgtggaagctgctaagaatgcctccaacaccgagaagctgaccgaccaggtcatgcaaaatcccagagtattagcggcactgcaggagagactggacaatgttccacacacaccttcctcatacattgagacactacctaaggccgtaaaacgacgcatcaatgccctgaagcaacttcaggtgagatgtgcacatattgaggcaaagttctatgaggaagtacacgatctggagagaaaatacgctgcgctctaccagccccttttcgataagcgcagggagttcattacaggggacgtagagccaactgacgcggagagcgagtggcactccgagaatgaggaggaagagaaattggcgggagacatgaaatctaaagttgtggtcacggaaaaggccgctgcgaccgccgaggagcccgatccaaaaggtattccagagttctggtttactattttcaggaacgtcgatatgctgagcgagctggtgcagtag

SEQ ID NO: 233391 - DNA, 1161 bp, synthetic construct
  misc_feature 1..1161: note = Description of Artificial Sequence: Synthetic coding sequence
  source 1..1161: mol_type = other DNA
atggccgaccactccttctctgacggggttcccagcgactctgttgaggcagctaagaatgccagtaatactgagaagttgacggaccaggtgatgcagaacccccgtgtgctggcagcgttacaggagaggttagacaatgtgcctcatactccatctagctacatcgagaccctgcccaaggctgtgaagagaaggattaatgcgctaaagcagctgcaggttcggtgtgcccatattgaagctaaattctacgaagaggtacacgatttggagcgcaagtatgcggctctgtaccaacccctgttcgataagcggagagagttcatcaccggagacgtggagccaacggatgccgagtcagagtggcattccgaaaatgaggaggaagaaaaactcgcgggagacatgaagagcaaggtggttgtcaccgagaaggcggcagcgactgccgaggaacctgatccaaaggggattcctgagttttggtttaccatatttcgcaacgtggatatgctgagcgaactggtgcaggaatacgatgagccaattctgaagcacttacaggacattaaggtgaaattcagtgatcccggacagccaatgtcctttgttcttgagtttcactttgagccaaatgattattttacaaatagcgtgcttacaaagacttacaagatgaagagcgagccagataaagcagaccctttcagcttcgagggccctgaaatcgtggactgcgacggttgcactatcgattggaagaaaggcaagaacgtgaccgtaaaaaccataaagaagaaacagaaacataaggggaggggaactgtgcgaacgattaccaagcaagtgccaaatgagagcttctttaatttctttaaccccctcaaagccagcggggatggagaaagcctcgacgaagattctgaattcactctggcatcggattttgaaatcggccatttcttccgtgaacggatcgtacctcgcgcagtcctttattttacaggagaagctatcgaggacgacgacaattttgaagaaggtgaggaaggcgaggaagaggaactggaaggggatgaggaaggagaagacgaagatgacgcagaaattaatcctaagaaagaaccctcacaacccgcagagtgcaagcagcaatag

SEQ ID NO: 233392 - DNA, 387 bp, synthetic construct
  misc_feature 1..387: note = Description of Artificial Sequence: Synthetic coding sequence
  source 1..387: mol_type = other DNA
atggccgaccacagtttctccgatggggttccatcagattccgtggaagcagctaagaacgcatccaatacagaaaagcttacagatcaggtcatgcagaatccacgagtgttggccgctctccaggaacggcttgacaacgtaccgcacacaccctccagttacatcgaaactctgccaaaagccgtcaagaggaggattaacgcactaaaacagcttcaggtcaggtgtgctcacatcgaggccaagttctacgaagaagtgcatgacttggaaagaaaatacgccgctctgtaccagcccttatttgacaagcggcgtgagtttatcaccggcgatgtggagcccacagacgccgaaagcgagtggcactctgagaatgaatag

SEQ ID NO: 233393 - DNA, 423 bp, synthetic construct
  misc_feature 1..423: note = Description of Artificial Sequence: Synthetic coding sequence
  source 1..423: mol_type = other DNA
atggccgaccatagtttttcggatggtgttccatccgacagcgtggaagccgcaaagaacgcatcaaacactgaaaagttaacggaccaggtgatgcagaacccccgtgttctggccgctctgcaggagagactggacaacgttccccacacaccaagctcctatatcgaaacactccctaaagccgtgaagcgccgaatcaatgccctgaagcagctgcaggtccgatgcgcccatatagaggctaagttctacgaggaggttcacgacctcgaaaggaagtatgctgcactataccagccactttttgacaagcggagagagttcataaccggcgacgtggaacctaccgatgccgagtccgaatggcacagcgaaaatgaggaagaggagaagttggccggagatatgaaaagcaagtag

SEQ ID NO: 233394 - DNA, 402 bp, synthetic construct
  misc_feature 1..402: note = Description of Artificial Sequence: Synthetic coding sequence
  source 1..402: mol_type = other DNA
atggcggaccactccttttccgatggagtcccttccgatagcgtggaggccgcaaaaaacgcctctaataccgagaagctgaccgaccaagtcatgcagaatcccagggtcctggctgccctgcaggagcggctggacaacgttccccacaccccctccagttacatcgaaaccctgccaaaggcggttaaacggagaataaacgctctaaaacagctgcaggtgcgttgcgcccacattgaggccaaattctacgaggaagtgcacgacctggaaagaaaatacgcagccctgtaccaacccctgtttgacaaacgcagagagtttattactggcgacgtggaacctacagatgcagagtcggaatggcactcagaaaacgaggaggaggagaagctgtag

SEQ ID NO: 233395 - DNA, 324 bp, synthetic construct
  misc_feature 1..324: note = Description of Artificial Sequence: Synthetic coding sequence
  source 1..324: mol_type = other DNA
atggcggaccacagttttagcgacggggtaccctccgattctgttgaggctgctaagaatgcctctaataccgaaaagctcactgaccaggtaatgcagaacccacgggtccttgcggctcttcaggagcggttagataacgtgcctcacacaccctcctcctatatcgagacactacctaaggccgtcaagcgccgtattaacgccctgaagcaactgcaagtgcgctgtgcccatatagaagccaaattctatgaggaagttcatgacctggaaaggaaatacgccgctctgtatcaaccgctgttcgacaaacgacggtag

SEQ ID NO: 233396 - DNA, 237 bp, synthetic construct
  misc_feature 1..237: note = Description of Artificial Sequence: Synthetic coding sequence
  source 1..237: mol_type = other DNA
atggctgaccactctttcagcgacggagtacccagtgatagcgtagaggcggctaaaaatgccagtaacacagaaaaattgaccgaccaagtgatgcagaatccacgcgtcttagctgccctccaggagcggctcgacaacgtaccccatactccatcttcctacattgagacgttgccaaaggccgtcaagcgacggattaatgccctgaagcagcttcaggtgaggtgcgcatag

SEQ ID NO: 233397 - DNA, 549 bp, synthetic construct
  misc_feature 1..549: note = Description of Artificial Sequence: Synthetic coding sequence
  source 1..549: mol_type = other DNA
atggctgattccgaaaaccagggacccgcagaacctagtcaagccgctgccgctgcagaggccgcagctgaagaagttatggccgagggaggagcccaaggcggtgactgcgattcagctgcaggggaccccgattccgccgctggacagatggccgaagagccacagacgcctgccgaaaatgcaccaaagcccaaaaatgattttattgaaagccttcccaattctgtcaagtgtagggtactcgctctgaagaaactgcagaagaggtgtgataagatcgaggctaaattcgacaaagaattccaagccctggagaaaaagtacaacgacatctacaaaccactcctggcaaagatacaggagcttaccggcgagatggagggctgcgcatggaccctcgagggtgaagaggaagaggaagaagaatacgaggacgacgaagaagagggggaggatgaagaggaggaagaagcagccgcagaagcggcagcaggagcgaagcacgatgatgcccatgcggagatgcctgacgacgccaaaaagtag

SEQ ID NO: 233398 - DNA, 438 bp, synthetic construct
  misc_feature 1..438: note = Description of Artificial Sequence: Synthetic coding sequence
  source 1..438: mol_type = other DNA
atggctgattccgaaaaccaagggccagccgaacctagccaggccgcagccgcagcagaggccgcagccgaagaagtaatggccgaaggaggagctcaaggtggagattgcgattcagccgctggcgaccctgatagcgctgccggacaaatggccgaggaaccccagaccccagcagagaacgcccctaagccaaaaaacgactttatcgagtccctgcctaactctgttaaatgcagggtcctcgctctgaagaaactccagaagcggtgtgataagatcgaggccaagttcgacaaggaattccaggcactcgagaagaaatacaatgacatttacaagccccttctggctaagattcaagagttgacaggggagatggagggatgcgcatggacgctggagggtgaagagcgacggaagagagtgcggggttag

SEQ ID NO: 233399 - DNA, 963 bp, synthetic construct
  misc_feature 1..963: note = Description of Artificial Sequence: Synthetic coding sequence
  source 1..963: mol_type = other DNA
atggaggaggtacctcatgattgccctggtgccgacagtgcccaagctggtagaggtgcttcatgtcagggctgtcccaatcagcgtctttgcgcatctggagctggcgctacccccgacactgctatagaggagataaaggagaagatgaagacagtaaagcataaaattctagtcctgagcggcaagggtggcgtagggaaaagtaccttttcggcacatctggctcatggcctggcagaggacgaaaacacccaaatcgccctgttagatatcgatatttgtggtccatcaattcctaagattatgggactggaaggcgagcaggtccaccagagcggctcgggttggtccccagtctatgtggaagataacctgggagtgatgtctgttggattcctactgagttcccccgatgacgcagtaatctggaggggtccaaaaaaaaacggcatgataaagcagtttcttagagacgtggactggggagaggtggactacttaatcgtagacacaccaccaggtacatctgacgagcacctgtcagtagtgagatacctagctaccgctcatattgatggagccgtcatcatcacaacgcctcaggaagtcagcttgcaggatgtgaggaaggaaataaatttctgtcggaaagtcaaactccccataattggcgtcgttgagaatatgagcggcttcatttgccccaagtgcaagaaggagtcgcagattttccctcccacgactggcggtgctgaactgatgtgccaggatcttgaagtgcctctgctggggagagtccctctggacccactgattgggaagaactgcgacaaggggcagtctttctttatcgacgccccagatagtcccgctacactggcatacagaagcatcattcagcgaatccaagaattctgcaacctgcatcagtcaaaggaagagaaccttatctccagttag

SEQ ID NO: 233400 - DNA, 930 bp, synthetic construct
  misc_feature 1..930: note = Description of Artificial Sequence: Synthetic coding sequence
  source 1..930: mol_type = other DNA
atggaggaagttcctcacgactgccccggagctgactcagcccaggcaggtaggggcgcttcctgccagggctgtcctaaccagagattatgcgcgagtggagcaggcgctacaccagacaccgctatcgaggaaattaaagaaaaaatgaagaccgtcaagcacaaaatcctggttctgtctgggaagggcggagtcggcaagtccaccttcagcgcccatctggctcatggactcgcggaggatgagaacacccagatcgccctcctggacattgatatatgcggcccttcaatccctaagattatgggtctggaaggcgagcagtatgtcgaggacaacctgggcgtcatgagtgtcgggttcctcctgagtagtccagacgacgccgtgatctggagaggccctaaaaaaaacgggatgataaagcaattcctgcgggacgtggattggggtgaagtggactatctgatcgttgacacccccccaggcaccagcgatgaacatctgagcgttgtgaggtatctggccacagctcacatcgatggggctgtcatcattaccacccctcaagaggtcagcctgcaggacgttcgcaaggaaataaacttttgtcggaaagtgaaattgccgattataggcgttgtggagaatatgtccggatttatatgtcccaagtgcaaaaaagagagccagattttccccccaacgactggaggagccgaactgatgtgccaagacttagaggtccccctgttggggcgagtgcctctcgaccccttgatagggaaaaactgtgataaggggcaatcgttcttcattgacgcgcctgattccccagcaaccctagcttacaggtccatcatacagaggatacaggagttttgcaatcttcaccagtccaaggaagaaaatttaatttcttcctag

SEQ ID NO: 233401 - DNA, 816 bp, synthetic construct
  misc_feature 1..816: note = Description of Artificial Sequence: Synthetic coding sequence
  source 1..816: mol_type = other DNA
atggaggctgccgcagagccagggaacctggcaggcgtcaggcatataatcttagtgctgagcgggaaaggcggagttggaaagtccacaatatctacagaactggcactagctctccgccatgccggtaagaaggtgggtattctggatgtcgatctgtgcggtccctcaattcctagaatgttaggcgctcagggtagagccgtgcatcaatgcgatagaggctgggctccagttttcttggatagggagcagagtatctctctcatgagtgtgggatttcttcttgagaagcccgacgaggcagtggtctggcgtggtcccaagaaaaatgcactgattaaacagttcgtatcagatgtggcctggggagaattggactatctggttgtagacactccgcctgggacaagtgatgagcacatggcaaccatcgaggcgctcaggccctatcagcccctgggagcactggtagttacaactccacaggcagtgagtgtgggagacgtgaggagggaattaaccttctgccgtaaaaccgggctgcgggtcatgggaatcgttgagaatatgtccggctttacttgcccgcactgtaccgaatgcacctccgtattttccagagggggaggggaagagctagctcagcttgccggagttccattcctgggatcagtgcctctggacccagccttaatgagaacacttgaggaaggccacgacttcattcaagaatttcctggatcacctgcttttgcagccctgacctcaatcgcccagaagatactggacgcaactcccgcatgcctgccatag

SEQ ID NO: 233402 - DNA, 393 bp, synthetic construct
  misc_feature 1..393: note = Description of Artificial Sequence: Synthetic coding sequence
  source 1..393: mol_type = other DNA
atggctacgatcgaggcactgaggccctatcaaccactgggggcactcgtggtgaccaccccgcaagccgtctctgtaggcgacgtgcgccgagaactcacattttgccgtaagactggtctgagggttatgggtattgtcgaaaatatgtccggattcacttgtcctcactgtactgaatgtacctcagtcttcagtagaggaggcggagaagagcttgcacagctggccggtgtgccatttctgggtagcgtgccattggatccagctttgatgcgcactctcgaggaaggacacgacttcatccaggagttccccggtagtcctgcatttgccgctctgacgtctattgcccagaaaatcctggacgcaactcccgcttgcctcccatag

SEQ ID NO: 233403 - DNA, 960 bp, synthetic construct
  misc_feature 1..960: note = Description of Artificial Sequence: Synthetic coding sequence
  source 1..960: mol_type = other DNA
atgggcatttggcaacggctcttactcttcggaggcgtctcgctgagggctggtgggggtgccaccgcaccattaggaggatcaagggccatggtgtgtggaaggcagttaagcggtgctggctcagagacgctgaaacaaaggcggacccagatcatgagtagaggcctgccaaaacagaagccgatagagggtgtgaaacaggtgatcgtagtcgcgtccgggaaggggggtgtcggcaagtccaccaccgcagtgaacctggccttagctctggccgcaaacgactcttccaaggctatcgggctgcttgacgtcgacgtttatggacccagcgtaccgaaaatgatgaatcttaagggcaatccggaactctcgcaatctaatttaatgaggccgctccttaactacggaattgcttgtatgtcaatgggatttctggtggaggaatcagaaccagtggtctggcgaggactgatggttatgtctgcaatcgagaagctgctgcggcaggtggattggggacagctcgactacttggtggtggacatgccacctggaacaggagatgtgcagttgtcggtctctcaaaatattcctattacaggcgctgtgatcgtttctactccacaggatatagccctcatggacgcccacaaaggagccgagatgttccggagggtgcacgtgcctgtactgggtttggtgcagaatatgtcagtcttccaatgccctaagtgcaaacacaagacacacatcttcggcgcagacggggctagaaagctcgcccagacactggggttggaagtgttaggcgacatccccctgcaccttaacatccgcgaggcttccgacaccgggcaaccaattgtattttctcagcccgagagtgacgaagcaaaagcctatctgagaattgccgtagaggtggttcgaagacttccatccccatctgagtag

SEQ ID NO: 233404 - DNA, 672 bp, synthetic construct
  misc_feature 1..672: note = Description of Artificial Sequence: Synthetic coding sequence
  source 1..672: mol_type = other DNA
atgagtaaggcaattgggcttcttgacgtagacgtctacgggccttccgtccctaagatgatgaatttgaaaggcaatcccgaattgtcccaaagtaacttgatgaggcctttgctcaattacggaatcgcgtgcatgtccatgggcttcctggtcgaggagtctgaaccagtcgtgtggagagggttgatggtcatgagtgctatcgaaaagctcctgcggcaggttgattgggggcagttggattatttggtagtggatatgccccctggaaccggcgacgttcagctgtccgtgagtcagaatatccctatcaccggcgcagtcattgtgagcacaccacaagacattgccctgatggatgcacataagggggctgaaatgtttaggcgtgtgcatgtaccagtgctgggactcgtgcagaatatgtcagtattccagtgccccaagtgcaagcacaagacacatatcttcggcgcagacggagccaggaagctcgcgcaaacactgggcttggaggtcctaggtgatataccactacatctgaatattcgcgaggcttcggacaccggtcagccgatcgttttctctcagcccgaatcggacgaagccaaggcctacctgcggatcgcagtagaggtagtgcgacgtctgccctccccttccgagtag

SEQ ID NO: 233405 - DNA, 3123 bp, synthetic construct
  misc_feature 1..3123: note = Description of Artificial Sequence: Synthetic coding sequence
  source 1..3123: mol_type = other DNA
atgggggaggaggggggttcagccagccatgatgaggaagagcgcgcttccgtgttactgggccacagcccaggctgtgagatgtgttcacaggaggcgtttcaggcacaaaggtcacagctcgttgagcttctggtatccggttctctggaagggttcgagagcgtcctggactggctgctctcctgggaggtattgtcatgggaggactacgaaggctttcatctgctgggccaacctttatcccacttagccaggcggctcctggatacagtctggaataaggggacgtgggcatgtcagaaactcatcgctgctgctcaggaagctcaagctgactcacaaagccccaagttacatggctgctgggatccgcactctctgcatccagccagggacctccaaagccaccggccagccatcgtgaggcgcctccatagccacgtggagaatatgttagatctggcctgggagaggggatttgtgtctcaatacgaatgtgacgagatccggctcccgatattcacacccagtcagcgtgcaaggagactactggatctggcaacagtgaaagctaacggcctggctgcatttttattacagcatgtgcaggagctacctgtgcctctggcccttcccctggaagctgctacctgcaagaagtatatggccaagttacgcaccacagtatccgctcagtctagattcctttccacctacgatggcgcagagacactgtgccttgaggacatttacacggagaatgtgctcgaagtgtgggccgacgtgggaatggcagggcctcctcagaagtccccagcaacactcggccttgaagagctgttctccacccccggacacttaaacgatgatgccgatacagtcctcgtcgtaggggaggccggatccggcaagtctacattgcttcaaagacttcacctactttgggcagctggccaggatttccaggaatttctgtttgtcttccccttctcgtgcagacagctgcagtgtatggcgaagcccctctccgtgaggactctcttgtttgagcactgttgttggccagacgtagggcaagaagacatctttcagcttctgctagaccatcctgacagagtgctcctgacctttgacggcttcgatgagttcaaattcaggtttacagaccgtgaacggcattgctctcccaccgaccctactagcgttcagaccctgttgttcaacctgctccagggcaatctgttgaagaatgctagaaaggtggtaacctctcgcccagcagcagtctctgcgtttcttcggaaatatattaggaccgaattcaatttgaaaggattctcagagcagggcattgaactctacttgagaaagcgccaccatgagccaggcgtggccgataggctgattaggctgctgcaagagacgagcgccctgcacgggctgtgccacctgcctgtgttctcctggatggtttccaagtgccaccaggagctactgttacaagagggcggttcaccaaaaaccacgacagatatgtatctgttgattctgcaacacttcctcctgcatgccacccctcccgactccgcctcccagggcctggggccttccctcctgcgcggaaggctgccgactcttctccatctaggcaggctggcactttggggactgggcatgtgctgttacgtgtttagtgcgcagcagctacaggctgcccaggtcagcccggacgacatctcactcgggtttcttgttcgtgctaaaggcgtggtgccaggatccacagcacctttggaattcctacatattactttccaatgtttcttcgccgcattctatttagctctgagcgccgacgtgccccctgcactgctgcgccaccttttcaactgcggtcggccagggaatagccccatggccaggctcctgccaaccatgtgcattcaggcatctgaaggaaaagattccagtgtggctgccctgctccagaaggccgagcctcataatttgcaaatcacagcagcctttcttgctgggctgctttccagggagcactgggggctgctagctgaatgccagaccagcgagaaagccctacttaggcggcaggcttgcgccaggtggtgccttgcaaggagtctccgcaagcactttcactccattcccccagcagccccaggggaggctaagtcagtccatgcgatgcccggatttatctggctaatccgatccctgtacgagatgcaggaagagagactcgcccgaaaggccgcacggggattaaacgtagggcacttaaaactcacattctgctctgtaggcccaaccgaatgcgccgctcttgcgtttgttctgcagcatctacgcaggccagtggctctgcaattggactataactccgtgggcgacatcggggtggaacagctcttaccttgcctgggagtttgcaaggctctgtacttgcgggataataacatctcggatagaggaatctgtaaactcattgaatgtgctctccattgcgagcagctgcagaagttggccttgttcaataacaagctcacagatggctgtgcacacagcatggccaaattgctggcctgtaggcagaattttttggcccttcggctcggaaataattatattaccgcagccggtgcccaagtgctcgcagaagggctgagaggtaacacatctctccagttcctgggattctggggaaatagggtgggcgacgaaggcgctcaagcactggccgaagctctgggcgaccatcaatctctgcgctggctcagtttggtgggtaataatatcggaagtgtgggagctcaggcgctcgcactgatgctggcgaaaaatgttatgctggaagagctgtgtcttgaagagaatcacctgcaggatgaaggggtctgctccctcgctgagggtctcaaaaaaaacagttctctgaagattcttaaactgagtaacaattgcatcacttaccttggcgcagaggctctgttgcaagcgctggaaaggaatgatacaatcctggaggtatggttacgtggcaacaccttctctctagaagaagtggataaactgggatgtcgggacacccggctgctgctttag

SEQ ID NO: 233406 - DNA, 543 bp, synthetic construct
  misc_feature 1..543: note = Description of Artificial Sequence: Synthetic coding sequence
  source 1..543: mol_type = other DNA
atgtggctgctacccccaggccaggtttttaacgccttcttcccatccagactaggaaataactacatcacagccgcaggggcacaggtgctcgccgagggcttgcgcggaaacacgtcactacagttcttaggcttttggggcaacagggtaggagatgaaggagcccaggcccttgccgaggccttaggcgatcaccaatctttaaggtggctctcacttgtgggcaacaacattggctccgtcggggcacaagcactggctctgatgttggctaagaatgtcatgctggaggagctgtgcctggaggaaaaccacctgcaggacgagggagtgtgcagtttagcagaaggccttaagaagaatagcagtctcaagatactgaaactgagcaacaattgtatcacatatttgggggcagaagcccttctgcaagctttggagcgaaacgacaccatcctggaagtgtggctgcggggaaacaccttctctctggaggaggttgacaaactgggctgccgcgatacgcgccttctgctttag

SEQ ID NO: 233407 - DNA, 1008 bp, synthetic construct
  misc_feature 1..1008: note = Description of Artificial Sequence: Synthetic coding sequence
  source 1..1008: mol_type = other DNA
atggaggattccgggaagacattctcatctgaggaggaggaggcgaactattggaaagaccttgctatgacctacaagcagcgggcagaaaatacgcaagaggaactgcgcgaattccaggaaggatcacgcgaatacgaagccgagctcgagacacagcttcagcaaatcgaaacaaggaacagggacctgctctcggagaacaaccggttgagaatggagctggaaacaattaaggagaaatttgaagtgcagcattcagagggttaccgacaaatctcagccctggaggatgatctggcgcagactaaggccatcaaggaccaactacagaaatacatcagagagcttgagcaggcaaatgacgacttagaaagggccaagagagcaaccatcatgagcttggaagactttgagcaacgcttgaaccaggccatcgagcgaaatgccttcttagaaagcgagctggatgagaaagagaacctccttgagagcgtgcagcgattgaaggacgaagccagggacctgcgccaggagctggctgttcaacagaaacaggagaaacctcggacacccatgcctagtagcgtggaggccgagcggaccgatactgcggtgcaggccaccggatctgtcccaagtacgcctattgcccataggggtccttcaagctcccttaatacaccaggaagcttccgcagaggactcgatgatagcaccggcggtacacccctgactcccgctgccagaattagcgctttaaatatagtcggagacctcctgcggaaggtgggtgctcttgaaagtaaactcgcttcatgtcgtaatctggtgtatgaccagagccctaaccgaactggcggaccagctagtggcagaagttccaaaaaccgggacggtggagagaggaggccaagtagcacttcagtccctcttggcgacaaggggctggacacaagctgccggtggctaagtaaatcaacaacccgcagtagctcctcctgctag

SEQ ID NO: 233408 - DNA, 1041 bp, synthetic construct
  misc_feature 1..1041: note = Description of Artificial Sequence: Synthetic coding sequence
  source 1..1041: mol_type = other DNA
atggaggattcaggtaagacgtttagctcagaagaagaggaagccaactactggaaagacctcgctatgacgtataaacagcgggctgaaaatacgcaggaagagttgagggagtttcaagagggtagtcgcgagtatgaagctgaactagagacccagcttcaacagatcgaaacccgaaaccgcgatctcctaagcgaaaacaatcgcctgagaatggaactggaaactatcaaggagaagttcgaggtgcagcactccgaagggtaccgccagatctctgcactggaggacgatctagctcagaccaaagccatcaaggatcagctgcagaaatacattagagagctcgaacaagcaaacgacgatttggagagggccaagcgagccacaattatgtccctagaagactttgaacagcggctgaatcaagctattgagaggaatgcattccttgagtcggaactggatgaaaaggaaaacctgctcgagtcggtgcaacgactcaaggatgaagcaagagaccttcgccaggaactcgctgtgcagcaaaaacaggagaagcccagaaccccaatgcccagcagcgtggaggcagaacgcactgatacggcggttcaggctaccggctcagttccttctacccccatcgctcatcgcggacctagcagctcccttaatacccctggatctttccgtagggggctggatgactccaccggaggaacacccttaacaccagctgccagaataagcgctttgaacattgtaggggacctgcttcgcaaggtgggggcactggagtccaagctcgcatcttgccgtaatcttgtttacgatcagtcccccaacagaactgggggacccgctagtggtaggtccagcaaaaatcgcgacgggggtgagaggaggccttccagtacatccgtccccctgggggacaaggggcttggtaaaaggctggaatttggcaagccgccaagccacatgagttcgtctcctctgccgtctgcccaaggcgtcgtgaagatgctgctctag

SEQ ID NO: 233409 - DNA, 1008 bp, synthetic construct
  misc_feature 1..1008: note = Description of Artificial Sequence: Synthetic coding sequence
  source 1..1008: mol_type = other DNA
atggaagattctggcaagactttcagctcagaagaggaagaggcaaactactggaaggacctggccatgacatacaaacaacgggctgaaaacactcaggaggagttacgtgagtttcaagagggctcccgagaatacgaggcagagctcgagactcagctgcagcagatcgagacgagaaacagagacctgttgtctgaaaataatagactgcgcatggagctggaaactattaaagagaagtttgaggtccagcatagtgaggggtatcggcagatttcagcactggaagacgacctggcccaaacaaaggctattaaggatcagcttcaaaaatacattagagagctggagcaagctaacgatgatctggagagggctaaacgcgcaaccatcatgtcactggaagatttcgaacagcgactgaaccaggccatcgaacggaatgcctttctagagtcagaactagacgagaaagaaaatttactcgagagcgtacaacgcttgaaggatgaagcacgggatctgcgacaagagctggctgttcagcagaaacaggaaaagcccaggactcccatgccaagttcagttgaagccgaaagaacagataccgctgtgcaggcgacaggcagcgtgccgagcactccgattgctcatcgtgggccatcatcatccttaaacacgccaggctcgttcaggcggggactggacgactcgaccgggggaactccgttaactcctgccgcacggattagcgctctcaacatagttggtgatctgctgcgaaaggtaggggctctcgagagcaagctggcctcttgtagaaacctggtctatgatcagtcccccaacagaaccggcggaccagcctccggccgttctagtaaaaaccgcgacggaggcgagcggagaccctcctctaccagcgttccacttggagataaaggactggatacatcatgtaggtggcttagtaaaagcacaactaggagcagctccagctgctag

SEQ ID NO: 233410 - DNA, 1008 bp, synthetic construct
  misc_feature 1..1008: note = Description of Artificial Sequence: Synthetic coding sequence
  source 1..1008: mol_type = other DNA
atggaggactccggaaagacctttagctccgaagaggaagaggcaaactactggaaagatctcgctatgacctataagcagagggccgagaatacccaagaagagctccgagagttccaggagggatctcgcgaatatgaggccgaactcgaaacgcagcttcagcagatcgaaacccggaacagggacctgctttccgagaacaacaggttacggatggagctcgagaccatcaaggaaaaattcgaagtgcagcacagcgagggttatagacagatatctgctctagaggacgatttggcacaaacaaaggcaatcaaagaccaattacaaaagtatataagggagctcgagcaggccaacgacgatctggagcgggcaaaaagagcaacaatcatgtcattggaagacttcgagcaacgcctcaatcaggccattgagaggaatgcattcctggagtcagagctcgacgagaaggagaatttgctcgaaagcgtacagaggttgaaggatgaagctagagatctgagacaggagctcgctgtccagcagaaacaagaaaagcctcgaacccctatgcccagctctgtggaagcggaacggaccgacactgctgtacaggcaactggctccgttcccagtactccaatcgcccacaggggaccatcgagcagcttaaacacacccggatccttcaggaggggcctcgacgacagcaccggcggaactcctctcacacccgcagccagaatctcagcccttaatattgtgggcgacctcctgagaaaagtgggcgctctggaaagcaaactggcctcctgtaggaacctcgtttacgatcaaagtccgaaccggactggaggtcctgcttctggcaggagctctaagaacagagatggcggagagcgaaggcccagctccaccagtgtcccgttaggcgacaaggggttagacacatcatgtcggtggctttcaaagtcaacaaccagatctagctccagttgttag

SEQ ID NO: 233411 - DNA, 471 bp, synthetic construct
  misc_feature 1..471: note = Description of Artificial Sequence: Synthetic coding sequence
  source 1..471: mol_type = other DNA
atgggcgcaagtagactatatactctcgtgctagtcctgcaaccacagagagtgctgctgggaatgaaaaagcgcggattcggagcaggtaggtggaacggtttcggagggaaagtgcaggagggcgaaaccattgaggatggcgctagacgagagctccaagaggagagcgggctgaccgtggatgccttgcacaaggtcggacaaatcgtgtttgagtttgtcggggagcccgagctgatggacgtgcatgtcttttgtacagactcaattcaaggaacaccggtggagagcgacgagatgagaccttgctggtttcagctcgaccagatcccctttaaggacatgtggcctgacgactcctactggttcccgttgctgctgcaaaagaagaagttccatggatactttaaatttcaggggcaggatacgattctggactatacactccgtgaggtggatacagtgtag

SEQ ID NO: 233412 - DNA, 540 bp, synthetic construct
  misc_feature 1..540: note = Description of Artificial Sequence: Synthetic coding sequence
  source 1..540: mol_type = other DNA
atgagtggcatcagccctcagcagatgggtgagcctgagggttcatggtccggaaaaaacccaggtacgatgggcgctagccgcttgtacaccctagtgttagttcttcaaccccagcgggttctgctcgggatgaaaaagcggggattcggggctgggcgatggaacggatttgggggaaaagtgcaggagggagagacaattgaggatggggctagaagagaactgcaagaagaatccggacttacagtcgatgcccttcacaaggtagggcagattgtttttgaattcgttggcgagcccgaactgatggatgtgcacgtgttctgtaccgacagcattcagggaactcctgttgagagtgacgaaatgcggccttgttggtttcagctggatcagattcctttcaaggacatgtggcctgatgatagctattggttcccactcttgctgcagaagaaaaaatttcatggctacttcaaattccagggccaggatactattttggattacactcttcgggaagtggatacagtctag

SEQ ID NO: 233413 - DNA, 471 bp, synthetic construct
  misc_feature 1..471: note = Description of Artificial Sequence: Synthetic coding sequence
  source 1..471: mol_type = other DNA
atgggtgcgtcccggctgtacaccctggtgctagtcttgcagccacagcgcgtgctgttgggtatgaagaaaagagggtttggcgctggtcgctggaacggatttggcggaaaggttcaggaaggggagacaatcgaagatggtgcccgtagagagcttcaggaagagagcgggctgacggtggatgccttgcacaaggtagggcagatcgtgtttgaatttgtcggtgagcccgaactgatggacgttcacgtgttctgcacggatagtattcagggcacaccagtcgagtccgatgagatgcgcccttgctggttccagctggaccagatacctttcaaagacatgtggccagatgattcctattggttcccactgctgttacagaagaagaagtttcatggctactttaagtttcagggacaggatacaatcctggactataccctacgggaggttgataccgtgtag

SEQ ID NO: 233414 - DNA, 471 bp, synthetic construct
  misc_feature 1..471: note = Description of Artificial Sequence: Synthetic coding sequence
  source 1..471: mol_type = other DNA
atgggcgctagcagactgtacacactggtgctcgttctacagccgcagagggtccttctcggtatgaagaagagaggattcggtgcgggacgatggaacggcttcggtgggaaagtacaggaaggagaaacaatcgaggacggtgctcggagggagttgcaggaggagtctggcctgactgtggatgccctgcacaaagtgggacagattgttttcgagttcgtgggggaaccagagctgatggacgtgcatgtgttctgcaccgacagcattcaagggaccccagtggagagcgacgagatgagaccctgttggtttcaactggaccagatcccctttaaggatatgtggcctgacgacagctactggttccctctgctgcttcaaaaaaaaaaattccatggatactttaaatttcaaggtcaagacacgattctggactacaccttgcgcgaagtcgatacagtttag

SEQ ID NO: 233415 - DNA, 540 bp, synthetic construct
  misc_feature 1..540: note = Description of Artificial Sequence: Synthetic coding sequence
  source 1..540: mol_type = other DNA
atgagcgggattagcccacaacagatgggcgaacctgagggatcatggtctgggaaaaacccaggcacgatgggcgctagtcgactgtacacgctggtccttgttctccaacctcagcgcgtgctgctgggtatgaagaagagaggctttggcgcaggtagatggaacggcttcgggggaaaggtccaggagggcgaaactatagaagacggagccagacgcgaattgcaggaagagtcaggtctcaccgtcgacgctctccacaaagtgggtcagatcgtattcgaattcgtcggggaaccagagctaatggacgtgcacgtcttctgcaccgactccatccagggtacgcctgtagagtcggatgagatgagaccctgctggttccagcttgatcagattccattcaaggatatgtggcctgacgactcgtactggtttcctttattgcttcagaaaaagaaattccacggttactttaagttccagggtcaggacactattctggactacaccctgcgggaagtagatacagtgtag

SEQ ID NO: 233416 - DNA, 540 bp, synthetic construct
  misc_feature 1..540: note = Description of Artificial Sequence: Synthetic coding sequence
  source 1..540: mol_type = other DNA
atgagcggaattagccctcaacagatgggcgagcccgagggatcctggtcagggaaaaacccagggacaatgggggcttctagactttacacgttggtgcttgttctgcagccacagcgggtcctcctgggcatgaaaaaacgagggtttggggcaggaagatggaatggattcgggggtaaggtccaggaaggtgagaccatagaagacggcgctagacgtgaactgcaggaggaaagcggcctgactgtcgacgccttacataaggtcgggcagatcgtctttgagttcgtaggtgaacccgaactcatggacgtgcacgtattttgcactgattctatccaaggaaccccagtggaatcagacgagatgcggccatgctggtttcagctggaccagatccctttcaaagacatgtggcctgatgacagctactggttcccacttctcctgcagaagaagaaatttcacggctattttaagttccagggacaagacaccatactggactatacactgcgtgaggtagatacagtgtag

SEQ ID NO: 233417 - DNA, 114 bp, synthetic construct
  misc_feature 1..114: note = Description of Artificial Sequence: Synthetic coding sequence
  source 1..114: mol_type = other DNA
atgggcgcaagccgactgtataccctcgtgttggtactgcagccccagagagtactcctgggcatgaaaaagcggggatttggcgcaggaagatggaatggttttgggggatag

SEQ ID NO: 233418 - DNA, 495 bp, synthetic construct
  misc_feature 1..495: note = Description of Artificial Sequence: Synthetic coding sequence
  source 1..495: mol_type = other DNA
atgaagtgtaaacccaaccagacaaggacctacgatcctgaaggattcaaaaagagggccgcatgcctgtgcttcaggagcgagagagaagacgaagtcctcctggtatcctcaagcaggtaccccgacaggtggatcgtacctggtggcggaatggagcccgaagaagaacctgggggagctgccgtgagagaagtgtacgaggaagctggagtaaaagggaagctcgggcgtttgttaggagtctttgaacagaatcaggacccaaagcaccggacctacgtatacgtgcttacagtaaccgaacttttagaagattgggaagatagtgtgtccataggaaggaagcgggagtggtttaaggtagaggatgcaatcaaagtactccagtgccacaagccggtccatgctgaatacctggagaagctgaaacttggtggatctccaacgaatggtaattcgatggccccttcaagcccggactccgatccctag

SEQ ID NO: 233419 - DNA, 495 bp, synthetic construct
  misc_feature 1..495: note = Description of Artificial Sequence: Synthetic coding sequence
  source 1..495: mol_type = other DNA
atgaaatgcaaacctaatcaaactcggacctacgatccggaaggattcaaaaaaagagcagcctgcctgtgtttcagaagcgagcgagaagatgaagtgttactggtcagctcaagccggtatcccgatcgttggatcgtcccaggcggtggtatggaacctgaggaggagcctggcggagcagctgtgcgggaggtctacgaggaagccggtgtgaaaggcaagcttggccgtctcctgggagtgtttgagcaaaaccaggacccaaagcatagaacctatgtatacgtcctaactgttaccgagttattggaggattgggaggacagcgtcagcatagggaggaaacgggagtggtttaaggtggaggacgctatcaaggtgttacagtgccataaacccgtgcatgctgagtacctcgagaagctaaagttgggcggttcgccaacaaacggtaactctatggccccaagctctcctgacagtgacccatag

SEQ ID NO: 233420 - DNA, 444 bp, synthetic construct
  misc_feature 1..444: note = Description of Artificial Sequence: Synthetic coding sequence
  source 1..444: mol_type = other DNA
atggcactgcgcgcatgcggcctgattatcttcaggcggtgcctgatacctaaagtggacaataatgccatcgagtttcttctgcttcaggcgtctgatgggatccatcactggaccccacccaaggggcacgtggagcctggcgaagacgacctcgagaccgcgcttagagaaacacaagaggaggctggaattgaggcaggccagttgactattattgagggttttaagcgtgagctgaactacgtggcaagaaacaagcccaagaccgtgatttattggctcgcagaggtgaaggattatgacgtcgagatacgtctctctcacgaacaccaggcttacagatggctcggacttgaagaagcatgccagctggcacagtttaaggagatgaaagccgcactccaggaaggacaccagttcttatgcagcatcgaggcctag

SEQ ID NO: 233421 - DNA, 444 bp, synthetic construct
  misc_feature 1..444: note = Description of Artificial Sequence: Synthetic coding sequence
  source 1..444: mol_type = other DNA
atggcgctgagagcctgtggtctgattattttccgtcggtgtttaatcccaaaagtggacaacaacgcaattgaatttctcctcctccaggccagcgatggaatacatcactggacaccacccaagggacacgtagagcccggagaagatgacttagaaacagccttgagggagactcaggaagaggcgggtatcgaagcaggtcagctgaccattatagagggatttaagcgcgagctgaactacgtcgcaagaaataaaccgaagaccgtgatctattggctggccgaggtgaaggactatgatgtcgagatcagactaagccacgagcatcaggcctatcggtggctcggattggaggaggcatgccagctcgcccagtttaaggagatgaaagccgctctgcaggaaggacaccagtttctatgtagcattgaggcttag

SEQ ID NO: 233422 - DNA, 444 bp, synthetic construct
  misc_feature 1..444: note = Description of Artificial Sequence: Synthetic coding sequence
  source 1..444: mol_type = other DNA
atggcattgcgggcttgtggactcattatcttcaggcgctgcctgattcctaaagtggataataatgcgattgaattcttactcctccaagcgtccgatggcatacaccactggacgccccctaaaggacatgtggaacccggtgaggatgacctggagacagccttaagggaaacgcaggaggaagccggaatcgaggctgggcagctaacaatcatcgagggatttaagcgcgaactgaactacgtcgcacggaacaaacccaagactgtaatctattggttggcagaggtaaaggactacgatgtcgaaatccggctttctcacgagcatcaggcttaccgatggctgggactggaagaagcctgtcagctggcacaattcaaagaaatgaaggcagccctccaggagggacaccagttcctttgcagtatcgaggcttag

SEQ ID NO: 233423 - DNA, 444 bp, synthetic construct
  misc_feature 1..444: note = Description of Artificial Sequence: Synthetic coding sequence
  source 1..444: mol_type = other DNA
atggccctgcgggcttgcggtctgatcattttcagaaggtgcttgatccccaaggttgacaacaatgctattgagtttttgctgcttcaagcctccgacggcatccatcattggacccccccaaaaggacatgttgagccaggcgaagacgacttagagaccgcgcttcgcgagacgcaggaggaggcaggtattgaagccggacaactgactattattgaaggcttcaaaagggagctcaactatgtcgccaggaacaaacccaagaccgtcatttattggctcgctgaagtgaaggactatgacgtggagattcggttaagccacgagcaccaggcttatcgctggttaggtctggaggaggcgtgtcaacttgcacagttcaaggagatgaaagccgctttacaagagggccaccagtttctatgtagtattgaagcctag

SEQ ID NO: 233424 - DNA, 444 bp, synthetic construct
  misc_feature 1..444: note = Description of Artificial Sequence: Synthetic coding sequence
  source 1..444: mol_type = other DNA
atggccctccgcgcttgcggactgattattttcaggcggtgtctgattcctaaggtggataataacgcgatagagttcctgctcctacaagcatctgatggcatacaccactggacgccgccaaaagggcatgtggagcctggagaagacgacctcgagacagcactgcgcgagacccaggaggaagctggcatagaagcagggcaattgactatcatcgaaggattcaaacgcgagttgaactacgtagcccgtaataagcctaagacggttatctattggctggccgaagtaaaggactacgatgtggagatcagactgagtcatgagcaccaggcgtacaggtggttgggactcgaagaggcttgccagctagcacagtttaaagaaatgaaggcagcgctacaggagggccaccaattcctctgctcgattgaggcgtag

SEQ ID NO: 233425 - DNA, 1395 bp, synthetic construct
  misc_feature 1..1395: note = Description of Artificial Sequence: Synthetic coding sequence
  source 1..1395: mol_type = other DNA
atggagaccctgagctttcctcggtacaacgtggccgaaatcgtgatccacatcagaaacaagatcctgactggtgctgatggcaaaaacctcaccaagaatgacctctacccaaacccgaagcctgaagtccttcacatgatttatatgcgcgctctgcagattgtgtacgggattcgcctggagcacttctacatgatgccagtcaatagtgaagtcatgtatccgcaccttatggagggatttctgcctttctctaacctggtcactcaccttgattcgtttttgccaatctgccgggtcaacgacttcgagaccgcagacattttgtgtccaaaggcgaagcggactagcaggttcttgtccggcatcatcaatttcatccacttccgcgaggcttgtcgggaaacctacatggaatttttatggcaatacaagtcctccgccgataaaatgcagcagttaaacgccgctcaccaagaagcccttatgaagttggagcggctcgacagcgtgcctgtagaagaacaggaggagtttaagcagctgtctgacggaatacaggagctgcagcagagcctaaatcaggactttcaccagaagactatcgtcctgcaagagggtaacagccagaaaaaatccaacatatcagagaagactaagcgccttaacgagctaaaactatcagttgtgagtctgaaagagatacaggagagtcttaaaaccaaaatcgtagacagtcccgaaaagttgaagaactacaaggagaagatgaaagataccgtacagaagctgaagaatgctaggcaggaggtggtagagaagtatgaaatctatggcgatagtgtcgactgcttgccaagttgccaattggaggtgcagctttatcaaaaaaaaatacaggatctgtcagacaacagagagaagctagcctccatcctaaaggaatcactgaacctagaagaccagatcgaaagtgatgaaagtgaactgaagaagctcaaaacagaggagaatagctttaagcgcctcatgatcgtaaagaaagaaaaactcgccaccgcccaattcaaaattaataaaaaacacgaggacgtgaaacagtataagagaaccgtgatcgaggattgtaataaggtgcaagagaagcgaggcgcagtatacgagcgagtgaccacaattaatcaggaaattcaaaagattaaactgggaattcagcagttaaaagacgcagccgagcgcgagaaactcaagtcacaagagatcttcctgaacctcaaaactgccctggagaagtaccacgacggcattgaaaaggctgccgaggacagctatgccaagattgatgaaaaaactgctgagctaaagagaaaaatgttcaagatgtctacctag

SEQ ID NO: 233426 - DNA, 1395 bp, synthetic construct
  misc_feature 1..1395: note = Description of Artificial Sequence: Synthetic coding sequence
  source 1..1395: mol_type = other DNA
atggagaccctgtcatttcctaggtataacgtggccgagatcgtgatccacattaggaacaaaatcctaacaggggcagacggtaaaaacttgactaaaaatgatctgtacccaaaccccaagcccgaagtgctgcacatgatctatatgcgagcactccagatcgtgtatggaattcggctggaacacttttatatgatgcctgtgaacagcgaggtcatgtacccacatctgatggaagggttcctgccattcagtaatctggttactcatctggacagtttcctgcctatctgtagggttaatgattttgagactgcagatattttgtgtcccaaggcaaagcgaaccagcaggtttttgtcaggaataatcaactttattcatttcagagaggcctgcagagagacgtacatggaattcttgtggcagtataaatcatccgccgataagatgcagcagttaaatgctgcccaccaggaggcactgatgaagttggaacgtttagactctgtgccagtggaagaacaagaggaatttaagcagctgtcagacggcatacaggagctgcagcagtccctgaaccaggatttccatcaaaagactattgtgctacaagaaggtaactctcagaagaagtccaacatcagtgaaaaaacaaagagactgaatgaactcaaactgtccgtggtctcattaaaggaaatacaggaatctctcaaaacaaagatagtcgacagcccagagaagcttaaaaactacaaagagaaaatgaaagataccgtccagaagctgaagaatgccagacaagaggtggtcgaaaagtacgagatttacggagacagcgtagactgccttcccagctgccagcttgaggtacagctctaccaaaaaaaaattcaggacctctctgacaacagagagaagttagcgtccatactaaaggagtctctcaatcttgaggatcagatcgaaagtgacgagtctgagctgaagaagctgaaaaccgaggaaaattccttcaaaaggcttatgatcgtgaaaaaagagaagctggctactgcccagtttaagatcaacaaaaagcacgaggatgttaagcagtataaacggacggtgatagaggactgcaataaggtgcaggaaaagcggggagcagtctatgagcgggtaaccacaatcaaccaagagatacagaagattaaactgggaatacaacagctcaaggacgcggcagaacgtgaaaagttaaaaagccaagagatattcctgaacctgaaaactgctcttgagaaatatcatgacggtattgagaaagctgcagaagactcttatgcgaagattgacgaaaagaccgcagaattgaagagaaagatgtttaaaatgtcgacctag

SEQ ID NO: 233427 - DNA, 609 bp, synthetic construct
  misc_feature 1..609: note = Description of Artificial Sequence: Synthetic coding sequence
  source 1..609: mol_type = other DNA
atggagacactctcctttcccagatacaatgtggcggaaattgtaattcatattcggaacaaaatcttgacaggggctgacggaaaaaatctcacaaagaacgatctgtatcccaatcccaagcccgaagtgcttcacatgatctacatgcgggctctgcagatcgtatacggcattaggctagaacacttttacatgatgccggtaaacagtgaggtgatgtacccccacctcatggaaggattcctacctttcagcaatcttgtgacgcacctggattcatttcttcccatatgccgagtgaacgactttgagaccgccgacattttgtgcccaaaggcaaagcgaacctctaggtttttgtccggcatcatcaattttatccatttcagggaggcctgtcgtgaaacatacatggagttcctctggcagtataaaagcagtgcagataaaatgcagcaactgaacgccgcacaccaggaagctttaatgaagctggagagacttgactcggtacctgtggaagagcaagaggaatttaaacagctgagtgacggaattcaggaactgcagcaaagcctgaatcaggactttcatcagaagacatag

SEQ ID NO: 233428 - DNA, 438 bp, synthetic construct
  misc_feature 1..438: note = Description of Artificial Sequence: Synthetic coding sequence
  source 1..438: mol_type = other DNA
atggaaaccctgagtttcccgagatacaatgtggccgagattgtgatccacatccgtaataagatcctcacaggagctgatggaaaaaatctaacaaagaacgacctgtaccctaatcctaagcccgaagttcttcatatgatctacatgcgtgccctacagatcgtgtatggaattcgtctggaacacttttacatgatgcctgtgaattcagaagtaatgtacccccacctgatggaggggtttctgccctttagcaacctggtgactcatcttgacagttttcttcccatctgtcgtgttaatgatttcgaaacagccgatatactgtgtccaaaggcaaagcgcacgagtcggttcctgagtggaatcataaacttcatccattttcgagaggcttgtagggaaacatacatggagttcttgtggcagtactag

SEQ ID NO: 233429 - DNA, 666 bp, synthetic construct
  misc_feature 1..666: note = Description of Artificial Sequence: Synthetic coding sequence
  source 1..666: mol_type = other DNA
atggagactctatcatttccaaggtataacgtcgcagagatcgtgattcacattcgcaataaaatccttacaggcgcagacggtaagaatctcacaaaaaatgatctctaccccaacccgaaaccagaggttctccacatgatatacatgagggctttgcagatcgtgtatggtatacgcctagagcacttttatatgatgcccgtgaactcggaagtcatgtatccccacttgatggaaggcttcctccctttttctaatctggtgacccacctggactcctttttgccaatctgtagggttaatgactttgaaacggctgacatcttgtgcccaaaggcaaaaagaacgagcaggttcctgagtggtattattaacttcatccatttccgagaggcatgcagagaaacctacatggaattcttgtggcagtacaagtcctccgcggataagatgcagcaacttaacgctgctcatcaggaggcattaatgaagctggaaaggctggactccgtgcctgtcgaggagcaggaggagttcaaacagctgagcgacggcatccaggaactgcaacagagcctgaatcaggacttccatcagaaaacttgctgtaagcgggaaattcccaagcgttcacagattttccaaaggaaaccaagtgtctag

SEQ ID NO: 233430 - DNA, 1254 bp, synthetic construct
  misc_feature 1..1254: note = Description of Artificial Sequence: Synthetic coding sequence
  source 1..1254: mol_type = other DNA
atggagacgctgtcctttcctcggtacaatgtggctgagatcgtcatacacattcgcaacaagatcctgacaggcgcagatgggaaaaacctgaccaagaacgacctctaccctaatcccaagcccgaagttctgcatatgatttatatgcgagcactgcaaattgtgtacggcattagactggagcacttctacatgatgcccgtcaactccgaagtgatgtacccacatttgatggaaggatttctccccttctccaacctcgtgacacacctcgattcattcctgccaatttgcagggtgaatgattttgaaaccgcagatattctctgccccaaggccaagcgaacatctcggtttctctcaggcatcatcaacttcatccatttcagagaggcatgcagagaaacgtacatggagttcctgtggcagtataaaagcagcgccgacaagatgcagcaactgaatgcggctcaccaagaggctcttatgaagctggaacgcctggatagcgtgccagtcgaggaacaggaagaattcaaacagctgtccgacgggatccaggaactacagcagtctctgaatcaggacttccatcagaagaccattgtactgcaggaaggcaattctcaaaagaagagtaatataagcgaaaagactaaacgcttaaacgagctaaagttgagcgtggtgagtcttaaagagatccaagagtctctaaagaccaaaattgtggactctccggaaaaactgaagaactataaagaaaagatgaaagatacagtgcagaagcttaagaacgccagatcactgaatctagaggaccagattgagtccgacgaatcagaactgaagaagctcaaaactgaagaaaattcttttaaacgcctgatgatcgtgaagaaggagaaacttgcaacggcgcagttcaaaatcaataagaagcacgaggacgtgaaacagtataagcgaacagttatcgaagattgtaataaagtgcaagaaaaacggggagccgtgtacgagagagtgacaaccatcaaccaggagattcagaagatcaagttgggcatccagcagttgaaagatgctgccgagcgggagaaattgaaatctcaggaaatcttccttaatctcaagactgctctggagaagtaccacgatggcatcgagaaagccgctgaagactcttatgcaaagatcgatgaaaagacagctgaactcaagcggaaaatgtttaaaatgtcgacctag

SEQ ID NO: 233431 - DNA, 375 bp, synthetic construct
  misc_feature 1..375: note = Description of Artificial Sequence: Synthetic coding sequence
  source 1..375: mol_type = other DNA
atggagaccctctccttccccaggtataacgtcgccgaaatcgttatccatattcgtaacaagattctcacaggggcagacgggaagaacctgaccaagaacgacctttaccccaacccaaaacctgaagtgttacatatgatctatatgcgtgccctgcagatcgtgtacgggatcagactcgagcacttctacatgatgcccgttaacagcgaggtcatgtacccccacctgatggagggcttcctgcctttctcaaacttagttactcacctagatagttttctcccaatttgtcgggtgaacgattttgagactgctgatatcctgtgtcccaaggccaaacgaacctctaggttcttgagtggaatctag

SEQ ID NO: 233432 - DNA, 702 bp, synthetic construct
  misc_feature 1..702: note = Description of Artificial Sequence: Synthetic coding sequence
  source 1..702: mol_type = other DNA
atgaacaaactccgccagtcgtttcgccgaaaaaaagacgtgtatgttccagaggcctctaggcctcatcagtggcagactgacgaagagggcgttagaactggaaagtgctctttcccggtaaaaactggaaagaaggcggttaaagccgttctttgggtgagtgccgacggcctccgggtggtggacgaaaaaactaaagacctgattgtcgaccagaccattgagaaggtatcattctgtgcccctgatcggaatttcgacagagcattttcttacatttgtagggacggcactacgaggcggtggatatgccactgcttcatggccgtcaaagacacgggagaacgtcttagccacgccgtgggttgcgccttcgcggcttgcctggagcggaaacagaagcgggaaaaggagtgcggggtgactgcgacttttgacgcgtccagaactacattcacaagagaaggaagtttccgggtgacaacagccactgagcaagccgaacgcgaggagatcatgaagcagatgcaggatgccaaaaaagccgagaccgataagattgtggttgggtccagcgtggcacccggtaatactgcacctagcccttcgagtcccaccagtccgacgtccgatgctacgacatccctcgagatgaacaatccacatgccattcccagacggcatgctcctattgaatag

SEQ ID NO: 233433 - DNA, 1956 bp, synthetic construct
  misc_feature 1..1956: note = Description of Artificial Sequence: Synthetic coding sequence
  source 1..1956: mol_type = other DNA
atgaataagctgcgacaaagctttcgacgcaagaaagatgtttatgtgccggaagccagccgaccgcatcaatggcagacagatgaagaaggggtgagaacgggaaagtgcagctttccagtgaagtacttaggacatgttgaagtggacgagtcaagaggtatgcacatttgcgaggacgccgtgaagcgccttaaagctgaaaggaaattttttaagggcttcttcggcaaaacgggcaagaaggccgtgaaggcggttctgtgggtatctgcggatggactgcgtgtcgttgacgagaaaacaaaagatctaattgtcgatcagaccatcgagaaagtgtccttttgtgccccagatagaaacttcgatagagcattcagctacatatgtagagacgggactacacgcaggtggatctgccactgctttatggctgtcaaggacacgggagagcgcctgtctcacgccgtgggatgcgcattcgccgcatgtctggagagaaaacagaagcgagagaaagaatgtggcgtcaccgccacatttgatgcaagcaggaccacatttaccagagagggttcgtttagagtgaccactgctactgagcaagcagagcgcgaagaaattatgaagcagatgcaggatgcaaagaaggccgagaccgacaagattgtcgtagggtcctcagtcgctccaggcaacactgcaccttcccctagttctcccactagccctaccagcgatgccacaacttccctcgaaatgaataatccacatgccatccctcgacgccatgctcccatcgaacaattggcaagacagggctcgttccgagggttccctgccctgtctcagaaaatgagtcccttcaaacggcaattgagcttacgcatcaacgagttgccttccactatgcaaaggaagactgattttccaatcaaaaacgccgtgcctgaggttgaaggagaagctgaatcaatcagctcactgtgcagccagatcaccaacgccttctctacgcccgaagacccattctcctccgcgcctatgacaaagccagtgaccgtagtggcgcctcagtcgcctacctttcaagcaaacggaactgatagcgcatttcacgtgttggccaagccagcccacactgcactggcccctgtcgccatgccagtgcgagaaacaaatccatgggctcatgcccctgatgccgcaaataaggaaattgctgctacatgctcaggcaccgaatgggggcagtcttcaggagcagctagcccaggcctctttcaggcgggtcatcgaaggactccctccgaggctgaccgctggctggaagaggtgagtaaatctgtgagagcccagcagccccaggcaagtgcagcccctctccagcccgtgttacagccccctccaccgaccgctatctcccaacccgcatcgccatttcagggcaacgcgttcctgacctcacaaccagtgcccgtgggcgtggtgcccgctctgcagcctgctttcgtccctgcccagtcctaccccgtagctaacggcatgccctatcctgcccctaacgtcccagtcgtagggattacacctagccaaatggtggctaatgtttttggcacagccggtcacccgcaagcagcacacccacatcagagcccatccctggtgcggcagcagacctttccccactacgaggcttcatcagccactacttcaccattcttcaagccaccagcccaacatctaaatggaagcgccgcattcaatggtgttgacgatggtcgtcttgcaagcgctgacaggcatactgaagttcctacaggaacatgtcccgtagatcctttcgaggcccaatgggcggctctggagaacaaaagcaagcagagaactaatccatctccaacgaatccattttcttctgatttgcagaagactttcgagatagagctctag

SEQ ID NO: 233434 - DNA, 1812 bp, synthetic construct
  misc_feature 1..1812: note = Description of Artificial Sequence: Synthetic coding sequence
  source 1..1812: mol_type = other DNA
atgaacaagctgaggcaaagttttcgaagaaagaaggacgtttacgtgcctgaggcctctagaccacatcagtggcagactgacgaggagggcgtgcggaccggaaagtgctcattcccagtgaagtacctcggacatgtggaagtcgacgagtctcgcggtatgcatatctgcgaggatgccgtgaagcgccttaaggctgaacggaagttcttcaaagggttttttggaaagaccggcaaaaaggcggtcaaggccgtcttatgggtaagcgctgatggtttgcgcgtggtcgatgaaaaaactaaagacctgatagtggatcagacaatcgaaaaagtctccttctgtgcccctgatcggaatttcgaccgagccttctcctatatctgtagggacgggacaacaaggaggtggatctgccactgctttatggccgttaaagacaccggagagcgtctttctcatgccgtggggtgtgcttttgccgcttgtctggaacgcaagcagaagagagaaaaagagtgtggggtgacagctacttttgacgcctcaaggactacattcacgcgtgaagggtcattcagagtcaccactgcaaccgagcaggccgagcgggaggagatcatgaagcagatgcaagatgcgaaaaaagccgagacagataagattgtggttggaagctctgtggcacccggtaatacggccccatctccttccagcccaacttcccctacatcagacgccacaacctcccttgagatgaacaatccacatgccattcctcggagacacgctcccattgaacagctcgccagacaaggcagctttagagggttcccggcactgagtcagaagatgagtcctttcaaacgccagctctctctcagaattaatgagcttccttcgaccatgcaacgaaaaactgacttccctatcaaaaatgcggtgccggaggtcgagggcgaggccgaaagtatctcatctctgtgtagccagattacaaacgcatttagcacgccagaagacccattctcatctgcccctatgacaaagccagtgaccgtggtggctccacagagcccaactttccagggaactgagtgggggcagtctagcggcgctgcttcccccggactgttccaggcagggcatcgtaggacacctagcgaggctgaccgctggctggaggaagtcagtaaatccgtgcgagcacaacaacctcaggccagcgccgcaccactgcagcctgtgttgcaaccccctcccccaacagctatttcccagcccgcttctcctttccaggggaacgcttttctgacttcccagccagtgcctgtcggggtggtacctgctttacagccagctttcgttccagcccagtcttatcctgtggccaatggcatgccgtacccggctcccaacgtgcctgtagtgggaataaccccatctcagatggtggccaacgttttcggaaccgcagggcacccccaagccgctcatccccatcaaagtccaagtctggtgagacagcagaccttcccacactatgaggcaagtagcgcgacaacctcacctttttttaaacctcccgctcaacatttaaacggatcagccgcatttaatggtgttgacgatggaagactggcctccgctgatagacacaccgaggtgcctacggggacatgtcccgtcgacccattcgaagctcaatgggccgctctcgaaaacaaaagcaaacaacgtactaatccctcaccaaccaacccgttctcctcagacctccagaagacctttgagatcgaactgtag

SEQ ID NO: 233435 - DNA, 1923 bp, synthetic construct
  misc_feature 1..1923: note = Description of Artificial Sequence: Synthetic coding sequence
  source 1..1923: mol_type = other DNA
atgaacaaactcaggcagtcatttaggcggaaaaaagatgtatatgtgccggaagcctcgcggccacaccagtggcagacagacgaggaaggagtgaggaccggcaagtgcagcttccctgtgaaatacctgggacatgtcgaggtcgatgagtcgcgcggaatgcacatctgtgaagacgctgtcaaaaggctgaaagcaactggcaaaaaagccgtcaaggcagtcctgtgggtcagcgcagacggcctcagagtcgtggacgagaagacaaaggacttaatagtggaccagaccatcgaaaaagtgagcttctgtgctcctgatcgcaattttgaccgagcattctcatatatctgccgggatggtaccaccagacggtggatatgccactgtttcatggccgtcaaggatactggcgagaggctgtctcatgctgtcgggtgcgcgtttgcggcttgcttggaacgtaaacagaaacgtgagaaggagtgcggcgtaaccgcaacttttgacgcttcccgcacgactttcacacgcgagggctcatttagggtaacaactgccacagagcaggctgagagggaagaaatcatgaaacagatgcaggacgccaagaaagcggaaactgataagatcgttgttggcagttccgtcgccccagggaatacagcacctagccccagttctcctacaagtcctacttcagacgcgacaacctccctcgaaatgaacaacccacatgcgatccccagacggcatgctcccatcgaacagctggcgaggcaagggagtttcaggggctttcctgccttaagtcaaaagatgagcccattcaaaaggcagctaagtctcaggattaatgagttaccgtccacaatgcagcggaaaacagactttcccattaaaaacgccgtgccagaggtggagggtgaagctgagtcgatcagcagcctctgctctcagatcactaacgccttctccacaccggaggatcccttttcgagcgctccaatgactaagccagtgactgttgtagctccccagagtcctacatttcaagctaacgggaccgattctgcctttcatgtgctcgccaaaccggctcacacggccctggcccctgttgctatgcctgtacgcgagaccaacccatgggcgcacgctcccgacgcagctaacaaggagatcgccgcaacctgcagcggaaccgagtggggccaatcgtcaggggcagctagtcccggactctttcaggccggtcacagacgcactccatcagaggcggacaggtggctcgaggaggtctctaaatccgttcgagctcagcaacctcaagctagcgctgcccctctgcagcctgtgctccagcctcctccgccaaccgccatctcacagccagccagccccttccaagggaacgcatttctcactagtcagcccgtgcccgtgggagttgtcccagccctccagcccgcattcgtccctgctcaatcctaccccgtggcaaacggaatgccatacccggcaccaaatgttccagtggtcggaattacgccttctcaaatggtggccaacgtgttcggcacagcgggacaccctcaagcagcccatccacaccagtccccctccttagtgcgtcagcagacattcccacattacgaagcgagctcagccacaaccagccctttcttcaagcctcccgcacagcacctcaacgggtctgccgcatttaatggcgtcgacgatggaagacttgctagtgcagacagacacacagaggtgcccaccggcacctgccctgtcgatccattcgaagcgcagtgggctgctttggagaacaaatctaaacaacgcacaaatcctagtccaaccaatccattctctagcgacctgcagaagactttcgaaattgagctctag

SEQ ID NO: 233436 - DNA, 1518 bp, synthetic construct
  misc_feature 1..1518: note = Description of Artificial Sequence: Synthetic coding sequence
  source 1..1518: mol_type = other DNA
atgaacaagctgcgccagtcatttaggaggaaaaaggacgtgtatgtgccagaggcatcccgccctcatcagtggcagacggacgaagagggcgttagaaccggaaagtgttcatttcctgtcaaatacttgggacacgtcgaggtggatgaaagcagaggcatgcacatttgtgaggacgccgtgaagcgactaaaagcagagcgaaagttctttaaggggtttttcgggaaaactggaaaaaaggctgttaaagccgtgctgtgggtctcggcagatggtttacgggttgtggacgaaaaaacaaaagatctgatagtcgaccagacaattgagaaagtttccttttgcgccccagaccggaatttcgatagggctttcagctatatttgcagagatggaaccacaaggagatggatctgccactgcttcatggcagtgaaggataccggagagagactaagtcacgcggtgggttgcgcctttgccgcttgcctcgagagaaaacaaaagcgggagaaagaatgcggagtgacggccacattcgacgcttctcggactacattcacaagagaaggatcctttcgggttactactgccaccgagcaggccgaacgcgaagagatcatgaagcagatgcaagacgctaaaaaagtcccagaagtggaaggcgaggcagagtctatttccagcctctgttcccagatcaccaatgccttcagcacaccggaggatcccttttcatcagctcctatgactaagccagtgaccgtcgttgccccacagtccccgaccttccaggggaccgagtggggacaaagcagtggtgctgccagtcccggtctttttcaggccggtcaccgacggacaccgagcgaagccgatagatggttagaagaagtaagcaaaagcgtgagagcacagcagcctcaagcaagcgcagcccctctgcaacccgtgttacagccgcctcccccaacagcaatttcacagcccgcatccccttttcagggcaatgctttcctcaccagccagcctgtgcccgtcggcgttgtgccggcactccagcccgcattcgttcccgctcagtcttaccctgtcgccaatggaatgccttaccccgcacctaatgtgccggtggtcggaatcacaccatcccagatggtcgcgaacgtgtttggtacagccggacatccccaggctgctcatccccatcagtccccttcattagtaagacagcaaacattcccacactacgaggcctcctccgcaaccactagtcccttttttaagccaccagctcagcacctcaacggaagtgcggcattcaacggcgtcgatgatgggaggctggcatcagccgacaggcacaccgaggtgccaacgggaacttgccccgtcgaccccttcgaggcgcaatgggctgcattggagaacaagtccaaacagcgaaccaacccatctcctacgaacccgttctcttccgacctgcagaagacttttgagatcgaactgtag

SEQ ID NO: 233437 - DNA, 1923 bp, synthetic construct
  misc_feature 1..1923: note = Description of Artificial Sequence: Synthetic coding sequence
  source 1..1923: mol_type = other DNA
atgaacaaactgaggcagtcctttcggaggaaaaaagatgtttatgttcccgaggctagccgaccccaccaatggcagactgacgaagaaggcgtccgcaccggcaaatgttcttttccagtgaagtatctcggacacgtcgaagttgatgagagccgcggaatgcatatttgcgaggacgccgtgaagagacttaaagcaacagggaagaaagcagttaaagccgtcttatgggtttctgcagacggattacgcgtagttgatgagaagacgaaagaccttatagtcgaccaaaccatcgaaaaggtgtcattttgcgctccagatcgcaatttcgaccgcgctttcagctacatttgcagagacggtaccactcggaggtggatatgccattgcttcatggccgtgaaggacaccggagagagactgagtcacgccgtcggatgcgcatttgctgcctgtctcgaacggaagcagaaaagggaaaaggagtgtggtgttactgccaccttcgatgcctccaggactacattcacgcgggagggatcattcagggtgaccaccgccaccgaacaggctgagagggaggaaattatgaaacagatgcaggatgcaaaaaaagccgagacagataaaatcgtggtaggctcatctgtggcgcctgggaacacagccccttcaccaagttctccaacttcaccgacttcggatgcgaccacttctttagagatgaacaacccacacgcaatcccacgtagacacgcccctatcgaacaattggccaggcaggggagctttcgtggattccccgctctgagccagaaaatgagtccatttaagagacagctgtctctgaggatcaatgagctaccgagcaccatgcagcggaaaaccgactttcccataaagaatgccgttccagaggtggaaggcgaagccgaatctatctcaagcctatgtagccagattaccaacgctttctctacacctgaggatcctttttctagcgcacctatgaccaaacctgtgacagtggtggccccacagagcccaaccttccaagctaatggaactgactctgctttccacgttctggcgaaacccgctcatacagctttggctccagtggccatgccagtacgggagaccaacccatgggcccacgcaccggatgcagctaataaagagattgctgccacatgcagtggcacagagtggggacagtcatccggcgcagcttcccccggactgttccaagctggtcatcgacgcactccttcagaggcagaccgatggttagaagaagtttctaagagcgttcgggctcagcaaccccaggcctctgcggcacctctgcagccagtgcttcaacctccgccacctactgccatctctcagccagcaagcccattccaaggtaatgcatttttgacttctcagcccgtgcctgttggggtagtgccagccctgcagcctgcattcgtccctgcgcagagctatccagtggctaacggtatgccttatcccgctccaaatgtgccagttgttggaataacgccctcccagatggtcgcaaacgtctttggcacagcaggtcacccccaggcagcccacccacatcagagcccatccttggttcgacagcagacttttccacattacgaagcttccagcgctacaaccagtcccttcttcaaaccacccgcacaacacctcaacggttccgctgctttcaatggagtggacgatggtcgattggcatcagcggatcgccacacggaggtgccaacgggaacatgtcctgtggatccctttgaggctcagtgggcggcactcgaaaacaagtctaagcaacgaactaatcctagccctaccaacccgttttcttctgacctacagaagacattcgagatagaactctag

SEQ ID NO: 233438 - DNA, 1371 bp, synthetic construct
  misc_feature 1..1371: note = Description of Artificial Sequence: Synthetic coding sequence
  source 1..1371: mol_type = other DNA
atgaataagctgcgacagagcttcagacggaagaaggacgtctacgtgcccgaggcctcccgtcctcatcagtggcagacagacgaagagggcgtccgtacggggaagtgttcgttccctgtgaaatacctgggccacgtcgaggtggacgagtccagaggcatgcacatctgtgaggatgccgtgaagcgcctgaaagcggagcgtaagttctttaaaggcttcttcggaaagacgggaaagaaagcagtgaaggctgtgctctgggtaagtgctgacggactccgcgtggttgatgagaagaccaaggatcttattgtggatcaaacaatcgagaaagtctcattctgcgcacccgacagaaatttcgatagggccttctcatatatatgccgcgacgggactaccagaagatggatctgccactgttttatggcagtgaaagataccggcgaacgcctgtcccatgctgtgggctgcgccttcgccgcatgcctcgaaagaaaacaaaagagagagaaggagtgcggcgtcaccgcaaccttcgatgcatcaaggacgacatttacgagggaaggctccttcagagtgactacagctacagaacaggctgaacgggaggaaattatgaaacagatgcaagacgcaaaaaaggggacggaatggggacaaagcagcggagcagcctccccaggattatttcaggccggacaccgtcgcaccccttctgaggccgaccgttggctggaggaagtttctaagtccgtgcgcgcacagcagccacaggcctccgctgctcctcttcagccagtccttcagccacctcccccaaccgctattagccagccagcctccccattccagggcaacgcttttctgacttcgcaacccgttccagtgggcgtggtgccggctctgcagccggctttcgtccccgctcagtcgtacccagtggccaatggcatgccctatcccgcaccgaatgtgccagtggtcggcatcaccccttcccaaatggtcgctaacgtgttcgggacggcgggtcaccctcaggccgctcaccctcatcagtcacctagcttggtgcgccagcagacttttccgcactacgaagcctcttctgctacgacgtctccttttttcaaaccccctgcccaacacttaaacgggagcgccgcttttaatggcgtcgatgatggaagactggcttccgccgacaggcataccgaggtcccaacaggtacatgccccgttgatcctttcgaggcgcaatgggccgcactcgaaaataagtctaaacaacgcactaatccatctccaacaaatcctttctcttctgatttgcagaaaacattcgagattgaactgtag

SEQ ID NO: 233439 - DNA, 777 bp, synthetic construct
  misc_feature 1..777: note = Description of Artificial Sequence: Synthetic coding sequence
  source 1..777: mol_type = other DNA
atgaacaagcttcgtcaaagcttccgcagaaagaaggatgtatacgtccctgaggcttcaaggcctcatcagtggcaaaccgacgaggagggtgtgcgaactgggaagtgctcttttcctgttaagtacctaggccacgtggaagtcgacgagtcgcgcggaatgcacatatgtgaagacgccgtgaagcggctgaaagccgaaagaaaattcttcaaagggttcttcggcaaaacaggtaaaaaagccgtgaaggccgttctctgggtttctgccgacggcttgagggtggtcgatgaaaagaccaaggacctgatcgtggaccagaccatcgagaaagtgtccttttgtgccccagaccgaaactttgacagagccttcagctatatttgcagagatggcacaacccgacggtggatctgtcattgttttatggcggtgaaggataccggtgaacgattatcccatgccgttggttgcgccttcgctgcttgcctggaacgcaaacaaaagcgggagaaggaatgtggggttacagccacttttgatgcttcacgcactacatttacacgcgagggctctttcagagtgacaaccgcaactgaacaagcagagagagaagaaatcatgaaacaaatgcaggacgccaagaaggcagagacagataaaatcgtcgtggggtctagcgtggctccagggaatactgcccctagcccatcctcgccaacgagccctactagcgacgccacaacaagcctggagatgaacaatccatag

SEQ ID NO: 233440 - DNA, 1779 bp, synthetic construct
  misc_feature 1..1779: note = Description of Artificial Sequence: Synthetic coding sequence
  source 1..1779: mol_type = other DNA
atgaataaactgaggcaaagcttcagaagaaagaaggacgtgtacgtccccgaagcatcccgtcctcaccagtggcagaccgacgaggaaggggtgcgcaccggaaagtgcagcttccctgtgaagtatctggggcatgtcgaggtcgacgagtccagaggcatgcatatatgtgaggacgccgttaagagactgaaggccaccggcaagaaggccgtaaaggcagtcctgtgggtaagtgcagacggccttcgagtggtggacgagaagaccaaagacctcatcgtagaccaaacgattgaaaaagtctcgttttgtgcccctgataggaattttgaccgcgctttctcctacatctgtcgcgatggcaccacacggaggtggatatgccattgtttcatggctgtcaaggatacaggggagcgactgtctcacgctgtgggatgtgcgttcgccgcatgccttgagagaaagcaaaaacgtgaaaaggaatgtggcgttaccgctacattcgacgcctcgcgaaccacttttacccgagaggggtcttttagagtgaccactgccaccgaacaagctgaaagagaggagataatgaagcaaatgcaagacgcaaagaaagccgaaacagataaaattgtagtcggaagctccgtggctcccggaaacaccgcaccctcaccaagtagtcccacttccccaaccagtgatgccaccacatccctcgaaatgaacaacccccatgccattcccaggcgccatgccccaattgagcagcttgcgagacaggggtctttccggggttttcctgccctaagccaaaaaatgagccccttcaaacgtcagctgagtctgcgtattaatgaactgccttcgacaatgcagagaaaaaccgatttccccatcaaaaacgccgttcctgaagtagagggcgaggcggagagcatatcttctttgtgcagtcagatcactaatgccttttccacacccgaggacccattcagtagcgccccaatgacgaaaccggtgacagttgtggcaccccagtcccccacgtttcagggcacagaatggggccagtcgtctggagccgcttctccaggcttatttcaggctggacatagacggacccccagcgaggccgacagatggttagaggaggtgtccaagtcagtgagagcccaacagccccaggcctcagccgcacccctgcagccagtgttacaaccccctccccctacagccatctctcagcctgcaagtcctttccagggcaatgcatttctgacttcccaacccgtgccggtcggtgtggtgccagccctccagccggcattcgtcccagctcagtcctatcctgttgccaatggaatgccgtatcctgctccaaacgtaccagtcgttggaattaccccctctcagatggttgctaacgtgttcggcacggccggacaccctcaggccgctcatccacaccagtccccgtcccttgtgagacagcagactttcccgcactatgaggcaagctcagccacaacaagtccctttttcaagcctccagcccagcacctcaacggctccgctgccttcaacggggtggacgacggtaggctcgccagcgccgaccggcatactgaggtcccaacaggcacttgtcccgtggatccttttgaggcccaatgggccgcactcgagaataagtccaagcagcggaccaacccgagtccaacaaatccattcagtagtgacctccagaaaactttcgagatcgaactttag

SEQ ID NO: 233441 - DNA, 204 bp, synthetic construct
  misc_feature 1..204: note = Description of Artificial Sequence: Synthetic coding sequence
  source 1..204: mol_type = other DNA
atgaacaagcttcgccagtcctttaggcgaaaaaaggacgtatacgtgcctgaagcatccaggccccatcaatggcagaccgacgaagaaggagtcagaacaggaaaatgctcattcccagtgaagtacctggggcacgtggaggtggatgagagcagaggcatgcacatttgcgaagatgctgtgaaaaggctcaaggcctag

SEQ ID NO: 233442 - DNA, 1956 bp, synthetic construct
  misc_feature 1..1956: note = Description of Artificial Sequence: Synthetic coding sequence
  source 1..1956: mol_type = other DNA
atgaataagctgcgacaatcctttcgaaggaagaaggacgtctacgtgcctgaggcaagtagaccacatcagtggcagactgacgaggaaggagtgcgcacaggcaaatgcagtttccctgtgaagtatcttgggcacgtggaggtcgacgagtcccgagggatgcacatttgcgaagacgccgtgaagcggcttaaggcagagaggaagttctttaaaggcttttttggcaaaacaggaaaaaaagcagtgaaggcggtgttgtgggtctcagccgatggccttagggtggttgatgagaagaccaaggacctgatcgtagaccaaactatcgagaaggtgagtttttgtgcacccgatagaaactttgacagagcattttcctatatttgtagagacgggactaccaggaggtggatttgccactgcttcatggctgtgaaggacaccggcgagaggctatcacacgccgtaggatgcgcttttgcagcctgtcttgagagaaagcagaagagggagaaagagtgcggcgtcacagctacgtttgacgctagtcggacaactttcaccagagaaggctcgttccgagtgacaactgcaactgaacaagctgagcgggaggagatcatgaaacagatgcaggatgctaaaaaggctgaaactgataaaattgtggtcggctcatcagtggctcccggaaacacggctcccagccccagctcgccaacctcacccacaagcgatgccactaccagccttgaaatgaacaatccacacgctatccctcgacggcacgctcctattgagcagcttgcacgacaggggtcgttcagaggttttccagccttgtcccaaaagatgagtccgttcaagcggcagctgtctcttagaatcaacgaactcccgagcactatgcagcgaaagaccgattttcctattaaaaatgcggttccagaggtggaaggcgaggctgaatcaatttcttccttgtgctcccagattaccaatgccttttctactccagaagaccccttcagtagcgcccctatgaccaagccagtgactgtggtagctccgcagtcaccaacatttcaagcaaacggcacagattccgctttccacgtgctggcaaagccagctcataccgccttggctccagtggctatgcccgttcgagaaacaaacccttgggcacatgcacctgatgcagctaacaaggagatagctgccacttgctccggaaccgagtggggccagagttcaggcgcagcttctcctgggttgtttcaagccggacacagaagaaccccatccgaagcagaccgctggttagaggaagtgtcaaaaagcgtgagagcacagcagccacaggcgtctgctgcccctctgcaacctgttctgcagcctccccctccgaccgctatctcgcagccagcgagtccgtttcagggcaacgccttccttacctcccagccagttccagtgggagtggttcctgccctgcaacccgcttttgtacccgcacagagctatccggtagcaaatggcatgccataccccgcaccaaatgtcccggtcgtcggaatcacgccatcccagatggtggccaacgtgttcggcaccgcagggcaccctcaggctgctcatcctcaccagtccccctctctcgtgcggcagcagacctttccgcactacgaggcctccagcgcaaccacatctccgttcttcaagcctcctgcacaacacctaaacggaagtgcggcatttaatggcgtggacgatggtcgtctggccagcgccgatcggcatacagaggtacccaccgggacgtgcccagtcgatccatttgaagcccaatgggctgcactcgaaaataaatcgaagcagagaaccaatcctagcccgaccaacccgttcagtagcgatttgcagaaaacttttgagatcgaactgtag

SEQ ID NO: 233443 - DNA, 777 bp, synthetic construct
  misc_feature 1..777: note = Description of Artificial Sequence: Synthetic coding sequence
  source 1..777: mol_type = other DNA
atgaataaactacgacagagcttccgccgtaagaaggacgtgtatgtacccgaagcctccaggccacaccaatggcaaaccgacgaagaaggagtacggacgggtaaatgctcttttccagtcaagtatttgggccacgtggaggtggatgagtcccgcggaatgcacatctgtgaagatgcagtaaagagactgaaggctgagcggaaattttttaagggattttttggtaaaaccggcaagaaagctgtcaaggcagtcctatgggtaagcgcggatggattacgggtggtcgatgaaaaaacaaaggacctgattgtggaccaaacaatagagaaagtgtccttctgcgcccctgatcgcaacttcgatagggcttttagctacatttgccgcgacggcaccactcggcgatggatctgccactgcttcatggccgtcaaggacactggggagagactgtctcacgccgttggctgtgcctttgccgcttgcctagagcggaaacaaaagagagagaaagagtgcggagtcacagccactttcgatgccagcagaactacttttacgagggaggggagcttccgggtgacaacggctacagagcaggccgagagagaagagatcatgaaacagatgcaagatgctaaaaaggcggaaactgataaaatcgtcgtcggttcttctgtggcccctggcaacactgctccatctcctagttccccgacttctccgacaagcgacgcaacgacaagcctagaaatgaacaacccctag

SEQ ID NO: 233444 - DNA, 1812 bp, synthetic construct
  misc_feature 1..1812: note = Description of Artificial Sequence: Synthetic coding sequence
  source 1..1812: mol_type = other DNA
atgaataagctgagacagtctttcagaaggaaaaaggacgtatatgtgcccgaagcctctcgaccacatcaatggcagacagacgaagaaggagtgaggacaggcaagtgctcatttcctgttaaatatcttggtcacgtagaggtcgacgagtcccgcggaatgcatatatgcgaggacgcagtgaagaggctcaaggctgagcggaaattcttcaaaggcttctttggcaaaactggcaagaaagctgtgaaggccgtcctttgggtgtctgctgacgggctccgtgtggtggacgagaagactaaggatctgatcgttgaccagaccatcgaaaaagtcagcttttgtgctcccgataggaacttcgaccgcgctttttcttatatatgcagggatggtacgactcgtagatggatatgtcattgctttatggccgtcaaagacacgggagagagactctcacatgccgtcggttgcgcatttgcggcttgtttagaacggaaacagaagcgcgagaaagagtgcggggtgaccgccacttttgacgcatcaagaacaacctttaccagagaagggagtttcagagtgacgaccgcaacagagcaggctgagcgggaggaaattatgaaacagatgcaagacgccaaaaaagcagagacagataagattgttgtgggatcatccgtggcgcctgggaacacggcacctagtccgagtagccccacatcccccacaagcgacgctactacttcactcgagatgaataatccacacgctattccccgtcgtcatgctccgattgaacaactagcaaggcaggggagcttccgaggatttcctgccctaagtcagaagatgagcccttttaagcggcagctgtcactgcgcatcaacgaattaccgtccaccatgcagcggaagaccgattttccaatcaagaacgctgtgcctgaggttgaaggagaggccgagtccatttcctccctttgtagtcagatcacaaacgcgttttcgacccctgaagacccgttctcatccgcgcctatgactaaacctgtaaccgtggtggccccacaatctcccacattccaaggcacagaatgggggcaatcttctggagctgcgagcccgggtctgttccaagcgggacaccgaagaaccccatccgaagcagaccgttggttagaagaagtcagtaagtcagtaagggcccagcagcctcaagccagcgccgctcccttgcagccagtactgcagccgccacctccaactgccatatctcagcctgcgtctccttttcaggggaacgcctttctaacgtcgcaaccagtgcccgttggtgtggtgcccgcactgcagcctgcttttgttccagctcagagctaccccgtggctaatggaatgccttaccctgctcccaacgtgccagtagtggggattactcccagtcagatggtggcaaatgtgttcggaacagctggccatccacaggcggcacacccccaccagtcaccttctctggtgaggcagcaaaccttcccccactacgaagcatcctccgcaaccacatccccattcttcaagccgcctgcccagcacctgaacgggagtgccgctttcaacggcgtggacgacggcagattggccagcgcagataggcacacggaggtacccactgggacctgccctgtagaccctttcgaagcccagtgggctgcattggaaaacaagtcaaagcaacgcacaaatccatcacctacaaaccccttttcttccgaccttcagaagactttcgagatcgagctctag

SEQ ID NO: 233445 - DNA, 1923 bp, synthetic construct
  misc_feature 1..1923: note = Description of Artificial Sequence: Synthetic coding sequence
  source 1..1923: mol_type = other DNA
atgaataagctgcgtcaaagtttcagaagaaagaaagacgtttacgtacccgaggcatcccgaccacatcagtggcagacagacgaggaaggagtgcgcacaggaaaatgctcctttcccgtaaaatacttggggcacgtcgaggtggacgagtctcgtggtatgcacatttgcgaggacgctgttaagcgattaaaagcgacagggaaaaaggcagttaaggctgttctgtgggttagcgcggacgggttgcgggtggtagacgagaaaacgaaagatctgattgttgatcaaaccatagaaaaagtgtctttttgtgcaccggacaggaattttgatcgggcattctcctatatatgcagggacggcaccactcgcagatggatatgtcattgcttcatggctgttaaagacaccggggagaggctttcccatgccgtgggttgcgctttcgccgcttgcttagaaagaaagcaaaagagggaaaaagaatgtggggtcactgccactttcgacgcttcccgcacaacatttaccagggagggttcattccgtgtcacaaccgcgaccgaacaagctgagcgggaagagataatgaaacaaatgcaggatgctaagaaggcagagacagataagatcgtagttggatcctccgtggcccctgggaatacagcgcctagccctagctcccccacatccccaacttcagacgcaactacaagtctcgagatgaataatcctcacgctattcctcgcagacacgcaccaatcgaacagttagctcgtcaggggtcgtttagaggattccctgcactgagtcagaagatgtctccgtttaaacgacagctgtcgctaagaatcaatgagttaccatccaccatgcaaagaaagaccgacttcccgatcaaaaatgccgtgcctgaagtggaaggggaggcagaatctatcagtagcctgtgtagccagattaccaatgccttctctacccccgaagatcccttctcctccgctcccatgaccaagcccgtcactgtggtagcaccacaatcccctacttttcaggctaacggaaccgactctgcgttccatgtcttggccaagcccgctcacactgcgctagcgcctgtggctatgccagttcgggagacaaacccctgggctcatgcaccagacgccgctaacaaagagattgccgctacttgcagtggaactgagtggggacagtcatccggagctgcctcacctgggctgttccaggcgggacaccggcgtactccatctgaagccgaccggtggctggaggaggtctctaagagcgttcgggcacagcagcctcaggcatccgcagcaccgctccagccagtacttcagccccctccacccacggccatttcccaacctgcttcccctttccagggcaatgcttttctcacaagccaacccgtgcctgtaggtgttgttcccgctctacagcccgcattcgtgcccgctcagagctaccctgtcgccaacggaatgccgtacccagcccctaacgtacctgtggtcggaatcaccccaagccaaatggtggctaacgtgtttgggaccgccggtcatcctcaggcagcacatccccaccagagcccctcactcgtgaggcagcagactttccctcactatgaggcctctagcgccaccactagcccttttttcaagccgccagcccagcatctcaacggcagcgcagcgttcaatggggttgacgacggcaggcttgcctctgccgatcgccatacggaggttccaacaggtacttgccccgtggaccccttcgaggctcagtgggcagcattggaaaacaaaagcaaacagaggacaaaccccagtccaactaacccattctctagtgatctgcagaagacatttgagatcgaattatag

SEQ ID NO: 233446 - DNA, 1830 bp, synthetic construct
  misc_feature 1..1830: note = Description of Artificial Sequence: Synthetic coding sequence
  source 1..1830: mol_type = other DNA
atgtcgagatctgccgcagcttccggaggccctaggagaccggaacgtcacttgccaccggctccctgcggcgctccaggtccacctgagacttgccgcacggagccagatggagccggaactatgaataagctgagacagtcattaagacgcagaaaacccgcatatgtgcctgaagcgagtcggccacatcaatggcaggctgacgaagatgctgttcgcaaaggcacttgtagtttcccagttaggtacctgggacatgtcgaggttgaggaaagtcgcggtatgcacgtctgcgaagatgccgtgaaaaagttgaaggccatgggccgaaagagcgtgaagtctgttttatgggtcagtgctgacggactcagggtggtcgacgataagactaaagatctgttggtggaccaaacaatcgagaaggtcagcttttgtgcccctgataggaacctcgacaaagcattctcatacatttgcagagacggtacaacacggcgatggatttgccattgttttctggccttaaaggactccggcgaacgtctctcacatgctgtggggtgcgcgttcgccgcatgcctggaacgaaaacagaggcgagagaaggagtgtggggttacagcggcttttgacgccagtcgaacgtctttcgccagggaaggcagctttagattaagtgggggtggccgacccgctgagagggaagcccctgataagaagaaggccgaggcagctgcagctccaacagtcgctcccggacctgcccaaccaggtcacgtgtcccccacccctgctacaacgtcacctggagagaagggtgaggctgggacgcctgtggctgctggaacgactgcggcagctatcccccgacgccacgccccactggagcagctggttagacaaggaagcttcaggggcttccccgctctttcgcaaaagaactctccttttaaacggcaattatcactgcggctcaatgagttgcccagcactctgcagcgccgaactgattttcaggttaaagggacagttcctgagatggagcctcctggcgctggagactccgactctattaacgccctgtgtactcagatctccagcagcttcgcttccgcaggagcacctgcaccaggtccacctccggctaccactgggaccagtgcctggggcgagcccagtgttcctcctgccgcagccttccagcccggtcacaagaggacgcctagcgaggccgaaaggtggctggaggaagtatcgcaggtggctaaggcccagcagcaacagcagcaacagcagcagcagcagcagcagcaacaacaacaacagcagcaagcagcttcagtcgccccagtgcctactatgccacctgccctgcagccttttcctgccccagtagggcctttcgatgccgcacccgctcaggtggctgtcttcttgccccctccccatatgcaacctccctttgttccagcataccctggacttggctacccccctatgccaagagtgccagtggtagggattacaccctcccagatggttgccaatgcattttgttcagcagcgcagctgcagccccagcctgccaccttgctggggaaagcaggcgcattccccccacccgcaatccccagcgccccaggcagtcaggcccgacctaggcccaatggagctccttggcccccagagccggctcccgctccagccccagagctggatcctttcgaggcacagtgggccgctcttgaaggtaaggccaccgtcgagaaacccagtaatcccttctctggcgatctgcagaagacttttgaaatagaactttag

SEQ ID NO: 233447 - DNA, 1707 bp, synthetic construct
  misc_feature 1..1707: note = Description of Artificial Sequence: Synthetic coding sequence
  source 1..1707: mol_type = other DNA
atgaataagctgaggcagtccttgagacggaggaagcccgcttatgtcccagaggcctctcgccctcaccagtggcaggccgatgaggatgccgtgcgaaaaggcacatgtagcttccctgtccgatacttggggcatgtggaggtggaggagtcaaggggcatgcacgtatgtgaagacgcagtcaagaagctcaaggcgatgggcagaaagtcagtgaaatccgtgctctgggtcagcgctgacggcttacgagtagttgacgacaagaccaaagaccttctcgtcgaccaaacaatcgaaaaggtgagcttctgcgctccggaccgcaacctcgataaggctttctcttatatttgtcgagacggcactacacggagatggatctgtcactgctttcttgccttgaaagactccggcgaacgcttatcccacgccgtgggatgtgcatttgccgcatgtcttgaacggaaacagcgaagggagaaggaatgtggtgtgactgccgcttttgacgcatcccggaccagctttgcaagggaaggtagtttccggctgagtgggggtggtcggccagcagaacgtgaggcccctgacaagaaaaaggctgaagcggcagccgctcccacagtagctccgggtccagcccagcctgggcatgtctctcctacccccgctacaacttctccaggcgagaagggagaagccggtactccagtagcagctggaaccacagcagctgcaatcccgaggcgccacgctccattggagcagctggttaggcaagggtcttttcgaggctttcccgctctatctcagaagaactcaccattcaagcgacagttatcacttcgcctcaacgaacttcccagtaccctgcaaagaagaacagacttccaagtgaaagggactgtgcccgagatggaaccaccaggggctggggacagcgactcaatcaacgctctctgtacacagatctcgagttcctttgcctctgcaggagctccggctccaggcccacctcctgccaccacaggaacgtcagcatggggagagccatccgtgcctcccgctgccgctttccagcctggccataagcgtacgccttctgaagctgagagatggctggaggaagtgagtcaggtggcgaaggcacagcaacagcaacaacaacaacagcagcagcaacagcagcagcagcagcagcaacagcaggctgcctcagtcgcccctgtgcccaccatgcctccggctctgcaaccttttccagcacctgtagggccattcgatgccgcacccgcacaggtggccgtgttcctacccccaccacatatgcaaccaccctttgttcccgcatatcccggtctgggttatccacctatgccccgtgttcccgtggtgggaataacccccagccagatggtggccaacgccttctgctcagccgctcagctccaaccccaacccgctactctgctcgggaaggcgggtgcttttccaccccctgctattccatctgcccctggctctcaggcccgtccgagacccaacggcgcaccctggccccctgaacctgcacccgcacctgccccagagttggatcccttcgaagcccagtgggctgccctcgagggcaaggctactgtggagaaacccagtaatcccttttctggagatctgcagaaaaccttcgagattgagctttag

SEQ ID NO: 233448 - DNA, 1446 bp, synthetic construct
  misc_feature 1..1446: note = Description of Artificial Sequence: Synthetic coding sequence
  source 1..1446: mol_type = other DNA
atgaaggggcgaggtatgcttgtcctgctgttacacgcagtggtcttaggacttccgagcgcttgggcagtcggagcatgcgcacgagcttgccctgccgcttgcgcttgtagcacagtcgaaagaggctgtagcgtccgctgcgatagagcaggcctgctaagagtgccagcggaacttccttgcgaggcggtcagtatcgacctggacaggaatggcctccgctttctcggcgaaagggcattcggcacgcttccctccctgagacggctgtcactcagacacaataacctgtcgtttataactcccggagccttcaaggggctacctcgcctcgccgaattgcggttagcccataacggcgatctcaggtatctgcatgcacggacctttgctgctctatcacgcctgcgtaggttggacctcgcagcctgtcggctcttttcagtgcccgaacggttactggccgaattgccagccctcagggaacttgctgccttcgacaatttgtttcgtcgcgtgcccggagctctgagaggtctcgctaacctgacacacgctcatttagagaggggaaggattgaggcagtcgcttcttccagcctccagggtttgcgcagactccgtagtctgagcctgcaggcgaatcgagtgcgcgctgtccacgctggcgctttcggtgattgtggagttctcgagcaccttctgctaaacgacaatttgctcgctgaacttcccgcagacgcctttcgtggcctgcggcgtctgcggaccctcaatctagggggaaacgccttagatagagtggcaagagcttggtttgcagacttggcagaactggaactgctctacctggacagaaactctatcgcatttgtagaggagggagcatttcagaacctgtctgggctcctagccctgcacctcaacggaaatcggctgactgtgcttgcttgggtagcgttccagcccggattcttcctgggtagactgtttctgtttcgcaatccctggtgttgcgattgtcgccttgagtggcttagagactggatggaaggctcagggagggtaactgatgtgccttgcgccagccctgggtcagtagctgggctggacctgtctcaagtgacctttggcaggtccagtgatggcctctgcgttgaccccgaggagttgaatctgaccacatcttcacccggaccgagcccagaacctgcagccaccacagtgagcagatttagctcactactcagcaaattgctggctcccagagtgcccgtggaggaggctgctaacaccactgggggactggccaacgccagtctgtctgatagtctgagcagccgcggagtgggaggcgcagggagacagccttggtttcttctggcgagttgtctccttcctagtgtggcgcagcacgtggtgttcgggctccagatggattag

SEQ ID NO: 233449 - DNA, 1446 bp, synthetic construct
  misc_feature 1..1446: note = Description of Artificial Sequence: Synthetic coding sequence
  source 1..1446: mol_type = other DNA
atgaaagggcgtggtatgctagtcttattgcttcacgctgttgttctcgggctgccctctgcatgggcggtgggcgcttgtgctagagcttgcccagccgcttgcgcttgttcaactgtagagagggggtgctccgtgcgatgtgaccgggcaggcctcctgagggtccccgctgagctcccctgtgaggccgttagcatcgatctggatagaaatggactgcgatttttaggtgaacgcgcatttggaacgctccccagtcttaggagattgagtctaagacacaataatctgtccttcataacccccggtgcatttaagggtttgcctcggctggcggaactgcgactcgctcacaacggtgatctgagatacctccacgcgcgtacctttgctgcgctgtcgaggttgcgcagactcgatctggccgcatgccgcctcttctccgtaccagagaggctgcttgctgagcttcccgcactacgggaactggctgctttcgataacttgtttcggagagtgccgggagcactgcgaggcctagccaacctgacgcacgcgcacctcgaacggggaaggatcgaggcggtggcaagctcctccctgcagggactgcgcagactccgctcactttccctccaggctaaccgcgttcgcgcagtacatgcaggcgcattcggtgattgcggcgtcctggagcacttgttgttgaacgacaatctgttagcagagctgcccgctgacgccttcagaggtttgcgaagactcaggactctcaacctggggggtaatgccttggaccgcgtcgctcgcgcttggtttgcagaccttgctgagctggaactgttgtatctggaccggaacagcatcgcttttgtggaggagggagcatttcagaatctcagcggactgctggccctgcatcttaatggtaatcgcctgactgttcttgcgtgggtcgccttccagccagggttctttcttggtagactctttctcttccgaaatccttggtgttgtgactgccgcttggagtggcttagagactggatggagggcagcggccgtgttactgatgtcccttgcgcgtcgccaggttcagtcgccggtctggatctctcacaggtcacattcggcagatcttctgacggtctttgtgtagacccagaggagcttaatttaaccaccagtagcccgggaccgagtccagaaccagctgcgaccacggtgtctaggttttcttctctgctgtccaaactgttagcgccaagagtcccagtggaagaagccgctaacacaacaggcggtctcgccaatgcaagtctcagtgacagtctctcatcccgaggggtgggtggagcaggaagacaaccctggttcctactggctagctgtctgctcccatcagtggcccagcacgtggtttttgggttacagatggactag

SEQ ID NO: 233450 - DNA, 1191 bp, synthetic construct
  misc_feature 1..1191: note = Description of Artificial Sequence: Synthetic coding sequence
  source 1..1191: mol_type = other DNA
atgcctccgaaaaaggggggtgacggtataaaaccacctccaatcattggacggttcggcacctccctgaagataggcattgttggcctgccaaacgtgggcaagtccaccttcttcaatgtcttgaccaacagccaggccagtgctgagaactttccattttgtaccatcgatcctaatgagagccgcgtacctgttccagatgaacggtttgatttcctatgccagtatcacaaacccgcatccaaaattccagccttcctgaatgtggtggatatcgctggattagttaaaggggctcataacggccagggacttggtaacgcttttctgagccatatctcggcatgtgacggtattttccacctgacccgtgccttcgaagatgatgatatcacccacgtggaggggtcagtagatcctatccgcgatatcgaaattatacatgaggagctgcagctaaaagatgaagagatgatcggaccaatcatagataaattggaaaaagtggcagtgcgtggcggagacaagaaactgaaaccggagtacgacatcatgtgcaaagtaaagagctgggtgatagaccagaaaaagcccgtaagattctaccacgactggaatgacaaggaaatagaagttctaaacaagcatctgttcctcaccagcaagccgatggtgtatctcgtgaatctcagtgaaaaggactatatcaggaagaagaataaatggttgattaaaattaaggagtgggtcgacaaatatgatcctggcgctcttgtgatccccttcagcggtgctctggagctgaaattacaggagctttccgcagaggagcgtcaaaagtacctggaggccaatatgacccagtctgcgctgcccaagattatcaaggctggcttcgccgctctacaactcgagtatttctttacagctggacccgacgaagtgcgtgcgtggactatccgtaaaggaaccaaagcccctcaagccgcaggaaagatccacaccgattttgagaaagggtttattatggccgaagtgatgaagtacgaggacttcaaagaggaggggtcggagaacgccgttaaggccgcagggaagtaccggcagcagggtagaaactacatcgtggaggatggcgatattatcttctttaagtttaataccccacagcaaccgaagaagaagtag

SEQ ID NO: 233451 - DNA, 717 bp, synthetic construct
  misc_feature 1..717: note = Description of Artificial Sequence: Synthetic coding sequence
  source 1..717: mol_type = other DNA
atgatcggtcccattattgacaagctggaaaaggtagccgtgcggggaggtgataaaaagcttaagcctgagtacgatataatgtgtaaggtgaagagctgggtgatagaccagaagaaaccagtgcgcttctatcacgattggaatgataaagagattgaagtgcttaataagcacttgttcctcacttctaagccgatggtataccttgtgaatctcagtgaaaaggactatatccgaaaaaaaaacaaatggctgatcaaaatcaaggagtgggtggataagtatgaccccggagccctggtcatacctttctcgggcgctctggaacttaagctccaagagctgtccgcagaggaaaggcagaagtatctggaagcaaatatgacacaatccgccctgcccaaaatcattaaagccggatttgctgcactgcaactggaatacttcttcaccgctgggccagatgaagtgagagcatggacaatccggaaaggtaccaaggcaccgcaggcggctggaaaaatccataccgattttgagaagggttttatcatggcagaggttatgaagtacgaagacttcaaggaggagggctctgagaacgctgtgaaggcggctggaaagtacagacagcaaggccgaaactacatcgtggaggatggcgacattatttttttcaagttcaatacgccacaacagcccaagaagaagtag

SEQ ID NO: 233452 - DNA, 1251 bp, synthetic construct
  misc_feature 1..1251: note = Description of Artificial Sequence: Synthetic coding sequence
  source 1..1251: mol_type = other DNA
atgtctagaacctttagcgccaaggggggaagggaccttgtggagggcccacagtacctcatgcctcccaagaagggaggcgatggtatcaagcccccacccatcatcggaagattcggcacttccctgaaaatcggcatcgtcggtctgccgaacgtgggtaagtctaccttcttcaatgtgctgactaattcccaggccagtgcagagaacttccctttctgcactattgaccccaatgaaagccgagtgcctgtgcctgacgagcgctttgactttctgtgccagtaccataagcctgcctctaaaatacccgcattcttaaatgtcgtggatatcgccggtctagtaaaaggcgctcacaacggccagggcctggggaatgccttcctgtcacacatctcagcttgcgatgggatcttccatctcaccagagcctttgaagacgacgacatcactcacgtggaagggtcagtggaccctataagggacatagagatcatccacgaggaacttcagctcaaagatgaggaaatgatcggccctatcattgacaagctcgaaaaagtggcagtcagaggcggtgacaaaaagctgaaacccgagtacgacatcatgtgcaaggtcaagtcatgggtgatcgaccagaagaagccagtcaggttttaccacgattggaacgacaaggagatagaggtcttaaacaagcacctgttcctgacttctaaaccgatggtatatctggttaatctctccgagaaagattacatcaggaaaaagaataaatggctcattaaaatcaaggagtgggtcgataagtatgacccaggcgcactcgttattcccttctcaggggctctcgagttgaagctccaggagctttctgcggaagagaggcagaagtatcttgaagccaatatgacacagtcggcacttccaaaaatcatcaaagccggtttcgcggctctacagctggagtatttttttacagctggccctgacgaagtcagagcctggacaattagaaaggggacaaaggcccctcaagctgctggaaagattcatactgattttgagaagggctttataatggcggaagtaatgaaatacgaagactttaaagaagaaggttctgagaatgcagttaaggccgcagggaagtatcgtcagcagggaaggaattacattgtagaagacggcgatatcattttttttaaatttaacacacctcaacagcctaagaagaagtag

SEQ ID NO: 233453 - DNA, 351 bp, synthetic construct
  misc_feature 1..351: note = Description of Artificial Sequence: Synthetic coding sequence
  source 1..351: mol_type = other DNA
atgccccctaagaagggtggcgacgggatcaaacccccaccaattatcggacgcttcggcactagcctgaagattggcatcgtgggcttgcccaatgtggggaagtccaccttctttaacgtgctcaccaactcccaagccagtgccgagaacttcccgttctgtaccattgaccccaatgaatcaagggttcctgtgcccgatgagcgttttgacttcctgtgtcagtatcataaacctgctagtaagatccctgccttcctgaacgtggtggacattgcaggtttggtgaagggagctcacaatgggcagggactggggaacgcgttcctgagccacatcagcgcctag

SEQ ID NO: 233454 - DNA, 837 bp, synthetic construct
  misc_feature 1..837: note = Description of Artificial Sequence: Synthetic coding sequence
  source 1..837: mol_type = other DNA
atgccccctaaaaaagggggtgatggaataaaacctccacccataatcgggaggttcggaacctctctcaagatcggcatcgtgggccttcccaatgtggggaaatccacattcttcaatgttctgaccaatagccaggcctctgcggaaaactttccgttttgcacgatagatcccaacgagagtagagtgccggtgcctgacgagcggttcgacttcttgtgccagtaccataagcctgcaagcaaaattcccgctttcctgaatgtagtcgacatcgctggcctcgtaaagggcgcacacaatggacagggcttaggaaacgcatttctgtcccacatcagtgcctgtgatgggatcttccacctgaccagggccttcgaggacgacgatataacccacgtggagggatctgtggatccaatcagagacatagagatcatccatgaagagttgcaactgaaggatgaagaaatgatcggccctatcatagataaattagaaaaggtggccgtgcgcggaggagataagaaactgaagcctgaatacgatattatgtgtaaggtgaagtcttgggtgatagaccagaaaaagcccgttcgcttttaccacgattggaacgacaaagagatcgaagtcctcaataaacacctgtttcttacatctaagcccatggtgtaccttgtgaacctttctgagaaggactatattaggaaaaaaaacaagtggctactcgagtccaccgataataaggccgagattatcctcttgaaaatggagatcctctcttcttcgaatctaactcacctgaataataggagacggaacaagatttag

SEQ ID NO: 233455 - DNA, 312 bp, synthetic construct
  misc_feature 1..312: note = Description of Artificial Sequence: Synthetic coding sequence
  source 1..312: mol_type = other DNA
atgatcgggccaatcattgacaagctggaaaaagtcgccgtgcgcggtggggacaaaaagttgaaacctgagtacgacatcatgtgcaaagtgaagtcctgggtaatcgaccaaaagaaacctgtcagattttatcatgactggaatgacaaagagatcgaagtcttgaataaacacttatttttaacaagcaagccaatggtgtacctcgtgaatcttagcgagaaagattacatccggaaaaagaataagtggttgattaagatcaaagaatgggttgacaagtacgaccccggtgctctcgtgatctag

SEQ ID NO: 233456 - DNA, 1329 bp, synthetic construct
  misc_feature 1..1329: note = Description of Artificial Sequence: Synthetic coding sequence
  source 1..1329: mol_type = other DNA
atgtgtgagctttctcgcgaagacgctccagtcagatggtacaaagatggcctggaggtagaggaaagcgaggccctggtgctggagcgggacggccctcggtgtcggctcgtgttgccggcagctcaaccagaggatggcggtgagttcgtctgtgacgctggagatgacagcgcattctttactgtcaccgtgacagctccgcctgaacgcatagtccacccagcggcacggagtctcgatctgcatttcggcgctcccggaagagttgaattgcgatgcgaagtggcccctgcgggatcacaagtgcgttggtataaggacggactcgaggttgaagctagcgacgcactccagttgggggcagaaggcccaaccagaacattgacgcttcctcacgcccagcccgaagacgctggcgagtacgtgtgcgagaccagacatgaagccattacttttaacgtgatcctggccgaaccgcctgtgcagttcttggcgctagagacaaccccttcgcccctttgtgtggctcccggagaacccgtcgttttaagctgtgaacttagtcgagctggagctccagtcgtgtggtcacataatggacgccctgtgcaagagggcgaaggcttagagctgcacgcagaaggccctagaagagtgctgtgcatccaggctgccggaccggctcacgccggtctctacacatgtcagagcggcgcagctcccggagcacccagcctgagcttcactgtgcaggttgccgaacccctactggtgaagctggtaagtgaactgacgccactgacagttcacgagggtgacgatgccacattcagatgcgaagtctcccccccagatgcagacgtgacatggctcaggaacggcgcagtggttactccaggaccacaggtggagatggcccagaacggtagcagtcggattctcacacttcgaggctgccagctgggtgacgcgggaaccgttaccctccgcgctgggagtacagccacttctgcccgactccatgtgagggagaccgaactactcttcctgcgcagacttcaggacgtgagagccgaagagggtcaagatgtatgtctcgaggttgagactggccgagtgggagccgctggcgctgtaagatgggtgagaggtgggcagcccctgccccacgacagccgcctgtctatggcccaagacgggcacatccacagactgttcattcatggggtaatccttgctgaccaagggacatacgggtgcgaaagccaccacgaccgcaccctggcaagactctccgttcgacgtgagtgccccgttctgtcatag

SEQ ID NO: 233457 - DNA, 4206 bp, synthetic construct
  misc_feature 1..4206: note = Description of Artificial Sequence: Synthetic coding sequence
  source 1..4206: mol_type = other DNA
atgaaagccagtagcggagaccagggatcgccaccatgctttctgaggttccccagaccagtgagggttgttagcggagcagaggccgagttgaaatgtgtggtcttgggcgagccacctcctgttgttgtctgggaaaagggaggccagcaattggctgcaagcgagcgactgagctttcccgctgacggggctgaacatggcctgcttctgactgcagcattaccgacggacgccggagtttatgtctgcagagcaagaaatgcagccggtgaggcatatgccgctgcagcagttaccgtcctggagcctccagcctcagaccccgaactgcaacctgcagagaggccacttcctagcccaggctccggcgagggagccccagtattcctgaccggacctagaagccagtgggtgctccgcggagctgaggtggttctcacatgccgtgcagggggattgccagaaccgaccctatactgggaaaaagacggcatggccctggatgaggtgtgggactcctcacatttcgcactacaaccgggtcgagcggaggatgggccaggagcctcactagctctgaggatcctcgctgcgagacttcccgattccggcgtgtacgtctgtcatgctagaaacgcgcacgggcacgcccaggccggagcactgttgcaggtgcatcagcccccagagtcgccccctgctgaccccgacgaggcccctgcacccgtagtcgagcctctcaaatgtgctccgaaaaccttctgggtgaacgagggaaagcatgcaaagtttaggtgctacgttatgggcaagcctgaacctgaaattgagtggcactgggaagggaggcccctcctgcctgaccgaaggagactgatgtacagagatcgcgatgggggatttgtgcttaaagttctatattgccaggctaaagatcgaggtctgtacgtgtgtgccgcaaggaatagcgctggccaaacattatccgctgtgcaattgcacgtcaaggaaccaagattacgattcacacgacccctgcaggatgtggaagggagagagcatggtattgctgtcttggaatgcaaagtccccaactctagaatcccgacggcatggtttcgggaagatcaaaggcttcttccgtgccggaaatacgaacagatcgaggaggggaccgtcaggagattgatcattcataggctcaaagccgacgacgatggtatttatctctgcgaaatgcgcggacgggtgcgtaccgtcgccaacgtgacagtgaagggaccaattcttaaacggctgccccgaaagttagatgtgcttgagggggagaacgctgtactgttggtcgagactctcgaagctggcgtagaaggcaggtggagccgcgatggcgaggaactgccggtgatctgtcaatccagctcaggccacatgcatgccctggtcctcccaggcgtaacacgcgaggacgccggtgaagttaccttcagcttgggcaattcaagaacaaccactctccttagggtgaagtgcgtcaaacactctccccctgggccacctattctcgctgaaatgtttaaaggtcacaaaaacacggtcttactgacctggaaaccccctgagcccgcacctgaaacccctttcatctatagactggagaggcaggaagtcggtagtgaggattggatccagtgcttttctatcgaaaaggccggagctgtggaagtgccaggagattgcgtgcccagcgagggggattaccgtttccggatctgtacagtctccggtcacggccgatccccgcatgttgttttccatggctccgctcaccttgttccaacagcacgcctggtggccggtcttgaggacgttcaggtatacgacggtgaggatgccgtcttctctttggacctctctacaattattcaaggcacatggtttttgaacggagaggaattgaaaagcaacgaaccagagggccaggtcgagcccggtgccctcaggtaccgtatagagcagaagggactgcagcataggctgattcttcacgcggtaaagcaccaggactcaggcgctcttgtaggatttagctgtcctggcgttcaagactcagccgcactcactattcaggagtcccccgttcacattctgagtccccaggaccgggtgagccttacttttaccactagcgagcgtgtggtgctgacatgtgagctgtcaagagtggattttcctgctacctggtataaagacggccagaaggtggaggagagtgagttgctggttgtcaagatggacggcagaaaacaccgtttaatcctccctgaggcgaaggtccaggacagtggcgagtttgagtgtcgaaccgaaggcgtatcggctttcttcggggttacagtccaggatccccctgtccacatagtggacccaagagagcacgtctttgtgcacgctattacatccgaatgtgtgatgctcgcctgtgaggtagacagggaggatgccccagtcaggtggtataaagatggacaggaagtagaggagtctgacttcgtagtactggaaaatgaaggtccccaccgacgactggtgctgcccgctacccagccatctgacggaggagagtttcagtgcgtcgcaggcgatgaatgcgcatacttcacagtgacaattactgacgtctcaagctggatcgtgtatcccagcggaaaagtgtacgttgccgctgttcgcctggagcgcgttgtcctgacttgcgaattatgtaggccatgggccgaagtccgttggacaaaagacggtgaggaggttgtcgagagccccgctctgctcttacagaaggaggatacagtgcgaaggttagttctccctgccgtacaattagaggactccggtgagtacttatgcgaaattgacgacgaaagcgcctccttcaccgtaaccgtgaccgaaccacccgtccgcattatttatccgcgtgacgaggtaactcttatagcagtgacactcgagtgtgtcgttcttatgtgcgagctgagccgcgaagatgcccctgtccgctggtacaaggatggcctcgaggtcgaggaatcagaagctctcgttctggagcgggacgggccaaggtgtcgcctcgttctgcccgctgcacagcccgaagacggtggcgagttcgtgtgcgatgcgggtgacgattccgccttcttcactgtgaccgtcactgaaccccctgtgcagtttctcgcactcgaaacaactcccagtcctctgtgtgtggctcctggggaacccgtcgtgctgagctgtgagttgagtcgggctggagcccctgtggtgtggtcacacaatgggagacccgtgcaggagggcgaggggttggagctgcatgccgaaggccctagaagagttctttgtatccaggctgccggaccagcacatgccggtctgtacacgtgtcaaagcggcgctgctcccggagctccgagcctcagcttcaccgtacaggtagccgagcctccggtgagagtggtcgcgcctgaagctgctcagacgagggttcgaagcactcctgggggagacctagaactggtggtccacctgagcgggccaggcggaccagtgaggtggtataaggatggcgagcggttagctagtcagggaagggtccagttggagcaagcgggagcacgccaggtacttagggtacaaggtgcaaggagcggagacgcaggggaatacctgtgtgatgcccctcaggacagcagaatattcctcgttagtgttgaggagccccttttggtgaagctcgtcagcgagttgacccctctgaccgtgcacgagggagacgatgctactttccggtgcgaggttagcccacctgatgctgatgtgacatggctgaggaacggcgcagtggtgacccctggaccacaaaggcagtcctgttgttcttacggcggttgtagaatgtgtggccagaggaaggcccgaatgtgtgtgtcgaagtggcgtcaagccgagtgggtccagagagggccttgtgccggatgtgaggtgggatccccttgtcctaccactctggcctgcccttggcctcgtatgggaactagcacagcatcctcctcaatggtctcttactggcccacgcgcgcacccaccgctgccagggctactactattgctccttggccaggctctgcatag

SEQ ID NO: 233458 - DNA, 3078 bp, synthetic construct
  misc_feature 1..3078: note = Description of Artificial Sequence: Synthetic coding sequence
  source 1..3078: mol_type = other DNA
atgaaagcctcgtccggagatcaaggctctcccccatgtttcctccgatttccccgaccagtgagagttgtgagcggggcagaagccgaactgaaatgcgtggtgctcggtgagcccccacccgtcgtcgtgtgggaaaaaggcggtcaacaactcgccgcttcagaacgcctcagtttcccagccgacggtgccgagcatgggctcctgctaaccgcagccttacctaccgacgctggcgtatacgtgtgccgggctcgaaacgccgctggagaggcgtatgctgcggcagccgtgaccgtccttgagccaccagcctctgatcctgagctgcagcccgcagagcggcctttgccttctccaggcagcggagagggcgctcccgtgtttcttacaggtcccaggtcccagtgggtccttcggggtgccgaagtggtgctgacttgtagagcaggcggtctgccagagcctactctctactgggagaaagacgggatggccctagatgaagtctgggactcctcccactttgcactccagccaggacgcgctgaggacggtcccggagccagcctcgccttaagaatattggccgcaaggttgcccgattccggagtatatgtttgtcacgccaggaatgcccatggccatgctcaggccggagccctccttcaggtccatcagcctcctgagtcccctccagccgaccccgacgaagcccctgccccagttgtggaacctctgaagtgcgccccaaaaaccttctgggtcaacgagggcaaacacgctaagttcagatgttacgtgatgggcaagccagaaccggagattgaatggcactgggaaggcaggcctctgttaccagaccgacgccgtctgatgtaccgtgatagagacggaggtttcgtgctcaaggtactgtattgtcaggccaaggatagaggcctctacgtctgcgctgcccgtaattccgctgggcaaactctgtccgctgtacagctccacgttaaggaacctcggcttcgctttacccggcctttacaggatgtagaaggacgtgaacatggcattgccgtacttgaatgtaaggtcccaaattcccgaatccccacggcctggtttcgcgaggaccagcgtctgcttccctgtaggaagtacgagcaaatcgaagaggggacagttaggcgcctcattattcacaggctcaaggcagatgatgacggaatatacctttgcgagatgagaggaagggtacgcacagtggctaacgttactgtgaaaggtcctatactgaagcgattgccacgaaagctcgacgtgctagagggcgagaatgctgtactgctcgttgaaacgctggaggcaggtgtagaaggccgatggagcagagatggcgaggagctccccgtcatatgccaatcatcatcaggacacatgcatgccctggtgttacccggtgtgacaagggaggacgcgggagaagtaacttttagtctagggaactccaggactactaccttgctgcgcgtcaagtgtgtcaagcactcacccccaggaccaccaatactggccgaaatgttcaagggccacaagaacaccgtccttctgacctggaagccgccagagcccgctccagagacaccctttatctaccgcctggaacggcaggaggtgggatccgaggattggatacagtgtttctcaattgagaaggctggcgctgttgaagtcccaggagactgtgtcccttctgagggtgattatagatttcggatctgcacagtgagcgggcacgggagatctcctcatgtggtctttcacggttctgcccacctcgttcctacggccaggctagtggcaggcctggaagacgttcaggtgtatgatggggaagacgccgtgttctcacttgacctttcaacaattattcagggtacctggtttctcaacggagaggagttaaaatccaatgaacccgagggacaagtggagcccggtgccctacgctaccgcattgaacaaaagggactgcaacataggctgatacttcacgccgtgaagcaccaggactctggcgctctggtaggattctcctgccctggagttcaggactctgcggcacttaccatccaggaaagccccgtgcacattctgtccccacaggacagggtatccctcacttttaccacctctgaaagggtggtactaacctgcgaactatcaagagtggactttcctgcaacatggtacaaagatggccagaaagtggaagagagcgaactgctagtggttaagatggatggtcggaagcatagactcattctccccgaagctaaggtgcaggacagcggggagtttgagtgtcgcaccgaaggggtgagtgcatttttcggagtgaccgttcaggacccccctgtccacatagtggaccccagggagcacgtgttcgtgcatgccatcacatcagaatgcgttatgctcgcgtgtgaagtagatagagaagacgcccctgtgcgatggtacaaggacggacaggaagtagaagaaagcgacttcgtcgttcttgaaaacgaaggccctcaccgcagactcgtcctgcctgccacacagcctagtgatggaggggagttccagtgtgtggccggagatgagtgcgcatattttacagtgacaatcaccgatgtgagctcttggattgtgtacccctctggaaaggtctatgttgccgcagttcggttagagagggtggtattgacatgtgaactatgccggccatgggctgaggtgcgttggactaaggacggagaggaggttgtggagtcccccgcactgctactgcagaaggaggatactgtgcgtcgacttgtgctgcctgctgtgcagttggaggattccggagaatatctgtgcgagatcgatgacgaatccgctagcttcaccgtcacggtcacagaatcttaccagtcccaggacagtagcaacaacaatccagaactatgtgttctgttgaagaagccaaagactcgcagactgtggagtcggttcccaccctggcgaagaacggcaggtaccgagtag

SEQ ID NO: 233459 - DNA, 5690 bp, synthetic construct
  misc_feature 1..5690: note = Description of Artificial Sequence: Synthetic coding sequence
  source 1..5690: mol_type = other DNA
atgaaagcttcttcaggggaccagggatcccccccatgtttcttgaggtttcctcggccagtaagggtcgtctctggagccgaggcggagttgaagtgcgtagttctcggggagcctcctcccgttgttgtgtgggagaaggggggacagcagctggccgcttcagagagactgtcctttcccgcagatggagccgagcacgggctgctgctgactgctgctctgcccactgacgcaggtgtctatgtgtgtcgcgctaggaacgctgcgggtgaagcgtatgcagccgctgctgtgacagtccttgaacctcccgctagcgacccagagttgcagcctgcggaaagaccactgccgtccccaggcagcggagagggggctccagtcttcctgaccgggcctcgttcccagtgggtcctccggggagctgaggtggtactgacatgccgggcagggggactccccgagcctaccctgtactgggaaaaagatggaatggcactcgatgaagtgtgggactcatcgcacttcgccctccagccgggacgggctgaggatggacccggtgcgagtctggccctacgtatcttagcggcaaggttgcctgattcaggagtttatgtgtgtcacgcccgtaacgcgcacgggcatgcccaggccggagcacttctgcaagtccaccagcctcccgaatccccacccgctgacccagacgaggctcccgctccagtggtcgaaccccttaaatgcgcacccaaaactttctgggtgaacgaggggaagcacgccaaattccgttgctatgtgatgggaaaacccgaacctgagatcgaatggcactgggagggcaggcctctgcttcccgacaggcgtcgcttaatgtaccgcgacagagacgggggatttgtgctcaaggttctgtactgccaggccaaagatagaggcttgtacgtctgtgcggcaaggaacagcgctggacaaactctatccgccgttcagttgcatgtgaaagaacctcggctgcggtttacccgcccactccaggacgtggagggtcgtgaacatggcattgctgtcctggaatgtaaggttcccaacagccgcatcccaacagcttggttccgggaagaccaaaggctgcttccatgccggaaatatgaacagatcgaggagggcacagtccgccgtctgattatccatcgcctcaaagccgatgatgacggtatctatctctgcgagatgagaggaagggtgaggacagttgctaacgtgacagttaaagggcctatacttaaacgtctgccgaggaaattagacgtgttggaaggtgagaatgccgttctgttagtagaaactctcgaagcaggtgtagaaggacgctggagcagggacggtgaagagctgcctgtaatctgccagtcgtcttcaggccacatgcacgctctcgttctgccaggcgtgacaagggaagacgctggcgaagtgaccttcagccttggcaattccaggaccaccacccttctgagggtgaaatgtgtgaagcatagtccacctggcccaccgatcctcgcagagatgtttaaagggcataagaatacggtgctgctgacatggaagcccccagagccggcacctgagacccccttcatctatcgcctggagcgacaagaggtcgggagcgaggactggatccagtgcttttcaatagagaaggccggtgcagtggaggtacctggggattgcgttcccagtgagggagattatagattcagaatctgcaccgtcagtgggcatgggaggagccctcacgtggtgtttcacggcagcgcacatctggtgcctacggcaagactggtagccggtctcgaggatgtccaggtgtacgatggggaggatgctgtgttttccctcgatctgtccacaataattcagggcacgtggttcctaaatggagaggaattgaaatcaaatgaaccagaaggccaggttgaacctggagctctgaggtacaggattgaacagaaggggctgcagcatcgcctgattctccacgccgttaagcaccaggactctggcgcactggttggtttctcatgtcctggggtgcaggattccgctgcactgacgattcaggaatctcccgtgcatatcctgtcaccccaggatcgggtgtcactcaccttcactacatccgagcgcgttgtgctgacatgtgagctgtccagggtcgatttcccagccacatggtacaaagatggccagaaggtagaggagagcgagctgctggttgtgaagatggacgggaggaaacaccgtctgattctaccagaggccaaagtgcaggatagcggagaatttgagtgtagaactgaaggggtgagcgctttcttcggagtcacggtgcaagatccacctgtacacatagtcgatccaagggaacatgtgttcgttcatgccataacatccgagtgcgtcatgctagcatgcgaagtcgacagagaggacgctcccgtccgctggtataaagatggacaggaagtggaagaatccgacttcgtggtactagagaacgagggaccccatcgcagactggtgctgcccgctacccaaccttctgacggcggtgaattccagtgcgtggccggtgacgagtgcgcctacttcacagtgactatcactgacgtgtctagctggattgtgtatccttctggcaaggtgtacgtcgccgctgtgcgactggaacgggttgtgctaacatgcgagctgtgccggccttgggcagaggtcagatggacgaaagacggagaggaagttgtcgagagtcctgccctgctgctgcagaaggaggacactgtccgcagactggtattgccagccgtccagctcgaggattccggggaatatctctgtgaaatagacgacgaatctgcctcctttaccgtgacggtcaccgagcctcctgttcgcatcatataccctcgcgacgaggtcaccctcatagccgttaccctcgagtgcgtggtcctgatgtgcgagttgtctcgagaggacgccccagtgcgatggtacaaagatggacttgaggtcgaagagtccgaggccctcgtcctggagagagatggccctcgctgtagactggtacttcccgcagctcagcctgaggatggcggagagttcgtctgcgatgcgggagatgactccgccttcttcacggttacagtgactgcacccccagagcggattgtgcaccctgccgctcggtccctggatttgcacttcggcgcacctgggagagttgaactcaggtgcgaagtcgccccagctggtagtcaggtgagatggtataaagacggactggaagtcgaagccagcgatgccttgcagctgggcgctgaaggtccaacacgaactctcaccttgcctcacgcacagccagaagacgctggcgagtacgtgtgcgagaccaggcacgaggccatcacattcaatgtcattctagccgaaccgccagtccaattcctggccttagaaaccactccttccccattatgcgttgcgccaggagaaccagtggtgctgtcttgcgaactgtctagggctggcgcacctgtggtctggagtcacaacggacgccctgtgcaggaaggggagggcttagagcttcatgcagagggcccaaggcgcgtactatgcatccaggcagccggaccagcacacgccggtctttacacatgccagagcggcgctgccccaggtgccccatcactctcgttcaccgttcaggtcgcagagcccccagtccgcgtggtggccccagaggccgcacaaacccgggtacgctccaccccaggtggagacctggaacttgtggttcacttgagcggccctggcggtccagtgaggtggtataaggacggcgagagactcgctagccaaggccgtgtacaactcgagcaggccggagctaggcaggtcctcagggttcaaggggctcggtcaggtgacgccggagagtacttatgcgacgctccacaggatagcaggatattcctggtgagtgtcgaagaaccgctgctggtgaagctcgtctctgaactgacacccctgactgtgcacgagggagatgacgctacctttaggtgcgaagtgagccctccagacgcagacgtgacttggctgcgcaacggagcagtggtgactcccggaccgcaagtggaaatggctcagaacgggagctctaggattctgacactgagagggtgccagttaggggacgccggaaccgtcacgctgcgagccggttcaaccgccaccagtgcccgattacacgtccgcgaaactgagctcctatttttacgcagattgcaggatgtcagagctgaagagggccaggacgtatgcctggaagttgaaaccggcagggtaggtgccgctggggctgttagatgggtgaggggcggtcagccactccctcatgactctcgcttgtcaatggcacaggatgggcacatccaccgcttgtttatccatggagtcattctggcggaccagggtacctatggatgcgagtcacatcatgaccgcaccctcgcccgtttgagcgtgcgccctcgtcagttacgcgtccttcgccctctggaagatgtgaccatctctgaaggtggaagtgctacattccagctggagctaagccaggagggggtgacaggagagtgggctaggggcggagttcagctgtacccagggcctaagtgccacatccactccgatggccaccgtcatcggctagtattaaacggactcggactggctgactcagggtgtgttagctttacagcagactcattgcggtgcgcagcgaggctcatagtaagggaggtcccggtaacgatagtgcgaggcccacatgatctggaagttaccgagggggatacagctacttttgagtgtgaacttagccaagccctcgccgacgtgacctgggagaaagatgggaatgctctgacgccgtcccctcggctgcggctccaggcactcgggacacgaaggctgctgcagctgagacgctgcgggccttctgatgctggaacctattcctgcgcggtgggtaccgccagggccggacctgtccgcttgaccgttcgcgagagaaccgtagcagtcttgtcagaactgcggagtgtttccgcccgagaaggtgatggggcaacatttgagtgtaccgtctcagaggtcgagactactggcaggtgggagttgggaggcagacccttacgccctggagcccgtgtacgaataaggcaggaggggaagaagcatattctagtgctttctgagctgagggccgaggatgcaggagaagtgcgattccaggcgggacctgcccagtcactggctctgttggaagtggaagccctaccgctccagatgtgccgccatcctcccagggagaaaacagttctggttgggagacgagctgtgttagaagtcacagtctcccggtccggtgggcacgtgtgttggctacgagaaggggctgagctgtgtccgggtgataaatacgagatgagatcccacgggccaactcacagtctggtaatacacgacgtccgaccggaagaccagggcacttattgctgccaagccggacaggacagtacccatacgagactgctagtcgaggggaacta

SEQ ID NO: 233460 - DNA, 2682 bp, synthetic construct
  misc_feature 1..2682: note = Description of Artificial Sequence: Synthetic coding sequence
  source 1..2682: mol_type = other DNA
atggaaccaccactgcccgtgggtgcccaacctctcgctactgtggaaggtatggagatgaagggaccattaagggaaccgtgcgccctgacgcttgcgcagcgtaatggtcagtatgaactgatcattcaacttcacgagaaggagcagcacgtccaggacattatacctatcaactctcatttccggtgtgtgcaggaggcagaggagacactattaatcgacatcgcaagtaattcaggatgcaagatccgtgttcagggggattggattcgcgaaagacgcttcgaaatccctgacgaagagcactgcctcaaattcttatccgccgtcctcgctgcacagaaggcacagtctcagctgcttgttcctgaacagaaggacagcagtagttggtatcagaaactcgatactaaagacaagccaagcgtcttttctgggctactaggatttgaggacaactttagcagcatgaatttagataagaagattaattctcagaaccagcccaccggaattcatagagagccaccccctccacccttttccgtaaataaaatgctgcccagagaaaaggaagcctccaataaagagcaaccaaaggttaccaacaccatgaggaagctctttgtccctaacactcagtcggggcagcgcgaaggactgattaagcacattctggcaaaaagagaaaaagagtacgtgaacatccagacctttcggttctttgtgggaacctggaatgttaacggacaatcacccgattcaggtctggagccatggctgaactgcgacccaaatcctcccgacatctactgcatcggctttcaggagctggacctgtccactgaagcttttttttatttcgaaagtgtgaaggaacaggagtggtccatggcggtcgagaggggtctgcacagcaaagccaagtacaaaaaagtacagctggtgcggctggttgggatgatgctgctcatcttcgcacgcaaagaccaatgtagatacattagggatatcgccactgagacagtgggtactggcatcatggggaagatgggtaacaagggcggtgtcgcagtccggttcgtcttccataatacgaccttttgtattgtcaactctcatctagcggctcatgtggaggactttgagcggagaaatcaggactacaaggacatctgtgctaggatgtctttcgtggtcccaaatcaaacactgccacagctgaacatcatgaagcacgaagtggtgatctggttgggcgacctgaattatcgactctgtatgccggatgcgaatgaggtcaaatcactcatcaacaagaaagatctgcagaggctattaaagtttgaccagctcaatattcagagaacacagaaaaaggcttttgtggatttcaatgaaggggaaatcaaatttattcccacttacaaatacgacagcaaaactgatcggtgggactcttcgggcaagtgtagagtgccagcatggtgtgataggatcctgtggcgcggaacaaatgtgaatcagctgaactataggtctcacatggagctgaaaacaagcgatcacaagccagtgtcagcattgtttcacatcggggtcaaggtcgttgatgagagaagataccgcaaggtgtttgaggattctgtgcggataatggacagaatggaaaacgatttcctgcctagcctagaattgagccgaagggaattcgtgtttgaaaacgtgaagttccgtcagttacaaaaggagaaatttcaaatttcaaacaatggacaggtgccctgccactttagctttattcctaagttaaatgattctcagtattgtaaaccttggctgcgggctgagccttttgagggctatctggaaccaaatgagacagtggacatcagtcttgatgtctatgtgtcaaaggactccgtgacaattcttaactccggtgaagataagatagaggatatactcgttctccatctcgataggggtaaggactacttccttactatatccggaaattacctgccatcgtgttttggtaccagtctggaagccctttgtcgtatgaagcgcccaataagagaggtgcccgtcactaaactgattgacctggaaaaaagtctcctgcaaatggttccgttggacgagggggcatccgagaggcccttacaggtgcctaaggaaatctggcttctagtcgaccacctgtttaagtatgcctgtcaccaagaagatctgtttcaaactccgggaatgcaggaggaactgcagcaaattatcgactgccttgacacctctatccccgaaaccatcccgggtagcaaccactctgtagctgaagcgctcctgatcttcctggaggccctccctgaaccggttatctgttacgagctgtaccaaagatgtttggactctgcttacgacccgcgaatttgtcgccaggtgatcagtcaactgcctaggtgtcatcgtaacgtctttcgctatctgatggcattcttgagagagctgctgaagtttagtgagtacaactcagtgaacgcaaacatgattgcaacactgtttacgtctctgctactgagaccccctcccaatctgatggcgaggcagacaccaagtgatcgtcagcgggctatacagttcctactgggttttcttctaggttcggaggaagactag

SEQ ID NO: 233461 - DNA, 2706 bp, synthetic construct
  misc_feature 1..2706: note = Description of Artificial Sequence: Synthetic coding sequence
  source 1..2706: mol_type = other DNA
atggaaccaccattgcccgtgggagcacagcccctggccaccgtggaagggatggagatgaagggtcctctgcgcgaaccctgcgcacttactctggcgcagagaaatgggcagtacgagctgatcattcagttgcacgagaaagaacagcacgttcaagatatcatacctatcaactctcactttaggtgcgtgcaggaagccgaagagaccctgttgatcgacattgcttccaattccgggtgcaaaatccgagtgcagggtgactggatccgtgagaggagatttgagatcccagacgaagagcactgtctgaagttcttgagtgccgtcctcgccgctcagaaagcccaatcgcaactgctcgtcccagagcagaaagattctagcagttggtaccagaagttagacaccaaggataaaccaagcgtttttagtggcttgctggggtttgaagacaacttcagctccatgaatcttgataagaaaattaatagccaaaaccagcccactggcatacaccgtgaaccgccaccaccacctttctctgtgaacaagatgttacctcgagaaaaggaagcatccaacaaggagcagccaaaggtgactaataccatgaggaagctgtttgtccctaacacccagagcgggcaacgagagggcctgatcaagcacatcctggcgaaaagggagaaagagtacgtgaacatccaaacctttcggttcttcgtgggtacatggaacgttaacggccagtctccggactccggcttggagccctggcttaattgtgacccaaaccctcctgatatctattgcatcggatttcaggaattggacctctctaccgaagcgtttttctattttgagtcagtgaaggagcaggaatggagcatggctgtagagagaggtttgcactcgaaggccaaatataaaaaggtccagttggttcggctggtgggaatgatgctgttgattttcgcccgaaaagatcaatgtcgatacattcgggacattgccaccgagaccgtggggactgggattatgggaaaaatggggaataaaggtggagtggccgtgcggtttgttttccacaatacaactttctgtatcgtcaattcccatctggccgcacacgttgaagacttcgagagaaggaaccaggactataaagacatttgtgcacggatgagtttcgtggtccctaatcaaaccttaccccagctcaacattatgaagcacgaggtcgtgatctggctgggtgatttgaactaccgcctgtgcatgccagatgctaacgaagtgaagagcctgatcaacaagaaagatctgcagcgtctgctgaagtttgaccagctcaacatccaaagaactcagaaaaaagcattcgtggacttcaatgaaggcgagatcaagtttattcctacgtacaaatacgattctaagactgatagatgggactcatctggtaagtgtagagtgcctgcctggtgcgaccgcatcctgtggaggggaaccaatgtcaatcagctcaactacaggagtcacatggaactgaagaccagtgaccataagccggtctcagccttgtttcacattggcgtcaaagtggtggacgagagacgctatcggaaagtgtttgaagactctgtaagaattatggacaggatggaaaacgacttccttccatcactggaactgagccgtcgggaatttgtgttcgagaatgtgaaattccgccagcttcagaaggagaagttccagatatcgaacaatggccaggtaccatgccacttcagcttcatcccaaagctcaacgacagccagtactgtaagccttggctccgggcagagccttttgagggctacctggagccaaacgagaccgtggatatcagcctagatgtttacgtgtctaaagattcagttaccattctgaactccggagaggacaagatagaggatatcctagtcttgcatctggataggggcaaggactattttctcactatctctggtaattacctgccttcatgttttggtaccagtctggaggccctctgtcgaatgaaacggcctatccgcgaagtccctgttaccaaactgatcgacctcgaggaagacagctttctggaaaaggaaaaatcgcttctgcagatggtaccccttgatgaaggtgcatccgagaggccactgcaggtcccaaaagagatttggctgctcgtcgatcatcttttcaagtacgcatgccatcaggaggacctgttccagacacccggtatgcaagaggagctgcagcagatcattgattgcctggatacaagcattcccgaaaccatcccaggctctaatcatagtgtggcggaggccctgctcattttcctggaagcactaccggaacctgtgatttgttacgagttgtatcagcgatgcctggacagcgcatacgatcctagaatttgtcggcaggtgatcagccagctgccaaggtgtcatcgtaatgtttttcgttaccttatggccttcctccgggagctgttaaagttttcagagtacaacagcgtgaacgcaaatatgatcgccacgttgtttacgagcctgctcctgaggccaccacctaatctgatggccagacaaactccttcagatcggcaacgagcgattcaatttttgctagggtttctgctcggctccgaggaggattag

SEQ ID NO: 233462 - DNA, 2445 bp, synthetic construct
  misc_feature 1..2445: note = Description of Artificial Sequence: Synthetic coding sequence
  source 1..2445: mol_type = other DNA
atgcacctcgaaggccgagacggaagacgctaccctggggcacctgccgtcgagctgctccagacctcagtgcccagcgggttagccgaactggtggctggcaaacggcgtctccccaggggagccggaggagcagaccctagccatagttgtccccgaggcgctgcaggtcagtcctcatgggcccctgccggacaagaattcgcctctttcctgactaaaggccgtagccactcttccttgccacagatgtctagctcccgcagcaaggattcttgctttactgaaaacacgcctctgctgcggaattctctgcaggagaaaggatcccgctgtatccctgtgtatcatcctgagtttataaccgcagaagagtcatgggaggatagctctgctgactgggagcgcagatatctgctgtctcgcgaagtttcaggtctgtctgccagcgcctcaagcgaaaagggggatctcctagacagtcctcacataaggttgcgcctgtccaagctaagaaggtgtgtgcagtggttgaaggtcatgggactgttcgctttcgtggtcctttgttctatcctgttctcactgtatccagaccagggcaaactgtggcaactgctggcattaagtccactggaaaattatagcgtaaacctgtcatcacacgtcgactccacattattgcaggtggacctggcaggtgctctggtcgcaagcgggcctagccggcctggtcgagaggagcacatcgttgtggagcttacacaggctgacgccctgggaagtcgctggcggaggccccaacaagtgacacacaactggactgtgtatctgaacccccgtagaagtgagcattcagttatgagtaggacctttgaggtgctgacaagggagaccgtctcaatcagtattagagccagcctgcaacagacccaggccgtgcccttgctcatggcccaccagtatcttagaggttcagttgagacccaggtaaccatcgctacagcaatccttgctggagtgtatgccctgatcatcttcgagaggccatccctgactcacgttgtcgagtggattgattttgagacactggccctgctctttgggatgatgattctcgtcgctatcttttcggagaccgggttctttgactactgtgccgtgaaagcctatcggctgtctcgtggaagggtgtgggcgatgattatcatgctatgtctcatcgcagcggtcctgagcgcatttttggataacgtcacaaccatgttattatttactcccgtcacgatccggctgtgtgaggtgctcaacttagatccgagacaggtacttattgcggaggtgatatttacaaatataggcggagccgcaacagcgatcggagatccacccaacgtgataatagtttctaatcaggagctacgtaagatgggcctggactttgcaggctttacagcccacatgttcataggaatttgcctggtgctgctcgtgtgttttcccttactccgcctactttattggaatcggaagctgtataacaaagagccatccgaaatagtggagttgaagcatgagatccatgtttggaggttaacggcacaaagaattagccccgcaagtagggaagagacagcggtcagacggcttctcctcggaaaagtgctggcccttgaacatttgttggcccgaagattgcataccttccatcgacagatttcccaggaagataagaactgggaaactaacatccaagaactgcagaaaaagcatagaatctccgacggaatcctactagccaagtgcctaaccgtcctcgggtttgtaatattcatgttcttcctgaacagtttcgtacccggaattcacttagatctgggatggatcgccatcctcggggcaatttggcttctgattcttgctgacattcatgactttgaaattatattacatcgggtcgagtgggccacattgctgttctttgctgcgcttttcgttctaatggaggctttagcccacctgcaccttattgagtatgtgggggaacagacagctctgctaatcaaaatggtgcccgaagaacagcgattgatcgcagccattgtgctcgtggtctgggtgtctgctttagctagttcactaattgataatatcccctttactgcaactatgattcccgttctgcttaacttgtcacacgaccccgaggtcggcctccccgcacccccactgatgtatgccctcgcgtttggcgcttgtttgggtggcaacggaaccctgattggcgctagcgctaatgtcgtgtgtgccggaattgctgagcagcatggttacggcttttcctttatggaattttttcggctgggtttccctatgatggtggtatcctgcacagtgggtatgtgttacctgttggtagcacacgtggtcgtaggttggaattag

SEQ ID NO: 233463 - DNA, 2517 bp, synthetic construct
  misc_feature 1..2517: note = Description of Artificial Sequence: Synthetic coding sequence
  source 1..2517: mol_type = other DNA
atgcatctcgagggcagagacgggagaaggtatcctggcgcacccgcagtcgaactgctgcagacctcagttccttctggcctggccgagctggtagccggtaaaaggaggttaccacggggagcaggcggtgccgatccttcccattcttgtccaagaggagccgctggacagagcagctgggcccctgctgggcaagagttcgcttcctttctgaccaaaggcagatcacatagctccctgcctcagatgtcgagttctaggtcaaaagatagttgtttcaccgaaaacacccccctgcttaggaactcactgcaagaaaagggatcccgctgcatacctgtgtaccaccctgagttcattacagctgaggaatcgtgggaagattcatctgccgattgggagagaaggtatcttctgagccgggaggtgtccggactgtccgcctctgcttcttccgagaaaggggatctccttgacagtcctcacattagactgcgcctgtccaagttgaggaggtgtgtgcagtggctgaaagtcatgggcttgttcgccttcgtggtcctctgcagtatcttgtttagcttatatcccgaccaggggaaattgtggcaattgctagcgctttctcctttggaaaattactccgtgaacctctcatcacatgtcgatagcaccctgctgcaggtcgacctggctggtgctctggtggcatccgggccttcccggcctggcagggaagaacacatcgtcgttgaactgacacaagccgacgcgctgggctcccgctggagacgaccgcagcaggtgacccacaactggaccgtatatctcaatcctaggcggagtgagcactcggtgatgagccggacgttcgaggtgctgacacgcgaaactgtaagcatcagtatacgggcaagcctgcaacagactcaggcagtgcctctgctaatggcccaccagtacctccgcggaagtgttgagacccaggtgacaattgccactgctatcctggccggagtgtacgccctgattatcttcgaaatcgttcaccgcacactcgccgctatgctgggttctcttgcagccttggcggcattggctgtaatcggggatagaccctccctgacacacgtggtagagtggatagatttcgagacactggcactgctttttggtatgatgattctggtggctattttcagcgaaactggcttcttcgattactgcgcagttaaagcttatcggctttcccggggaagagtgtgggctatgataatcatgctgtgcctgattgccgctgttctctcagctttcctggacaacgtaacgacaatgctgcttttcacaccagtgaccattcgcctctgcgaggttctgaacctagatcctcggcaggtcctgatagccgaggtaatttttacaaatatcggaggagcagctactgccattggcgatcctccaaacgtcatcatcgtgtccaaccaggaacttagaaaaatgggcttggacttcgccggatttaccgcccatatgtttataggcatttgtcttgtgctattggtgtgcttccccctactgcgcctgctttactggaaccggaagctttataacaaggagccatcagaaatcgtcgagctgaagcacgagatccacgtgtggcgcctgacagcccagcggattagcccagcgagtcgcgaagaaaccgcagtgcgtagattgttgctgggaaaagtgctggcactcgagcatttgctcgccagaaggcttcacacttttcatagacaaatcagtcaggaggataagaattgggagaccaacatacaggaactgcagaagaagcaccgaatcagtgatggtattctgctagcaaaatgtctaacggtacttggtttcgtgatcttcatgttctttctcaattcatttgtgcctggcattcacttagatcttggctggattgcaatcttgggagctatatggctgctgattctggccgacattcacgatttcgaaatcattttacaccgggtcgaatgggccactttgcttttttttgccgctttatttgtactcatggaagccctggcccacctccaccttattgagtacgtgggagagcagactgcattgttaatcaaaatggttccggaggagcaaaggctgatcgccgcaatagtgctggtggtctgggtgtccgcactggccagcagtctaatagacaacatccctttcacagccactatgatcccggttctactgaacctgagtcatgatcccgaagtcggtctacctgctccccctcttatgtacgcacttgcatttggcgcatgtctcggtggcaacggaaccctgataggggcatctgctaacgtcgtgtgcgccggaatcgccgaacagcacggttatgggttctcattcatggaattctttagactgggattccccatgatggtggtatcttgtaccgttggcatgtgctatctgttagtggcccatgtagtagtcggctggaactag

SEQ ID NO: 233464 - DNA, 2007 bp, synthetic construct
  misc_feature 1..2007: note = Description of Artificial Sequence: Synthetic coding sequence
  source 1..2007: mol_type = other DNA
atgcatttagaaggtcgggatggccgacggtacccgggagctccagcagtggaactgctgcagacctcagttccatcaggcctcgctgaactagttgctggaaaacgtcgtctgcctcggggtgctgggggagcggacccaagccatagctgccccagaggcgctgctggacagagttcctgggcccctgccggacaggagtttgcttcattcctgacaaaaggccgatctcactctagtttaccccagatgagtagttctaggtccaaggattcatgttttacagaaaatacacccctgctgcggaactcactgcaggaaaaagggtctcggtgtatcccagtgtaccacccagaattcataacagcggaagagtcttgggaggacagttcagctgactgggaaagacggtacctgctcagtcgcgaagtgtcaggtctgagcgcgtccgctagcagcgaaaagggagacctgctcgactcacctcacatcagattgcggctcagtaagctgcgaagatgcgtgcaatggctgaaagtaatgggcctgtttgccttcgtggtcctctgctccattctgtttagcctatatcctgaccagggcaagttgtggcagttactggcattgagccccttagaaaactattcagtgaatctctcgtctcatgtagacagcacactgctgcaggttgatctggccggtgccttagtggccagcggaccatcccgcccagggcgtgaagagcatatcgtggttgagttaacccaggcagatgcccttggatctagatggcgccgtcctcaacaggtgacacacaactggacagtctacctgaaccctcgtcgatcagagcacagcgtcatgtccaggacctttgaggtgctcacccgtgaaactgtttctatcagtattagggctagtcttcagcagacacaggccgtgcctctgttgatggcacaccagtacctccgcggatcagttgaaactcaagttaccatcgccacagctattcttgcgggtgtatatgctctcatcatttttgagatagtccaccggaccctggccgctatgttggggagtctcgctgcacttgctgctttggctgtcataggagatcgtccgtcactcacccatgtcgtcgagtggatcgatttcgagacccttgccctgctgttcggaatgatgattctggtagcaatattctccgagaccggattttttgattactgtgcggtcaaggcgtacagactctccaggggccgagtgtgggccatgatcatcatgctctgtctcattgccgcagtcctatcagcctttctagacaacgtgacgacaatgctgctctttacccccgtcaccatcagactgtgcgaggtacttaatctcgatccacgccaggttcttatagccgaggtgattttcaccaatatcggaggtgcagccacggccatcggtgatcccccaaacgtgattatagtcagcaaccaagaattgagaaaaatgggcttagattttgccggattcacggctcacatgttcatcggaatctgtttagtgctccttgtgtgcttcccattgcttaggctcctttactggaatagaaagctatacaacaaggagccttccgaaatcgttgagctgaagcacgagatacatgtctggaggttgacggcccagagaatttcacccgcttcaagggaagaaacagccgtccgtagactgcttttgggtaaagtactggcgctcgagcacctgctcgcaagaaggctccacacttttcatagacagatatcacaggaggataagaactgggagacaaacatccaggagcttcaaaagaagcacaggatatcggatggtattctactcgcaaagtgtctgacagtgctcggatttgtcattttcatgttcttcctgaatagtttcgtgccgggaatccacctggacttaggcggactaggtttggtgcaggccggacggtattatttgagcacccctgagagttag

SEQ ID NO: 233465 - DNA, 795 bp, synthetic construct
  misc_feature 1..795: note = Description of Artificial Sequence: Synthetic coding sequence
  source 1..795: mol_type = other DNA
atgcacctagagggtcgagacggtaggcggtacccaggtgcccctgccgtggagctgctgcaaacctcagtaccaagcggccttgccgaactcgtcgcaggaaaacgccgactgcccagaggagctgggggtgccgacccatcccactcttgtcccagaggggctgccggtcagtcctcttgggccccagccggtcaggagttcgcatccttcctcactaaaggaagaagtcactccagcttgccccaaatgagcagctctcggtccaaagacagctgttttaccgaaaacacccccttactgcgcaattccttgcaggagaagggcagccggtgtattccagtgtaccaccctgagtttatcacagccgaagaatcctgggaagactcttcggccgactgggagcggaggtatctcttgagcagggaggtctcaggcctttccgcttctgcatccagcgagaaaggcgacctcttagattctccccacatccggttgcggctgtctaagctgaggagatgtgtacagtggctgaaagtgatggggctattcgcatttgtagtgctttgtagcatcttgttctctctgtaccccgaccagggcaagctgtggcagttactggctttgtcccctttggagaattattctgtgaacctgtcttctcatgtggactctactctcctgcaggttgatcttgcaggggctctggtggcttcaggtccttccagacccggtcgggaagaacatatcgtggtcgaactcacacaggcagatgccctggggagtaggtggtag

SEQ ID NO: 233466 - DNA, 657 bp, synthetic construct
  misc_feature 1..657: note = Description of Artificial Sequence: Synthetic coding sequence
  source 1..657: mol_type = other DNA
atgcacctggaaggcagggacgggagacgatatcccggagcacctgcagtggaactgctccagacaagcgtgccaagtggattggccgagttagtggctgggaaacgcagactccctcgcggtgcaggcggagcagatcccagtcattcttgtccccgtggggctgctggacagagctcatgggcacccgctggccaggagttcgcgtcattcctgactaagggccgttctcacagctctctcccccagatgagcagcagtaggtcaaaagactcctgttttactgaaaatacccccttactgcggaacagcctgcaggaaaaaggaagccgttgcatcccagtgtatcatcccgagttcattacagccgaagaaagctgggaggatagtagcgccgattgggaacggagatacttgctgtctagggaggtatccgggctcagtgcatcagcctctagcgagaagggcgatcttctggacagcccgcatatccggctccgactttccaaactgagacggtgcgtacagtggttgaaggtcatgggtctgtttgcatttgtggtgctttgttcagttactcataactggaccgtctatttaaacccacggaggtcagaacactcggtgatgtccagaaccttcgaagtgctgacttag

SEQ ID NO: 233467 - DNA, 801 bp, synthetic construct
  misc_feature 1..801: note = Description of Artificial Sequence: Synthetic coding sequence
  source 1..801: mol_type = other DNA
atggggtcaaaaaccctgcccgcaccagtcccaatccacccttcattgcagttaactaactactcctttcttcaggccgtaaacggcctgccgacggtgccaagcgatcatttgccaaatctttacggtttcagcgctcttcacgccgtccacctgcatcagtggacactagggtatcccgcaatgcacttacccaggtcctccttttctaaagtccccggaacagtgagtagcctggtggatgccaggtttcagctcccggcattcccctggttcccccacgtcattcaaccaaagcctgagattacagccggagggtccgtgcctgctcttaagactaaaccacgcttcgactttgctaatcttgccttagcagccacccaagaagatcccgctaaactgggaagaggagagggaccaggcagtcccgcagggggactgggagcacttctcgacgtcaccaagctctccccagagaaaaagcctactcggggtagactcccctctaaaacaaaaaaggaatttgtttgcaaattttgtggacggcattttacaaagtcctataacttactgattcatgagcggacacatacggacgaacgaccgtatacttgcgacatttgtcataaggccttccgaaggcaggatcacctgagggaccaccgttatattcattcaaaggaaaaacctttcaagtgtcaagagtgtggtaagggcttttgccagtccaggacactagcagttcacaagacattacactcccaggttaaggagctcaagacttcaaaaataaagtgttag

SEQ ID NO: 233468 - DNA, 801 bp, synthetic construct
  misc_feature 1..801: note = Description of Artificial Sequence: Synthetic coding sequence
  source 1..801: mol_type = other DNA
atgggcagcaaaacacttcctgcccctgttcctatacacccatctctgcagctgactaattacagctttctccaggccgtgaatggcctgcctacggttcccagcgatcaccttccgaacttatacggtttctccgcgctccatgcggttcatttgcaccaatggacactcggctatcctgccatgcacttgccgagatcttcctttagcaaagtgccgggtacggtgagtagtctcgtggacgcaagatttcagctgcccgcatttccttggtttccacacgtcatacagcccaagcctgaaatcactgctggcggatccgtgcctgcactgaaaactaagccgagattcgattttgccaaccttgccctggccgctacccaggaggacccggcaaaactgggacgcggagagggcccaggttcacccgcaggtggactgggagccttgttagacgtgactaagctgagtcctgaaaagaagccgactcgagggagactcccttcaaaaaccaaaaaagaattcgtttgtaaattctgcggcagacactttactaagtcgtacaatctcctgattcacgaacgaactcataccgacgaaaggccatatacgtgcgatatttgccataaggcatttcgaagacaagatcatttgagggaccaccgctatattcattcaaaggagaagcctttcaagtgccaagagtgtggcaagggcttctgtcagtccaggaccctggctgtccataagacgctgcactcacaggtaaaagagctgaagaccagtaaaattaaatgctag

SEQ ID NO: 233469 - DNA, 939 bp, synthetic construct
  misc_feature 1..939: note = Description of Artificial Sequence: Synthetic coding sequence
  source 1..939: mol_type = other DNA
atgggctcaaaggctttaccggctcccatcccccttcacccttccctgcagttgacaaattactctttcctccaggcagtaaacacttttccagctacagtcgaccatcttcaggggctctatggactatctgcggtccagacgatgcacatgaaccactggacccttggctaccccaatgtccatgagatcacacgctcaaccataacagagatggcagctgcccagggtctggtggacgcaaggttcccgttccccgcactccctttcacaacacacctctttcatcccaaacagggtgcaattgcccacgtccttcctgcgctgcacaaggatcgtcccagattcgacttcgccaatctagcggtggccgctacacaggaggacccgcctaagatgggagacctgagtaagctgtcgccagggctggggtcacctatcagcgggctgagtaagttaacaccagatcgaaaaccatcacgcggacgcctgccttcaaagacgaagaaggaatttatttgcaaattttgtggtagacacttcacaaagtcatacaaccttctgattcatgaaaggactcacaccgacgagcgtccgtatacttgtgatatttgccacaaagcttttcggagacaggaccaccttcgagaccaccgctatatacacagcaaggagaagccattcaagtgccaagagtgcggaaagggattctgtcagtctaggactctcgccgtgcacaaaaccctacacatgcaggaatccccccacaagtgtccaacgtgcggtaggaccttcaaccaacggagtaatctgaaaactcatctcttaacccataccgacatcaagccctattcctgcgagcaatgcggcaaagtgtttcgtaggaactgcgacttgaggaggcattcactgactcacaccccgcgtcaagacttctag

SEQ ID NO: 233470 - DNA, 831 bp, synthetic construct
  misc_feature 1..831: note = Description of Artificial Sequence: Synthetic coding sequence
  source 1..831: mol_type = other DNA
atgggttctaaagccctgccagccccaatccctctccatccatctctgcagctgactaactattcatttctgcaggccgtcaatacttttccggcaaccgtggaccacctccaagggctttatgggttaagtgccgtccaaacgatgcacatgaaccattggaccctgggctatcccaatgtacatgagattactcgaagtactattactgaaatggctgcggcacaaggcctcgtcgatgcacgctttcctttccccgctcttccctttaccacacacttgttccatcccaagcagggtgcaattgcacatgtgctcccagcacttcacaaggatcgtcctaggtttgactttgccaatcttgctgtagccgctactcaggaggacccccctaaaatgggcgatctatccaagctttcccccggacttgggtcaccaataagcggtttgagcaagttgactccagacaggaaaccgagtcgcggtcgcctgcccagcaaaacaaaaaaagagtttatctgcaaattttgtgggagacacttcactaagagctacaatctattgattcacgagagaacccacaccgatgagaggccatatacatgcgacatatgccacaaagccttccgaaggcaagaccacctgagagaccatcgttacattcattccaaggagaaaccatttaagtgtcaagagtgcggcaagggcttctgccagagccgtactttggccgtgcataaaacactccatatgcaaaccagctcccccaccgccgctagtagcgcagcaaagtgctctggggaaacggttatttgtggcggtactgcctag

SEQ ID NO: 233471 - DNA, 1302 bp, synthetic construct
  misc_feature 1..1302: note = Description of Artificial Sequence: Synthetic coding sequence
  source 1..1302: mol_type = other DNA
atggggttgagagcagaagagggaaaaaggaaaccgccacgctccgttaggggggaggtgtctccgagccagggtccacttgcgcaagaagacgaggccaggcgcctacgatcgtgcaccccggcatgccatccgggaaaacgtggcaaaggcggacatcgcgctcggaggcagcggtccgcttgggacctgaccactcaccccctaactcatcgcagccaggagctccgaggcgctgccgcaaccgaggggttcttgtacgtcctgcttagccactgggttttcgtcggagcacccagaccaccagcatccgattcatggaagaaggggctcgttcccagtgcaccccctgcctcaagaaagatgggctctaaggccctccctgcacccattcccttgcacccttcactgcaactgaccaattatagctttctgcaggccgtgaacacatttcccgcaacggtggaccatttgcagggattgtatggcctctccgcagtgcagactatgcatatgaaccactggaccttaggctatccgaacgtgcacgaaatcactaggagcactattaccgagatggccgctgcacagggcctggtagacgcacgcttccccttcccagcgttgccttttacaacacacctgtttcaccccaaacagggggcaatcgcccatgttctaccggctctccacaaagatcgacccaggtttgacttcgctaatcttgccgtggccgcaacccaggaggatccacctaaaatgggcgacctttctaaactgtcacctggtttggggtcgcccatctccggtttgtccaagctgaccccagaccgaaaaccctcacgcggtcggctgcctagcaaaactaaaaaggaattcatctgcaagttctgcgggaggcatttcaccaagtcttacaatcttctgatacatgaaagaacacatactgatgagcgaccatatacgtgtgacatttgccacaaggcatttagacgacaggaccacctgcgcgatcacaggtatattcacagcaaagagaagccctttaagtgtcaggaatgtgggaaggggttctgccagagtcgcactctggcagtgcacaagacgttgcacatgcaagagtcaccacataagtgtccgacatgtgggaggacattcaaccagcggtctaacttgaagactcacctactgacgcacaccgatattaagccttactcttgcgaacagtgtgggaaggtctttcgtcggaattgtgatctaaggcgccattccctgacacatactcctcgacaagacttctag

SEQ ID NO: 233472 - DNA, 642 bp, synthetic construct
  misc_feature 1..642: note = Description of Artificial Sequence: Synthetic coding sequence
  source 1..642: mol_type = other DNA
atgggctccaaagctctgccagccccaataccgctccacccctctctacagctaactaactactcgtttctgcaagctgttaacacattccctgcgacagtggaccatcttcagggtctgtatgggctttccgccgtgcagacaatgcatatgaaccattggaccctgggttaccctaatgtgcacgaaatcacgcggagcaccatcacagagatggctgccgctcagggcctcgtcgatgccagattcccattccctgccctgccatttactacgcatctcttccatcctaagcagggtgctattgctcacgtattgccggctctacataaggaccggcctcgattcgatttcgccaacctggctgtggccgctacacaggaagaccctcctaaaatgggagacctgagcaagttgagtcctggattgggaagccccatctctgggctatctaagttaacaccggatcgcaagcccagtcggggacggctgcctagcaaaacaaagaaagaatttatttgcaaattttgcggcagacacttcacaaaatcctacaacctactgatccacgagagaacccacacagatgagcggccatatacttgtgatatttgccataaggcttttcgcagacaggactag

SEQ ID NO: 233473 - DNA, 939 bp, synthetic construct
  misc_feature 1..939: note = Description of Artificial Sequence: Synthetic coding sequence
  source 1..939: mol_type = other DNA
atgggctccaaagcgctgcccgcacccatcccattacacccttcattgcaattaaccaactacagctttctccaggccgtaaacacattccctgcgactgtggatcaccttcaggggctctatggactatcagccgtccagaccatgcacatgaatcactggaccctaggataccccaacgtccacgaaattacacggagtaccatcactgagatggcagctgcacaaggacttgtcgatgctcggtttccgttccccgcactgccgttcacgacccatctctttcaccctaaacagggggcaattgctcacgtcctccccgcattacacaaagatcgtccccgttttgatttcgccaatttggcagtcgctgctacccaggaggaccctccaaaaatgggcgatctatccaaactatcgccagggctcggctccccgatctccgggctcagcaagttgacccctgaccgaaaaccttctaggggcaggctgccctctaagactaagaaggaattcatctgtaaattctgcgggagacattttaccaaatcctataatcttctgattcacgagcgtacccataccgacgaacggccatacacttgtgatatatgccataaggcttttaggaggcaggatcatctgagggatcaccgctacatccactctaaagagaaaccctttaaatgccaagaatgtggcaaagggttttgtcaatctaggaccctggcagtacataaaaccctgcatatgcaggagtcaccgcataagtgccctacctgcgggcgaacatttaatcagcgttcgaatctgaagacacatctgttaacacataccgatataaagccatatagctgcgaacaatgtggcaaagtgttccggagaaattgcgatttaagaagacactcccttacccatacccctcgtcaggatttttag

SEQ ID NO: 233474 - DNA, 687 bp, synthetic construct
  misc_feature 1..687: note = Description of Artificial Sequence: Synthetic coding sequence
  source 1..687: mol_type = other DNA
atgaagaccctgttccttggggttacgctgggcctcgcggcagccctgtcctttacacttgaggaggaagatatcacgggcacgtggtatgtgaaagcgatggtggtagacaaagactttccagaggacagaaggccgagaaaagtgtcccctgtgaaggtaaccgcactgggtggcggaaatctggaagcaacctttactttcatgcgagaagacaggtgtattcagaaaaaaatactgatgaggaaaactgaagagcccggaaagttctcagcgtacggtggacggaagttgatctatctgcaggagcttcctggaaccgacgattatgtcttttattgtaaagaccagagacggggaggattgcggtacatgggtaaactcgtggcaagtgccccatgcagagcagtaccgctctctccgccatggttaacgtggccacctcatctgcaggtaggtatcctgattcccacatggagaccttggaagaatctccgtaattggtgttcaactcgagacagccgcaggcgcacattcagttgtccttgtaggcgcgaagcagcattctccaacacacggcagcccccaggtctgcatctccagtcccctccttaccaccagactcagtcgccagatcatttggatctccctagttcgcacgatccgagcctgctgcctccgacctag

SEQ ID NO: 233475 - DNA, 444 bp, synthetic construct
  misc_feature 1..444: note = Description of Artificial Sequence: Synthetic coding sequence
  source 1..444: mol_type = other DNA
atgaagaccctgttcctcggagtgactctgggacttgcagccgctctctcctttaccttagaggaggaggatgagggaggaagcgttcatccggaggagaaccctgatgctgaagatggaggggcttggcagatacagaggctgtggggacaggaagcccacatcccagctggagccgctagagatggaaggttaaggctgctccttcaacgccctgcaccttggggccctgccctccacggtaaggcatgcggcatctgcagtttacagggaagagccgctgtgcctaccttagctcatttggccacttcccctgccggtagaaaccctaataccaatctcgaggctcttgaggagtttaagaagttggttcagcacaagggcctaagtgaagaagacatattcatgccgctgcagactggatcatgcgtcctagaacactag

SEQ ID NO: 233476 - DNA, 513 bp, synthetic construct
  misc_feature 1..513: note = Description of Artificial Sequence: Synthetic coding sequence
  source 1..513: mol_type = other DNA
atgaaaacactcttcttaggggtgacattgggcctagcagccgctctctcatttaccttagaagaagaagacattacaggtacatggtacgtcaaagcaatggttgtcgataaagactttccagaagaccgtcgtcctaggaaggtgtcgcccgtaaaggtaactgcactgggcggaggcaatcttgaagcgacatttacgtttatgcgggaggacagatgtatacagaagaagatcctgatgaggaagacagaagagcccggaaaattttctgcttacggaggcaggaagctgatttacctgcaggagctgcccggaacagacgattacgttttttactgtaaagatcagagacgaggcggtctgcggtacatgggaaaactggttgggagaaatccaaatactaatctggaggcgctcgaggaattcaagaagctagttcagcataagggtctgagcgaagaggatattttcatgccattgcagaccgggagttgtgtcctggagcactag

SEQ ID NO: 233477 - DNA, 513 bp, synthetic construct
  misc_feature 1..513: note = Description of Artificial Sequence: Synthetic coding sequence
  source 1..513: mol_type = other DNA
atgaagacactctttctgggcgttacccttggactcgccgcagccttgagctttactttggaggaagaagacattactgggacttggtacgtgaaggccatggtcgtggacaaagatttcccagaagatcgccgtcccaggaaagtctccccagtcaaggtgacagcccttggcggaggcaacttggaagcaaccttcacgtttatgagagaggaccgatgtatccagaagaagatcttaatgcgaaaaacagaggagcccggaaaattctccgcctatgggggaaggaagctcatatatctgcaggagctccctggaacggacgattacgtcttttattgcaaagaccagcggcgtgggggtcttcgctatatgggtaaactggtgggcaggaaccccaatacaaaccttgaggctttggaagaatttaagaaactggtgcagcataaggggctctccgaagaggacatcttcatgcccctgcagacaggatcttgcgtgctcgaacactag

SEQ ID NO: 233478 - DNA, 258 bp, synthetic construct
  misc_feature 1..258: note = Description of Artificial Sequence: Synthetic coding sequence
  source 1..258: mol_type = other DNA
atgaagactctatttcttggcgtgaccctgggacttgccgcagcgctgagctttacattagaagaagaggacgacggcccatgggtacatcccgaggaaaaccccgatgcggaggatggaggcgcatggcagattcagcggctctggggccaggaggcccatgtgcctgctggcgctgctcaggagggacccttacacctcttgcttcagcgcccagcgccttggggacccgctccccacgggaaggcatgtggctag

SEQ ID NO: 233479 - DNA, 513 bp, synthetic construct
  misc_feature 1..513: note = Description of Artificial Sequence: Synthetic coding sequence
  source 1..513: mol_type = other DNA
atgaagacgcttttcctgggggtgacccttggccttgcggcagccctcagcttcacactggaggaagaggacattaccgggacatggtacgtgaaggctatggtggtcgacaaggattttcctgaggacaggagacctcggaaagtgagcccagtgaaggtgacagcgcttggcggaggtaaacttgaagctactttcaccttcatgagggaagataggtgtatccagaagaagatccttatgaggaagaccgaggagccgggaaaatactcagcctatgggggtcggaagctgatgtacctgcaggaactgcctagaagggatcactacatattctactgcaaagatcagcaccacggcggactgttacatatgggtaagctcgtgggcaggaattcagatacgaatagggaggccttggaagaatttaagaaactggtacaaagaaagggactgtctgaagaggacatattcacccccctgcagactggatcctgcgtgccagaacattag

SEQ ID NO: 233480 - DNA, 8310 bp, synthetic construct
  misc_feature 1..8310: note = Description of Artificial Sequence: Synthetic coding sequence
  source 1..8310: mol_type = other DNA
atggatgtcaaagaaaggaagccttaccggtcactgactaggcgtcgagatgccgagagacgctacacttcttctagcgccgattctgaggaaggcaaagctccgcagaagtcttatagcagcagcgaaacactgaaagcctatgatcaggatgccaggctagcctacgggtctagggtgaaggacatcgtgcctcaggaggcagaagagttttgtaggactggagccaatttcactcttcgggagctggggctcgaagaggtgacacctccacacggcacactctacaggactgacattggcctccctcactgtggatactccatgggcgctgggtcagatgctgacatggaggccgataccgtgctgtctcctgaacaccccgtgaggttatggggccgtagcacacgtagtgggcgatcttcttgcctgtcaagccgcgctaattccaacctgacattaaccgataccgagcacgagaacacggaaactgaccaccccggaggcctgcagaaccacgcacgcctgcgcactccaccaccccctttgtcacacgcacacacaccaaaccagcaccatgctgccagtattaactctctcaatagagggaattttacaccccgaagcaatccctcacctgcccctacggaccacagccttagtggcgagccaccggctggcggtgcccaggagcccgctcatgcacaggagaactggctcctaaattcgaatattccgcttgaaacccgaaacttagggaagcagcctttccttggcacactgcaagacaacctcatcgagatggatattttgggagcaagccggcacgatggggcatatagcgacggtcatttcctcttcaagcctggcggaacctccccacttttctgcacaaccagccccggttaccccctgaccagttcaacggtgtactcacctcctccccgacctcttccgagaagtacattcgccagacctgcctttaacctgaagaaaccttccaaatattgcaactggaagtgcgccgctctgagcgcaattgtcatcagcgcgaccctcgttattttgctggcctattttgtagctatgcacctgttcggactcaactggcatcttcagcctatggaaggccaaatgtacgagatcaccgaggacaccgccagcagttggcccgtgccaaccgatgtgagtctttacccttctggtggaacaggtttggagacgcctgacaggaaaggaaaaggaactacagaggggaaaccatcgtcctttttcccagaggacagcttcatcgactccggcgagatcgatgtggggaggcgtgcatcgcagaagatccctcccggtacgttttggcgctctcaagtgttcatcgaccatcctgtccatctgaaatttaatgtgagtctcggaaaggcggcactggtgggcatatatggacggaagggcctgcccccttcacatacacagttcgacttcgtggagctcttggacggcagaaggctacttacccaggaggcacgctccttggaggggacgcctcgtcagagtcgaggcacggtgccaccctcaagtcacgagaccgggttcattcagtacctggactccgggatctggcacctcgccttctacaatgatggtaaagaatctgaagtggtgagctttctgaccacagcgatcgaatcggtcgataattgccctagtaactgctatggtaatggcgattgcatctctggaacatgccactgttttttaggctttctgggccctgactgtggacgcgcttcctgcccggtgctttgcagcggaaacggccagtacatgaaggggaggtgcctgtgtcactcagggtggaagggagcagaatgtgatgtgcctaccaaccagtgcatcgatgtggcttgcagcaatcacggcacctgtatcacagggacgtgtatatgcaaccccggttacaaaggggagagttgcgaagaggtggattgtatggatccaacgtgcagtggcaggggggtgtgcgtcagaggtgagtgccactgcagcgtaggctggggcggaactaactgtgaaacgcctagggccacctgccttgatcaatgcagtggccatggcacatttctcccagatacaggcctttgttcctgtgatccatcttggacaggccacgattgctcaatcgaaatctgcgctgctgattgcggcggacatggcgtctgcgtgggtggtacctgcagatgcgaagacgggtggatgggggctgcatgcgatcagagggcttgccacccgaggtgcgccgagcacggtacatgtagggacggcaaatgcgagtgctcacccggatggaacggcgagcactgcaccattgcacattacctggatcgggtggtgaaggagggctgtccaggcctatgcaacggaaatggacgctgcacactcgacctgaatggctggcactgcgtgtgccagctcggatggcgaggcgctggctgtgacacatcaatggaaaccgcctgcggggactcaaaggataatgacggagacggcctcgtcgactgcatggaccccgattgttgtctccaacctttgtgccacatcaacccactgtgtctggggtccccaaacccactagatatcatccaggagacgcaggtgcctgtgagtcagcaaaaccttcattcattttacgataggattaaattcctcgtggggagggattcgacccacattatccctggtgagaaccccttcgacggaggccatgcttgtgtcattcggggtcaggtgatgacaagtgacggtacccctctcgtgggggtcaatatatcttttgtcaacaatccactgttcgggtacacgatctcaagacaggacggctctttcgacctcgtgactaacgggggaatttcaataatcctgcggtttgaaagggctccctttatcactcaagaacacaccctttggctaccctgggatcggtttttcgtcatggaaacaatcattatgagacatgaagagaacgaaattccttcctgtgatctgtcaaatttcgcccgacctaaccctgtcgtctcacccagcccactgacatcatttgcatcatcctgcgctgaaaaagggcctatcgtacccgaaatccaggcattacaggaggagatcagtatatcaggctgcaagatgagactaagttacctgagctcccggactccaggatacaagtctgttttaaggatcagtctgacacaccccactattcctttcaatcttatgaaggtgcacctgatggtggcagtggaggggaggctctttaggaagtggtttgcggcagcccctgaccttagctactatttcatctgggacaaaactgatgtctacaatcagaaggtatttggcctctccgaggcgttcgttagcgtgggttacgaatacgagagctgtcctgacttgattttatgggagaagagaaccacagttttacaaggatacgagatcgacgcctctaaactgggtgggtggagccttgataagcaccatgccctcaatatacaatccggcatactacacaaaggcaacggcgaaaatcagttcgtctcacagcaaccgcctgtgatcggatccatcatgggcaacggtcggcgacggtccattagttgtccttcatgcaatggactcgcagatggcaataagttacttgctcctgtcgcattaacttgtgggagtgatgggtccttatatgtgggtgattttaactatatccgcaggatcttcccttcaggtaacgtaactaacatcttggaactgcgcaataaggattttcggcattcgcattcccctgcccacaagtactaccttgccaccgatccgatgagtggtgcagtgttcctgtcagactctaacagtagacgagtgttcaaaatcaaatccaccgtggtggtgaaggatctcgtgaaaaactccgaggtggtggcgggtaccggcgaccagtgtctcccgtttgacgatacacgatgcggcgacggcggaaaggcaacggaggcgacattgacaaatcctcgagggatcacagtggataagtttgggctgatctactttgtagatggcacaatgatcagacggatcgaccaaaatgggatcatctccaccttgctcgggtccaacgaccttacttccgctaggccattgagctgcgatagcgtgatggatatcagtcaggtccacctcgagtggcctaccgatttagctattaatccaatggacaattcactgtacgtgctggacaacaacgtggtcctgcagatttccgaaaaccaccaggtccgcatcgtggccggtcgacccatgcactgccaagttccaggaatcgatcacttcctcttgtctaaggtcgctatacacgctacactggagtctgctacagcactggctgtgagccacaacggcgtactttacatagcagagactgatgaaaaaaagattaaccgaattcgccaggtgaccacatctggagagatttccctggttgccggagccccaagtgggtgcgattgcaaaaatgacgccaactgcgactgcttcagcggagatgacgggtatgccaaggacgccaagctgaacacaccctctagcctggccgtctgtgctgacggcgagttgtacgtggccgatctcggaaacattcgaatccgattcataagaaaaaacaagccattccttaacactcagaacatgtacgagcttagctctccaattgaccaggaattatacctttttgacacaaccggaaaacacctatatactcaatcactgcctacaggggactatctgtacaactttacctacaccggcgacggcgacattacgttgataactgataataacggcaacatggtgaacgtgagacgagactcaactgggatgccactgtggctggtggtgcccgacggccaggtttactgggtcacgatgggcaccaattccgcactgaagtctgtgaccacacagggacatgagctcgcgatgatgacctaccatggaaattccggattgttggccactaaaagtaacgagaatggttggactacattttacgagtatgacagcttcgggagactgacaaacgtgacatttccaacaggtcaagtgtctagcttcagatccgatacggacagttccgttcatgtgcaggtggagacctccagtaaagacgacgtgacgattactactaatctaagtgccagtggagctttctataccctcctgcaagatcaggtcaggaactcctattatataggcgcagatggatcattgcgattgttgctggctaacggaatggaagtggccttgcagacggaaccccatttgcttgccggtaccgtgaatcccactgtcggtaaacgtaatgtcaccctcccgatcgacaacggcctgaatctggtcgaatggaggcagagaaaggaacaggcccgtggccaggtgaccgtctttgggaggcgactgcgggtgcataatcgaaatctgttgtcattggatttcgatagggtgacgcggacagaaaagatctatgacgaccacagaaagttcacactaaggatcctgtatgaccaagctgggaggcccagtctgtggtctccctctagcagacttaacggcgtaaatgtgacatactccccagggggttatatagcaggcatccagcggggaatcatgtctgagaggatggagtacgaccaggcagggaggatcacttcgagaattttcgcagacggcaagacctggtcctatacgtatctggagaagagcatggtgttactgctccatagccagcgtcagtatatctttgaattcgacaagaacgatagactgtcctcggtcacaatgcctaatgtagcccgacagacgctggaaacaatcaggagtgtgggatattatcgaaatatttaccaacctcccgagggtaatgcctctgtaatacaagatttcaccgaggatggccaccttttacacaccttttacctgggcacaggccgacgcgtgatttacaagtatgggaaattgagcaaattagcagaaacactgtacgatacaaccaaggtctcatttacctacgatgaaacagcaggaatgttaaagacgatcaacttgcagaatgagggctttacctgcactatccggtaccgccaaattgggccactaatcgatcgacagattttccggtttacagaggagggcatggtcaatgcacgtttcgactataattacgacaattcctttagagttaccagtatgcaggcagtgattaatgagacacccttgccaatagacctgtatcggtacgacgacgtgtccggcaagactgaacagttcggcaagtttggcgtcatctactacgatatcaaccagatcatcacaactgcggtcatgacccacactaagcacttcgacgcatacggaaggatgaaggaagtgcagtacgaaatttttaggtcccttatgtattggatgacagtccagtacgacaatatgggcagagtagtcaaaaaggaactcaaagttggaccctacgcgaacaccactcggtatagctacgaatacgatgccgacggccagcttcagacagtgtcgattaatgacaagccactctggaggtatagttacgatcttaacggtaacctgcacctcctctctcccggtaattcagcccgactgaccccactgaggtacgatatcagggataggatcacacgcctcggagatgtccaatacaaaatggacgaagatggcttcctgcgccagcggggaggtgatatatttgagtataactctgccggtcttttgattaaagcttataacagagccggtagctggtcagtcagatatagatacgatgggttgggacgtcgagtatcatccaaatcctcccattcccaccacctgcagtttttctatgccgacctcaccaatccgacaaaggtgacccacttatataatcattcttcgtccgaaattaccagcctctattacgacttgcaaggtcacctgttcgccatggaactgtcgtccggggatgagttctatatagcctgcgacaatatcggaacaccccttgctgtcttttccgggactggattgatgattaaacagatcctgtataccgcctatggagagatatatatggatacaaatccaaactttcagattatcatcgggtatcacgggggactctatgaccctctaactaagctggtgcatatgggaagaagggactatgatgtgctggcgggaagatggacttccccagatcacgagctgtggaagcacctctcgagttctaacgtgatgccattcaatctctacatgtttaaaaacaacaaccctattagtaattcgcaggacatcaaatgctttatgactgacgtcaattcctggctcctgacttttggcttccagctccataatgtgatacctgggtacccaaagccagatatggacgcaatggaaccctcatacgaactgatccatacccagatgaaaacacaagagtgggacaactctaagtccatcctgggagtgcaatgtgaggtacagaagcagctgaaggcctttgttaccctggaacgcttcgatcagctgtacgggagcacgatcacttcttgccagcaagcgcctaagacaaaaaaatttgcctctagcggatctgtattcgggaagggtgtgaaatttgccttgaaagacggtagagtgactaccgatatcatctcagttgccaacgaggacggacgaagagtggcagctattctcaaccacgcccactatctggagaatcttcactttacaatagacggtgtcgacacccactacttcgtaaaacccggtcctagtgagggtgacctggccattctcggcttatcaggtggtaggcgaaccctcgagaatggggtgaacgtcaccgttagccaaattaatactgtgcttaatgggagaactagacgctacacagacattcaactgcaatacggcgctctgtgccttaacacccgctatggaacaacactggacgaggagaaagctagggtgcttgagctggctaggcagagggccgtgcgccaggcatgggcaagggagcagcaaagacttcgagaaggagaggaaggtctgagagcatggaccgagggtgagaagcagcaggttctgagcaccggcagagttcagggctacgatggttttttcgtcatctccgtcgagcagtacccagaacttagtgactccgccaataacatccacttcatgcgccagagtgaaatggggagacgctat

SEQ ID NO: 233481 - skipped

SEQ ID NO: 233482 - DNA, 1404 bp, synthetic construct
  misc_feature 1..1404: note = Description of Artificial Sequence: Synthetic coding sequence
  source 1..1404: mol_type = other DNA
atgcctgggcgttggcgatggcagcgggatatgcatcctgcacgcaaattgctgagtttgctattcctcattctcatgggcactgaattaacccaggtattgcccacaaaccctgaagagtcctggcaagtatatagctccgctcaagacagtgaaggcagatgtatctgtacagttgttgcaccgcagcagactatgtgttcccgggacgccaggacaaagcagctgcgccaactcctggagaaggtgcagaatatgtcccagagtatagaagttctggaccgacgcacccagcgcgatcttcaatacgtggaaaagatggagaatcagatgaaggggcttgagtcaaaatttaagcaggtcgaagagtcgcacaagcagcacctcgctagacagtttaaagccatcaaagccaaaatggatgaactccgacccctaattcctgtgctggaagagtacaaagccgatgcgaaactggtcctgcagtttaaagaagaggttcagaatctgacctcggtactcaatgagcttcaggaagaaatcggcgcttacgactacgatgaactccagtcccgagtatctaaccttgaagaaagactccgggcttgtatgcagaagctggcctgcggaaagctgacgggtatttccgaccccgtcaccgtgaaaaccagcgggtctcggttcggaagttggatgacagatcccctggccccagagggtgacaacagggtatggtatatggatggataccataacaaccggtttgtgcgggagtacaagtccatggtcgactttatgaacaccgataatttcacatcccatcggttgccccatccatggtcaggcacaggacaggtagtgtacaatggtagcatctattttaataagtttcagtctcacataatcatccgatttgatttgaagactgagaccatcctcaaaacaaggagcctcgactatgccggatacaataacatgtaccactatgcctgggggggacattctgatattgatctgatggtggatgagtcagggctgtgggcagtttacgctacaaatcagaatgctggcaacatcgtagtatcccggttagatcctgtgtcccttcaaactctgcaaacctggaatactagttatccaaaacgatcagctggcgaagcattcatcatctgcgggactctgtacgttacgaatggttattctggcggtacaaaggtccactacgcataccaaactaacgcttcaacctacgagtacattgatatccccttccagaataagtattctcatatctctatgttggactacaaccccaaagacagggctctctatgcctggaataacggacatcagatcctgtacaatgtgacactgtttcacgtcatacgatctgacgaactgtag

SEQ ID NO: 233483 - DNA, 408 bp, synthetic construct
  misc_feature 1..408: note = Description of Artificial Sequence: Synthetic coding sequence
  source 1..408: mol_type = other DNA
atgcctgggagatggaggtggcaacgggacatgcatcccgctcggaagctcttatccctgctgtttctgattctcatgggcacggagctaacccaggttttgcccactaacccagaagaaagctggcaggtgtactcctccgcccaggacagcgagggacgctgcatctgtacagtggtcgctccgcaacagacaatgtgctcaagagatgccaggacaaagcaactgaggcagcttctagagaaggtccagaatatgtctcaatcaattgaggtacttgacaggcggacccagagggacctgcagtacgttgaaaaaatggagaaccagatgaaaggactcgagagtaaatttaagcaggtggaagaatctcataagcagcacctggctcgccagttcaaggggtag

SEQ ID NO: 233484 - DNA, 1458 bp, synthetic construct
  misc_feature 1..1458: note = Description of Artificial Sequence: Synthetic coding sequence
  source 1..1458: mol_type = other DNA
atgtcagtacccctcctcaagatcggtgttgtgttatcgaccatggcaatgattacgaattggatgtcccagactctgccttcccttgtgggtttgaataccaccaaattgtccgccgctggaggtggcacactggataggagcaccggcgtccttcctacgaacccagaagagtcctggcaggtgtatagctccgcacaggacagcgaagggagatgtatttgcaccgttgtggctcctcagcagacgatgtgtagtagagatgcacgcactaagcaactacgccagctcctcgaaaaagtacagaacatgtcgcaaagcatcgaggtcctagaccgacgcacccaacgagacctccagtacgtggaaaagatggaaaaccagatgaagggactcgagtctaagtttaagcaagtggaggagtcgcataaacaacatctcgccagacagttcaaggctatcaaagcaaaaatggatgagctgcggccactgatacctgtgcttgaagagtataaggctgatgccaagctagtcttgcagtttaaggaggaagttcagaacctcactagcgtcctaaatgagctccaggaggaaatcggcgcatatgactatgacgagttgcaatcgagagtttctaatctcgaggagcggctgcgcgcttgtatgcaaaaactggcctgtgggaagctgacgggcatttccgaccccgtgaccgtaaagacctcagggtctaggtttggtagctggatgactgacccccttgccccagagggtgacaatcgggtgtggtatatggacggttatcacaataatcgatttgtccgtgagtataagtccatggtggattttatgaatacggacaattttacttcacatagactcccccacccctggagcgggaccggccaggtagtgtacaatggtagtatttactttaacaaatttcagagtcacattatcattcgcttcgacctgaagaccgagaccattctgaaaaccagatccctagattatgcaggctataacaacatgtaccattatgcctggggtggccattctgatattgatctgatggtcgatgagtccggattgtgggccgtgtacgcaaccaaccagaacgccggaaatatcgtggtcagtcggctggaccccgtttcactgcagacgctccagacatggaatacatcctacccaaaacgcagtgccggagaggctttcataatctgtgggacactctacgtcacaaatggctattcgggcggtaccaaggtccactacgcttaccagacaaacgccagcacatatgaatatatcgacatcccctttcaaaataagtattcccacatctctatgctggactataacccaaaagacagagccctctacgcctggaataacggccatcaaattctatataatgttacactcttccatgtgattcgctctgacgagctgtag

SEQ ID NO: 233485 - DNA, 1377 bp, synthetic construct
  misc_feature 1..1377: note = Description of Artificial Sequence: Synthetic coding sequence
  source 1..1377: mol_type = other DNA
atgggcgaagctccaggcagggagggaagaggcccttgcccacagctagaaagtccgcgacgtaggagagtcctgcctacaaacccagaggagtcctggcaagtttactcatcagcgcaggattccgagggcaggtgtatttgtaccgtcgtggctccacagcagacaatgtgctctcgggatgcccgaaccaagcagctgaggcaactgctagagaaggttcagaacatgagtcagagtatagaagttcttgaccgacggactcagcgcgacctgcagtatgtggagaagatggagaaccagatgaaagggctcgaatcaaaatttaagcaggtagaagagtctcacaagcagcacctggcacgccagtttaaggctatcaaggccaaaatggacgaactgcggccattgatccctgttttggaggaatacaaggctgacgctaagctcgtactgcagttcaaagaggaagtgcagaacctgacaagtgtgctgaacgagctgcaggaggaaatcggggcatatgattatgacgagctgcagtcaagggtgagcaatctcgaggagcgccttagggcatgtatgcagaagctagcatgcggtaagctgactgggatctctgaccctgtcacagtcaaaacctccgggtccaggttcggatcctggatgactgacccactggccccagagggcgataaccgtgtgtggtacatggatggctaccacaataataggtttgttcgggaatacaagtcgatggttgatttcatgaacactgacaatttcacttcccaccggctccctcatccatggtctggtaccggccaggttgtctataatgggagtatatacttcaacaagtttcaatcccacataataattcgtttcgacttaaaaaccgagaccatcctgaagacaagatctctggattacgcaggatataacaatatgtatcattacgcctgggggggtcactccgatattgacctcatggtagacgaaagcggcctctgggccgtgtatgctacaaaccaaaacgccggtaatatagtcgtctctcggcttgaccccgtgagcctacaaactctgcaaacctggaacacgagttatccaaaaagatctgctggagaagctttcatcatctgcgggacactgtatgtgacaaacgggtattccggcggtactaaggttcattacgcttaccagacgaacgcaagcacttacgagtatatcgatattccatttcaaaataaatatagccacatcagcatgctggattacaatcctaaagatcgcgcactgtacgcatggaacaatgggcatcagatcctctacaacgtcaccctgttccacgtgatccgaagcgatgaactgtag

SEQ ID NO: 233486 - DNA, 462 bp, synthetic construct
  misc_feature 1..462: note = Description of Artificial Sequence: Synthetic coding sequence
  source 1..462: mol_type = other DNA
atgtcagtacctctgctgaaaatcggcgtggtgctgtctactatggccatgatcactaattggatgagtcagacgctgccgagtctggttggcttaaataccaccaaactctccgcagctggcggtggtactctggacaggtctaccggcgtgcttcccactaaccccgaagagtcctggcaggtttattccagtgcccaggactccgaaggccgttgtatctgcacggtcgtcgcccctcagcagaccatgtgctctagggacgcaaggaccaaacagcttcgtcaattattggaaaaagtgcagaacatgagtcaaagcattgaggtccttgaccgaaggactcaacgagacctgcagtatgtcgagaagatggaaaatcaaatgaagggcctggagagcaagttcaaacaggtggaagaatcccataagcaacatctggcacggcagtttaagggttag

SEQ ID NO: 233487 - DNA, 729 bp, synthetic construct
  misc_feature 1..729: note = Description of Artificial Sequence: Synthetic coding sequence
  source 1..729: mol_type = other DNA
atgaaccttcacgttaaaactttaagcttgatgacttggcggtcacgattcttggaggagagtttctggtcattggaggagacggccgctcttgctaaacagttgcccctcaagtctccctcagagaatatcttcctgcatattgtggatctatctgaccccaaacaaatctggaagttcgtagagaacttcaaacaagagcacaagctccacgtcctgatcaacaatgctgggtgcatggtcaacaagcgtgagctgaccgaggatggcctggagaagaacttcgccgctaatacccttggcgtttacattcttactaccgggttaattcctgtgttggagaaggagcacgatccccgtgtgatcaccgtgtctagtggagggatgcttgtgcagaagttgaataccaacgacttgcagagcgaacgtaccccctttgacggcaccatggtgtacgcccaaaacaagaggcaacaagttgttttaacagagagatgggcacagggacacccagccatccatttttcgtccatgcaccctggctgggcagataccccaggggtcagacaagccatgcccggttttcacgcccgttttggggaccgactgcgctctgaggcccaaggtgccgatacgatgctgtggttagcactaagcagtgcagctgccgcacagcccagtggccgattcttccagggtgacttcctccctggctgcgaaggttcatag

SEQ ID NO: 233488 - DNA, 492 bp, synthetic construct
  misc_feature 1..492: note = Description of Artificial Sequence: Synthetic coding sequence
  source 1..492: mol_type = other DNA
atggcggaggatcggccacagcaaccccagctggacatgccgttggtgttggaccagggcctcacacgtcagatgaggttgcgggtggagagccttaagcagcgcggagagaagaggcaggacggcgaaaagcttttacagcctgctgagagcgtataccgactgaatttcacacaacaacagagactacagtttgaaaggtggaacgtggtccttgataagccagggaaagtgaccatcactggtacatcacagaattggactccggatctgaccaacttgatgacacgacagctgctggaccctactgcaatattctggcgaaaagaggatagcgacgccattgattggaatgaagcggacgcgctcgagttcggggaaaggctgagtgacctggcaaaaatcaggaaagttatgtactttctggtgacattcggagagggcgtggagcctgccaatcttaaggcatccgtggtgttcaaccagctctag

SEQ ID NO: 233489 - DNA, 939 bp, synthetic construct
  misc_feature 1..939: note = Description of Artificial Sequence: Synthetic coding sequence
  source 1..939: mol_type = other DNA
atggacggagggaaccagagtgaggggtcggagttcctcctactgggaatgagtgaaagccccgaacagcagagaatcctgttctggatgttcctctctatgtacttggtaaccgtagtgggaaatgtcctcattattcttgccataagctctgattctaggttacatactcctgtatatttttttctagcaaatctctccttcaccgacctcttcttcgtgacaaatactatcccaaagatgctggtgaatttacaatctcacaacaaagctatttcctacgctgggtgtttaacacaactctatttcctcgtcagcctggtagcccttgacaatctgatactcgccgtaatggcctatgacaggtatgtcgccatttgctgcccactacactatactactgcgatgtcaccaaagctttgtatcttgctattgagtctgtgctgggtcctatcagtactctatggtcttatccacaccctgctgatgactcgcgttaccttctgtggatcaaggaagattcattacatcttctgtgagatgtacgtgctgctcaggatggcatgctccaacatacagattaatcacacagtgctgatcgccactggctgctttatatttcttatcccttttggcttcgtgattattagttatgtactaataattcgggctattctacggatccccagcgtttcaaaaaaatataaagcattttctacatgtgcctcccacctgggggcagtgtccctcttttacggcacgttgtgcatggtctacctgaaacccctccatacctactccgtcaaagacagcgtcgccaccgttatgtatgcagtggtgacaccaatgatgaatccttttatttattcacttcgtaacaaggatatgcatggtgctctggggcgtctgctggacaagcatttcaaacggcttacttag

SEQ ID NO: 233490 - DNA, 939 bp, synthetic construct
  misc_feature 1..939: note = Description of Artificial Sequence: Synthetic coding sequence
  source 1..939: mol_type = other DNA
atgtcaggaacaaatcagtctagtgtctcagaatttttgctcctcggactctcccggcagccacaacagcagcatctgctgttcgtattctttctgagcatgtatcttgcaacggttttaggcaacctgctgattatactgagtgtgtctattgacagctgcctacacacccccatgtatttcttcctgagcaatctctcattcgtcgatatctgcttcagtttcacgaccgtgccaaagatgctggccaaccatatccttgagactcagaccattagtttttgtggctgtctcacccagatgtactttgtcttcatgtttgtagatatggacaactttctcctggctgtgatggcctacgatcattttgtcgcagtgtgtcatccattacactatacagcaaaaatgacacaccagctgtgcgccctactggtggccggactttgggtcgtggcgaatttgaatgttctgctacacacgctgctcatggcgcctttgtctttttgtgcggacaatgcaattactcacttcttctgtgatgttacccctttgctgaagctcagttgttctgatacgcatctgaacgaggtcataatcctgtcggagggagccctggtcatgatcacgccattcttgtgcatcttggcctcctatatgcacatcacctgcaccgtgctgaaggtgccaagtaccaaagggagatggaaagccttctctacgtgcggatcccatttggcagtcgtcctgctgttttacagcactattattgccgtgtactttaatcctctgtcatcccattccgcggagaaggacactatggccaccgtgctgtacacagtagtgacccctatgcttaatccgttcatatactccttacgaaatcggtacctcaaaggagccctcaaaaaggtagtagggagggtcgtgttttccgtctag

SEQ ID NO: 233491 - DNA, 924 bp, synthetic construct
  misc_feature 1..924: note = Description of Artificial Sequence: Synthetic coding sequence
  source 1..924: mol_type = other DNA
atgaatcactcagtcgtcacagaattcatcattcttggtctcactaaaaaacccgaattgcaaggcatcatttttttgtttttcctgatagtgtatctagtcgccttcctgggaaatatgttgataattatcgcaaaaatatataacaatactctgcacacccctatgtatgtgttcctgttgacactcgccgtggtggatattatttgcacgacgagtattattcctaagatgttaggcaccatgctgacatctgagaatacaatcagttacgccggatgtatgtctcagctttttctgtttacatggagcctgggagcagaaatggttctgttcacaactatggcatacgatagatatgtagccatttgcttccctcttcactacagcaccatcatgaaccaccacatgtgcgtggctttactgtccatggttatggctatagcggtcacaaactcctgggtgcacacagcattgatcatgcgactcaccttttgcggaccaaacaccatcgaccattttttctgcgagatacccccactgctggccctgtcatgctctccagtgcggattaatgaagtgatggtttatgtagctgacataacacttgctataggcgattttatacttacatgcatcagttatgggttcattatagtggccattctccggatcaggacagtggaaggcaaaaggaaggcgttttcgacttgctctagtcaccttacggtggtaaccctttactactcacctgtgatctacacttacatccggccagccagctcctacacgtttgagcgggataaagtcgtcgccgctctctacacgctagtcacccctacgctcaacccgatggtttacagtttccagaaccgcgagatgcaggccggtataagaaaggtgttcgcgttcctgaagcactag

SEQ ID NO: 233492 - DNA, 930 bp, synthetic construct
  misc_feature 1..930: note = Description of Artificial Sequence: Synthetic coding sequence
  source 1..930: mol_type = other DNA
atggagaatcggaacaacatgaccgagtttgttctgttgggactgactgagaacccaaagatgcaaaaaatcatcttcgtggtcttctttgtaatctatattatcactgtagtgggctacgtgttgatagtagtgacaataaccgcctccccctcacttggctctcctatgtacttaagcctggcctacctcagctttatcgacgcatgttattcttcggttaatacacccaacctgattacccacagtctgtacgggaagaaagcgatcctttttaacggttgtatgacacaggttttcggagaacattttttcgggggagctgagggcatcctgctcacggtgatggcctatgaccattatgtggcaatctgtaagccactacattacatgactatcatgaaccagtgtgtttgtgctctgctgatgggtgtggtctggatgggaggatttcttcatgcgacaattcagatcctgttcatttttcagctccccttctgtggtcccaatgtcatcgaccattttatgtgcgatctaaaccctttactgaatctggcatgtacagacacccacatgcttgagctcttcatcgcagcaaattcgggatttatctgtctcctgaattttgccctgctactggtctcctatgtggttattttgtgtagcctgagaacacattcgctcgaggccaggcacaaagccctcagcacgtgcgttagtcacatcaccgtggttattctcttcttcgtgccctgcatttttgtatacatgcgcccagctgctactcttccgatcgataaagctgtcgcaattttctacactatgataacacctatgctgaatccattgatctatacactcaaaaacgcacaaatgaagaatgctattcgtaaactgtgctcaaggaaagacatttcgggggacaagtag

SEQ ID NO: 233493 - DNA, 978 bp, synthetic construct
  misc_feature 1..978: note = Description of Artificial Sequence: Synthetic coding sequence
  source 1..978: mol_type = other DNA
atgttcctctacttgtgttttatattccagcggacgtgctctgaagagatggaagaggagaatgcaacccttttaaccgaatttgtcctcaccggcttcttacaccagccggactgtaaaataccgctgtttctggccttcctggtaatatacctcatcaccataatgggcaacttaggccttatcgttctgatctggaaagaccctcatctacacatacctatgtatttattcctgggctcactcgcttttgtggacgcctcactcagctctaccgtgactcctaagatgctgatcaacttcttggccaaatccaaaatgatcagcttgtctgaatgcatggtgcaattttttagcctggtcaccaccgtcactacggagtgcttcctgctcgctacgatggcatatgaccgttatgtggccatttgcaaagcactcctgtacccggttattatgactaacgagttatgtattcagctgctggtcctgtcgtttattggaggcctgctgcatgctttgatccatgaggccttcagttttagactcacattttgtaactcaaacatcattcaacatttctactgtgacattattccacttctcaaaatctcctgtacggactcgtctatcaacttcctgatggtctttatcttcgctggatcggtgcaggtgtttaccatcggtaccatcctcattagttatacaattattttgtttaccatattagagaagaagtccatcaaggggatccggaaggctgtatcaacctgtggggcacaccttctgtcagtgtccctttactatggaccattgacattcaagtatctcggatctgcctcgccccaggccgacgaccaggatatgatggagagtctgttttatacagtgattgtgccgttgttgaaccctatgatttacagcctgaggaataagcaggtcatcgcttcattcacaaaaatgtttaagtccaacgtgtag

SEQ ID NO: 233494 - DNA, 963 bp, synthetic construct
  misc_feature 1..963: note = Description of Artificial Sequence: Synthetic coding sequence
  source 1..963: mol_type = other DNA
atggagaccgggaaccaaactcatgcccaggagtttctgctgctcggttttagcgccacatctgaaattcagtttatcctattcgggctgtttctctctatgtatctagtgacttttactgggaacctgttaatcatactggcaatttgttcagactctcatctgcatactccgatgtacttttttctgtctaacttatcttttgcagatctctgtttcacttccaccaccgtgcctaagatgttgctgaacatcctcactcagaacaaatttatcacttatgccggatgcttaagtcagatttttttcttcacgtcttttgggtgccttgacaacctgctccttacagtgatggcttacgaccgattcgtcgccgtgtgccatcctctgcattacacagtcattatgaatccccagttgtgtggcctgttagtcctgggcagctggtgtatttctgtcatgggttccctactcgaaacacttacagtcttacggcttagtttctgtaccgagatggaaattcctcactttttctgcgatctgctggaagtactgaagctggcgtgcagcgacaccttcattaacaacgttgtgatctatttcgctacaggcgtgctgggcgtgatcagcttcaccggaatctttttctcctactacaagattgtgttctctatactcagaatcagctctgcgggtagaaaacacaaggctttttccacctgtggctctcatctatctgtagtcaccctcttttatggtaccggatttggagtgtatctcagttccgctgctaccccgtcaagccgcacatctcttgtcgcaagcgtgatgtatacgatggtgacacccatgctcaatcccttcatttacagccttcgcaacactgatatgaaacgggctctggggaggctcctgtcaagggcaacatttttcaacggcgacataaccgctggcctcagctag

SEQ ID NO: 233495 - DNA, 960 bp, synthetic construct
  misc_feature 1..960: note = Description of Artificial Sequence: Synthetic coding sequence
  source 1..960: mol_type = other DNA
atggagcggggaaaccagaccgaagtggggaactttttacttctgggtttcgcagaagattccgatatgcagttgcttctccacggtctgtttctctccatgtacctagtcacaatcatcggaaatctgttaatcatactaaccatcagcagcgactctcatctccatacacccatgtacttcttcctgagtaacctaagctttgcagacatatgttttacttctacaacagtgccgaaaatgctggtgaatatccagacacagtcaaagatgatcacgttcgcaggctgtcttacccagatatttttttttatcgcttttgggtgtctggataatctgctgctgactatgaccgcttacgatcggtttgtggccatctgctacccgctgcactataccgttatcatgaacccacgtctgtgcggcctcctggttctcggaagttggtgtatctccgtgatgggctcccttctcgagaccctcacaattctcagattaagtttctgcaccaatatggagatccctcactttttctgtgacccttctgaagtgttaaagctggcttgttcagacacattcatcaataatatcgtgatgtacttcgtgacaatagttcttggcgtgtttcccctatgcggcattcttttttcatactcccagatcttcagttcggtgctgcgcgtatccgctcggggacagcacaaagccttctcaacttgcggttcacatttgtccgtggtgagcctcttctacggaaccggactgggtgtgtatctctcgtctgccgtgacccctccaagtagaacttctttagcagcttcggtgatgtacactatggtgacaccaatgttgaatcccttcatatactccctccgaaacaaagatatgaaagggtcactcggccgtctgctactacgagccacctccctcaaggagggtacaattgccaaacttagttag

SEQ ID NO: 233496 - DNA, 939 bp, synthetic construct
  misc_feature 1..939: note = Description of Artificial Sequence: Synthetic coding sequence
  source 1..939: mol_type = other DNA
atggaagcagaaaatctgacagaactgagcaagtttctcctgttaggactcagtgatgatccagaactacagcctgtcctcttcgggctctttctctctatgtatctggtcactgttctgggcaacctgctcatcattctcgctgtgtcgtcagatagtcatctccacacaccgatgtacttttttctctccaacctatcctttgttgatatttgcttcattagtactactgtgccaaaaatgctcgtgtcgattcaggcgcgttccaaggatatctcctatatgggttgtttaactcaagtttacttcttgatgatgttcgccggaatggacaccttcctgttggccgtcatggcttatgatcggtttgtagctatttgtcaccctctgcactacaccgtgataatgaatccatgtctgtgcggtctgttggtcctggccagctggtttatcatcttttggttcagtctcgttcacattctcttgatgaagagactgactttttcaacaggcacagagattccacacttcttctgcgagcccgcacaggtgctaaaggtggcttgcagcaacacgctattaaacaacattgtgctgtacgtcgcgaccgccctgcttggtgtgttccctgttgcagggatcctgtttagttactcgcagatcgtgagttccctgatgggcatgtcatccactaaaggaaagtacaaagcatttagtacatgtggttcacacctctgtgtggtgtcactgttttacggtaccgggctgggggtgtatctgagtagcgccgtgactcactcatcacagagcagctcaactgcctctgtgatgtatgcaatggtgacacctatgctgaatccttttatctatagtctcagaaataaggatgtgaagggcgcactggagcggcttctcagtcgggctgattcctgtccatag

SEQ ID NO: 233497 - DNA, 972 bp, synthetic construct
  misc_feature 1..972: note = Description of Artificial Sequence: Synthetic coding sequence
  source 1..972: mol_type = other DNA
atggatagcgacgcttccctcgtgagctctcgccctagctctcccgaacccgacgatttgtttcttccagcccgttccaagggcagctctggaagtgcgtttacggggggaaccgtgagttcttcaaccccctccgactgcccccctgaactatccgcagagctgcggggagctatggggagtgccggagctcatcctggggataaactgggcggatctggattcaagtcgtcttcaagttcgaccagcagctcaacctcaagcgccgcagcctcatcaaccaagaaagacaagaaacaaatgacagagccagagctacagcagttacgtctaaagataaatagccgcgagcgcaaacgcatgcacgacttaaacatcgccatggatgggctccgggaagttatgccatacgctcacggaccgtcagtccggaaactgtcaaaaattgcaactctactgttagccaggaactatattctgatgctcaccaattcattagaggagatgaagagactcgtaagtgaaatctacgggggacaccatgccggattccacccttcagcttgtggcggactcgcccacagcgcgccacttcccgcagccactgcacacccggctgccgcagcccacgccgcacaccatcctgccgtgcaccacccaatcctcccacctgcggctgcagcggcagcagccgcagccgctgccgcagcggtttcatctgccagcctgccaggaagtgggctgccctcagtggggtctatcaggccccctcacggtctacttaagtcgcctagtgctgccgctgccgctccgctgggagggggtggcggaggctctggcgcatcaggcggatttcagcattggggcggaatgccgtgcccctgtagtatgtgtcaggtaccgcctccacaccaccacgtctccgctatgggggcaggaagtctgcctagattgacgagtgatgcaaagtag

SEQ ID NO: 233498 - DNA, 972 bp, synthetic construct
  misc_feature 1..972: note = Description of Artificial Sequence: Synthetic coding sequence
  source 1..972: mol_type = other DNA
atggactcagatgcttccctggtgagctctagaccaagctcccccgagcctgacgatctgttcttgcctgccagatccaaggggtcgtcaggttccgcctttacaggagggaccgtaagctcgagtacaccgtcggattgtccgccagagctgtccgctgaattgcggggtgctatgggctccgctggtgcccaccctggcgataagttaggaggaagcggatttaaatcatcatccagttctacatcatcatcaactagttcagccgcagcgagttcgaccaagaaagacaagaaacagatgactgagcccgaactgcagcagcttcggctcaaaataaacagtcgtgagagaaaaaggatgcacgacctcaacatcgccatggacggcttgcgggaagtgatgccctacgcccacgggccttccgtaagaaagttgtctaagatagccactttgctcctggcccgaaattatatcttgatgttgactaattctctcgaggaaatgaaacgacttgtaagcgaaatctatggcggacaccatgccggattccatccaagtgcttgcgggggtctggcacactccgctcctctgcccgcagcaacggcccaccctgccgctgccgctcatgcagctcatcaccccgctgtacatcatcccatcttgccccctgctgctgccgcagccgctgccgcagctgccgctgccgctgtcagctcagcatcgctgcctggttccgggttgcctagcgttggttccatccgccctccacatggcctattgaaatccccaagcgccgcagctgccgctccattaggagggggaggcggtgggtctggcgcttccggcggttttcaacactggggaggcatgccttgtccgtgcagcatgtgccaagtaccaccgccacatcaccatgtaagcgccatgggggctggctcacttcctagactaacgtctgatgctaagtag

SEQ ID NO: 233499 - DNA, 189 bp, synthetic construct
  misc_feature 1..189: note = Description of Artificial Sequence: Synthetic coding sequence
  source 1..189: mol_type = other DNA
atggactctgacgccagcctggtttcatctagaccaagctcccccgagcctgacgatttatttctgcctgcaagatccaagggttctagcgggtccgccttcacaggtgggaccgtgagctctagtacaccttcagactgcccccctgagctgtctgccgaattgcgaggcgcaatgggctccgcctag

SEQ ID NO: 233500 - DNA, 1323 bp, synthetic construct
  misc_feature 1..1323: note = Description of Artificial Sequence: Synthetic coding sequence
  source 1..1323: mol_type = other DNA
atggaataccagatactcaagatgtcgttatgcctattcatcctgctctttctcactcccggaatactctgcatctgccctctccaatgcatatgcactgagagacataggcatgtggattgtagtggtcgcaatctgtcgaccctccccagcgggttgcaagagaatattatccatctaaacttgagctacaatcacttcactgatctgcacaaccagctgacccagtacactaatttgcggaccttggacatctctaataaccggctggaaagtttgcctgcccacctcccacggtccctgtggaacatgagtgcagccaacaacaacattaaactgttggataagtccgataccgcatatcaatggaacctcaagtatctggacgtctcgaaaaacatgcttgagaaagtcgtactcattaagaacacacttcgatccctggaggttctgaacctgagctccaataaactgtggaccgtgccaaccaatatgccctcaaaactacacatcgtggatctgagtaacaatagccttacgcagatactgccaggaacattaattaacttaaccaacctaacccatttgtaccttcacaataataagttcacctttattcccgaccaaagtttcgaccagctgtttcagctccaggaaatcaccctctacaacaacaggtggagctgcgatcataaacagaacattacttatcttctcaagtggatgatggaaactaaagcccatgttattggtactccttgcagtacccagatctcatctttgaaggagcataacatgtacccaactccaagcggatttacaagcagcctgtttactgtgagtggaatgcagactgtcgatactattaattcactgagcgtcgtcacccagcctaaggttacaaagatccctaagcagtatagaaccaaagagacaacattcggcgcaactttgtcaaaggacacgacatttaccagcacagacaaagcattcgtcccttaccctgaggacacttccaccgaaaccataaattcccacgaggcggcagccgctacacttaccatccacctgcaggacgggatggtaacgaatacatccttaacctcctccaccaaatcatccccaacccctatgaccttgtcgatcacttccggtatgcccaataattttagcgaaatgccccagcagtccactacactgaatttgtggagagaggagacaacaaccaatgtgaaaacgcctctgcccagtgtggccaatgcctggaaggtgaacgcctcgttcctactgcttctgaacgtggtggttatgctggccgtctag

SEQ ID NO: 233501 - DNA, 819 bp, synthetic construct
  misc_feature 1..819: note = Description of Artificial Sequence: Synthetic coding sequence
  source 1..819: mol_type = other DNA
atgaatagcgattcatcctctgtaagtagcagagcgtctagtcctgatatggacgagatgtatcttagagaccatcatcataggcaccaccatcatcaggagagtcgcttgaatagcgtgagttctacccaaggcgatatgatgcagaagatgcctggagaatcgctctctcgagctggggcaaaggcggctggcgagtccagcaaatacaagattaaaaaacagttgagcgagcaagatctccagcagctcaggttaaaaatcaatggacgggagcgaaagcgcatgcatgatctcaacctagccatggatgggttgcgggaggtgatgccctacgctcatggcccatctgtccgcaagctgtccaaaattgccactctcttgctggcgcgtaactacatcctgatgctcaccagtagcttagaagaaatgaaacgtctggtgggagagatatacggtggccaccacagtgccttccactgtgggaccgtaggacactctgccggacaccccgcacacgcggctaatagtgttcacccagtccaccccatcctgggaggcgctttatccagtggtaacgcaagttctcctttaagtgccgctagcttgcccgcaatcggtacgatcagaccaccacacagtcttctcaaggctccttctacccctcccgctctccagctcggttcaggtttccagcattgggcaggactgccttgcccctgcacaatttgtcagatgccaccccctccccatctctccgctttgtcgaccgccaatatggccagattatccgccgaaagtaaggatctcctaaaatag

SEQ ID NO: 233502 - DNA, 375 bp, synthetic construct
  misc_feature 1..375: note = Description of Artificial Sequence: Synthetic coding sequence
  source 1..375: mol_type = other DNA
atgtggaaaggatgtctgaccctctatactgggcgaggtggcgaactgcagaagattggcgagttctgcatggtgtatagcgaggtgcctaacttttctgaaccaaacccagactaccgcggtcaacagaacaagggcgctcagtctgagcagaagaataacagcatgaactccaatatggggactggaactttcgggccagttggcaatggggttcacaccggccctgagtcaagggaacatcaattcagtcacgccggtagaagcaatgggcgaggcttgataaacccacagcttcagggcaccgccagcaatcagaccgtgatgacgaccatctctaatggaagagacccccgacgcgcttttaagagatag

SEQ ID NO: 233503 - DNA, 375 bp, synthetic construct
  misc_feature 1..375: note = Description of Artificial Sequence: Synthetic coding sequence
  source 1..375: mol_type = other DNA
atgtggaagggctgcctgactttatatactgggagaggtggggaactgcagaaaattggtgagttctgcatggtgtatagtgaggttccaaacttctctgaacccaaccccgattacagaggacagcagaataagggggcacagagtgaacagaaaaacaatagcatgaactccaacatgggaacaggaacatttggccctgtgggcaacggggttcatactggcccagagtctcgtgagcatcagtttagtcacgccggaaggtctaatgggagaggcttaattaacccccaactgcaaggtacggcctcgaatcagaccgtgatgaccactatcagcaacggaagagatcctcgaagggcatttaagagatag

SEQ ID NO: 233504 - DNA, 615 bp, synthetic construct
  misc_feature 1..615: note = Description of Artificial Sequence: Synthetic coding sequence
  source 1..615: mol_type = other DNA
atgaaccgagtgaatgaccctcttatttttatccgcgacatcaagcctgggttgaagaacctcaacgtggtgttcatcgtgctggagattggaagagtgacaaagacaaaggacggacatgaagttcggtcatgcaaggtggccgacaagactggctcaattactatttctgtctgggacgaaattggtggtttaatccaacccggtgacattattagactgacgaggggctacgcgagcatgtggaagggctgcctaactttgtacactggtcgcggtggggaattacagaagatcggagaattctgtatggtgtacagtgaggttcctaactttagtgagcccaaccccgattatcgtgggcagcagaataaaggagcgcagagcgagcagaagaataacagtatgaactccaatatgggcactgggacttttggaccagttgggaatggggtacatacagggcctgagagccgggagcatcaattttcccacgcaggccgtagcaatggacgcggtttgatcaaccctcagctgcagggtactgcgtcgaatcagaccgtaatgactacaatctccaacggaagggaccccaggagagccttcaagagatag

SEQ ID NO: 233505 - DNA, 636 bp, synthetic construct
  misc_feature 1..636: note = Description of Artificial Sequence: Synthetic coding sequence
  source 1..636: mol_type = other DNA
atgactactgagactttcgtgaaggatatcaagccaggattaaaaaacctcaaccttattttcattgtgcttgagacggggagggttaccaaaaccaaggacggtcacgaggtgaggacgtgtaaagtggcagataagacaggctcgatcaatatcagcgtgtgggacgacgtggggaatcttatccaacccggagacatcattaggcttacaaaggggtatgcttcagtgttcaagggatgcctgaccctgtacactgggaggggtggcgatctacaaaagataggcgaattttgtatggtgtactccgaagtgcctaattttagtgagccaaaccctgagtacagtacacagcaggctcctaacaaggcggtgcagaatgattctaatcctagcgctagccagcccactaccggaccctccgcggctagtcccgcttccgagaatcagaatgggaacggcctatccgctccgcctggccctggaggcggaccccaccctccccacaccccctctcatccacccagcaccaggattactagaagtcagcctaatcataccccagccggaccaccgggtcctagttccaatcctgtgtccaatggaaaggagacgcgacgctcctccaaaaggtag

SEQ ID NO: 233506 - DNA, 636 bp, synthetic construct
  misc_feature 1..636: note = Description of Artificial Sequence: Synthetic coding sequence
  source 1..636: mol_type = other DNA
atgaccacggaaacgtttgtaaaagacatcaagcctggcctgaagaaccttaatcttatctttatcgtgttggagacaggacgcgtcactaagactaaggatggacatgaggtgcggacttgcaaggtagccgacaaaactggttccatcaatattagcgtgtgggatgacgtgggcaacctaatccagcccggtgacatcatacggctgacgaaggggtacgcgagtgtctttaaaggatgcctcacgttatacacaggtcggggtggtgatttacagaagataggggagttttgcatggtatactcagaggtgccaaatttcagtgaacccaatcctgagtacagcacacagcaggctcctaacaaggccgtgcaaaacgactccaaccctagcgccagccaacccaccaccggtccgagcgcagccagtccagcgtcggaaaatcaaaacggaaatgggctaagcgcccctccaggtcccggaggtggacctcacccaccccatacgcctagtcaccctcctagtactagaattacccggagtcaacctaaccacacgccagccggacccccaggcccaagttctaatcccgtctctaatggcaaggaaactaggcggagcagcaaaaggtag

SEQ ID NO: 233507 - DNA, 636 bp, synthetic construct
  misc_feature 1..636: note = Description of Artificial Sequence: Synthetic coding sequence
  source 1..636: mol_type = other DNA
atgactacggagacttttgtaaaggacatcaagccgggattgaaaaacctcaaccttattttcatcgtcctggaaacaggtcgagttaccaaaacgaaggacgggcatgaagtgcgaacatgcaaggtagccgacaagacgggctcaatcaacatttctgtgtgggatgatgtgggtaacttgatacagcccggagacataatacgactgacaaaggggtacgcctccgtgttcaagggctgtttgacattgtatacggggagaggaggagacctgcagaaaatcggagagttttgcatggtctacagcgaggtgcccaacttttctgagcccaaccccgagtatagtacacagcaagctcctaacaaggcagtgcaaaatgactctaacccttccgcatctcaacctactaccggaccttcagccgcatcccccgctagcgagaaccagaacggcaacgggctgagtgcccctccgggacctggagggggtcctcatcccccacacaccccctcgcatcctccgagcaccaggataactcgctcccagccaaaccacactccagccggaccacctggaccctctagtaaccccgttagtaatgggaaggagactcggcgttcttcaaagagatag

SEQ ID NO: 233508 - DNA, 459 bp, synthetic construct
  misc_feature 1..459: note = Description of Artificial Sequence: Synthetic coding sequence
  source 1..459: mol_type = other DNA
atgacgactgaaacctttgtgaaagatattaagcctggactaaagaatttaaatttgatcttcatcgttcttgaaacaggcagggtgacgaagacgaaggacggacatgaggtcagaacctgcaaagtggccgataagactgggtccataaacatatctgtttgggacgacgtcggcaatctgatacagcccggtgatatcatcagattgacgaaaggctacgcctctgtgttcaaaggctgtctcactctatacacgggtcggggtggcgacctgcagaagattggggagttctgtatggtgtactcggaggtcccgaatttctccgagcccaacccagaatacagtacccaacaggctcctaataaggccgtccaaaacgattcaaacccgtctgcaagtcaaccaaccacaggaccttccgctgcgagcccagcctccgagaatcagaacgggtag

SEQ ID NO: 233509 - DNA, 435 bp, synthetic construct
  misc_feature 1..435: note = Description of Artificial Sequence: Synthetic coding sequence
  source 1..435: mol_type = other DNA
atgacgactgagactttcgtgaaggatatcaaacccggtcttaaaaacttaaacctaatttttatcgtacttgaaactggcagagtgacaaagactaaggacggccatgaggttcgaacatgtaaggtagccgataaaacgggatctatcaacattagcgtgtgggacgacgttgggaacttgattcagccgggagacattataaggctgaccaaaggttatgcctctgtgttcaaggggtgtttgaccctctacaccggcagaggtggtgacttgcagaagatcggcgagttttgtatggtgtattccgaagtacctaacttttctgaaccaaaccccgaatactctacacagcaggctcccaataaggcagtgcagaatgactctaatccgtctgccagtcagcccacgactggtcccagcgcagcttcttag

SEQ ID NO: 233510 - DNA, 2409 bp, synthetic construct
  misc_feature 1..2409: note = Description of Artificial Sequence: Synthetic coding sequence
  source 1..2409: mol_type = other DNA
atggggcacccccctttggaattctctgactgctatctagacagtcccgatttcagggaaaggctgaagtgctacgaacaggaactggaacgcactaataaatttatcaaggatgtgataaaagacggcaatgcccttatcagtgctatgcgcaattattcgtccgcggtacagaagttctcccagaccctgcagtcttttcagttcgattttataggggacacgctgacagacgatgagatcaatatcgccgagtccttcaaagagtttgctgaattgttaaatgaggtcgaaaacgagcgaatgatgatggtgcataacgcaagcgacttacttatcaagcccctggaaaacttccgcaaggaacagatagggttcacaaaggagagaaagaagaagttcgaaaaggatggggaaaggttctacagcctgctggatcggcacctgcatctctcttccaagaagaaggagtcgcagctgcaggaagctgatttgcaggttgataaggagcgccacaattttttcgaatcctcgctggactacgtgtaccaaatccaggaggtgcaggagagcaaaaagtttaacattgttgagccggtcttagcctttctgcatagtctttttataagcaatagcctgacagtggaactcacccaggatttccttccctacaagcaacagcttcagctaagtctccagaacacacgaaaccacttctcatccactcgggaagagatggaggagctcaagaaacggatgaaggaggcaccacagacttgcaagctcccagggcagcccaccatcgaagggtacctgtacacgcaggaaaagtgggctctggggatcagttgggtgaaatactactgtcagtacgaaaaagagacgaaaaccctgacgatgactcccatggagcaaaaacctggagctaagcaaggtccactggacctgaccttaaagtactgcgtgcgccgtaaaaccgagtccatcgacaaacgtttctgttttgatatcgagacaaatgaaaggccaggcaccattactctgcaggccctgagcgaggctaaccgcagactgtggatggaggctatggatggaaaggagcctatctatcacagtcctattacaaagcagcaagagatggagctcaacgaagttggattcaagttcgtccggaaatgcattaacattatagagaccaagggcatcaaaaccgagggcctgtaccgtaccgtcggctccaacatccaggtacaaaaacttctgaacgcgttcttcgatcccaagtgcccaggcgacgtggacttccacaatagcgactgggacatcaaaacaatcacttctagcctgaagttttacctgaggaacctctccgagccagttatgacctatcggttgcacaaagaattggtgtcagccgctaagtctgacaatctcgactataggctgggcgctattcacagcctggtctataagctccccgaaaaaaatagagaaatgttggagctactcattagacacctggtgaatgtgtgcgagcatagcaaggagaacctgatgaccccttccaatatgggtgtgatctttggacctaccctgatgagagctcaggaagacacagtggcagcgatgatgaacataaagtttcagaatattgtcgttgaaatccttattgagcatttcggaaagatctacctggggccacccgaggaaagtgccgcaccccctgttcccccacctcgggttactgccagacgccacaaacccattactatcagtaaacggctgttgagagaaaggaccgttttctacacttcttctctggacgaaagcgaggatgaaattcagcatcaaacgccaaacgggactattacctcatccattgaacctccaaagcctcctcagcaccctaagcttcccatccagcggtctggagaaacagacccaggaaggaaatctcctagcaggcccatcctcgacggaaagctggagccctgtcccgaggtcgacgtcggaaagttagtttctcgtctgcaggacggcggaactaagatcacacccaaggccacaaacgggccaatgcctgggagtggtcccaccaagaccccaagcttccatataaagagacctgcccctcggcctctggcccaccacaaagaaggggatgctgacagcttttcgaaggttcggccacccggtgagaagcctaccattattcgacccccagtaaggccccctgacccgccatgccgcgctgccaccccccagaaacctgagcccaagcctgatatagtggctgggaacgccggtgagatcacgtcctccgtggtcgcctcccgtacgaggttttttgagacagctagcaggaagactggctcctcacaagggagactaccgggtgatgaatcctag

SEQ ID NO: 233511 - DNA, 2085 bp, synthetic construct
  misc_feature 1..2085: note = Description of Artificial Sequence: Synthetic coding sequence
  source 1..2085: mol_type = other DNA
atgggccacccacccctggagttctcagactgttaccttgactcccctgacttccgggagcgcctgaaatgttatgagcaggagctagaaaggacaaacaagtttataaaggacgttatcaaggatggcaacgccctgatctccgccatgagaaactactcctcagccgtccaaaagttttctcagactctgcaaagctttcagtttgatttcataggggataccctgaccgatgacgagattaatattgcagagagcttcaaggaattcgccgagttgctgaacgaggttgagaatgaaaggatgatgatggtccacaacgcttccgaccttttgatcaaaccactcgagaacttccgaaaggaacagattggatttacgaaagaaaggaagaaaaagtttgaaaaggatggagagcgcttttattctctcctggatcgccacttgcacctaagtagcaagaaaaaggagagccagttacaagaagccgacttacaggtcgacaaggaaaggcacaacttttttgaatctagcctggactacgtatatcagatccaagaggtgcaagaatcgaaaaagtttaatatcgttgaacctgtgctagccttcctccacagcctgttcattagtaattccctcacagtcgagctcacccaggacttcctaccctataaacagcagctccagctttctctccagaacacaagaaatcacttctccagcacgcgggaggagatggaggagcttaaaaagcgcatgaaggaggctccccagacctgcaagctgccaggccaacccacgattgagggctacctttacacgcaagaaaaatgggccctaggtatatcatgggtgaagtactactgtcagtacgagaaggagaccaagactctcaccatgacccccatggaacaaaaacccggagccaagcaagggccactggatctgaccctgaagtactgcgtcagacggaaaacagaaagcattgataagagattttgcttcgatatcgaaactaacgaacggcctggtaccatcactctgcaagcactgtccgaggctaatcggaggctctggatggaggccatggacggcaaggagcccatctaccacagcccaatcacaaagcagcaggaaatggaactgaatgaggtgggcttcaaattcgtgagaaagtgcatcaatataatcgagaccaagggcattaagacagaaggcctctatcgaacagtcggttccaatatccaagtgcagaagctgcttaacgcattttttgatcccaaatgtccaggtgatgttgacttccacaactctgattgggatattaagactattacctcctctttgaaattttatctgcgcaatctgagtgaacccgtgatgacctaccgcctgcacaaagagctggtgtccgcagccaagtccgataatttagactaccgcttgggcgctatccacagtctggtgtacaaactgccagagaaaaaccgtgagatgttggagcttttaatccgccatttggtaaacgtgtgtgaacactccaaggaaaatctaatgaccccatctaatatgggtgtcatatttggcccaactctcatgcgggcacaggaggacacagtagccgctatgatgaatattaagttccaaaacatcgttgtcgaaatcttaattgaacatttcggcaagatttacttgggaccacccgaggaatcagctgccccaccagtaccccctcccagagttacagccaggaggcacaagccaatcaccatctccaaacgcttgctgagggaacggactgtgttttataccagctcacttgatgaaagcgagggtgacgccgactcattctctaaagtcaggccacctggggaaaaaccaaccataattcgtccacccgtcaggccccctgatcccccatgccgcgcagccactcctcagaagcctgagcccaagccggatatcgtcgctgggaacgctggggagataacgtcctcagtggtggcttcaaggacaagattctttgaaacagcatctcgcaagacaggatcaagccagggaagattacctggtgacgaatcatag

SEQ ID NO: 233512 - DNA, 225 bp, synthetic construct
  misc_feature 1..225: note = Description of Artificial Sequence: Synthetic coding sequence
  source 1..225: mol_type = other DNA
atgttagaactactgatcaggcaccttgtgaacgtgtgcgagcactccaaggagaacctgatgacaccctcaaacatgggcgtaatttttggcccaacactcatgcgagcgcaggaagatactgtcgcggcaatgatgaacatcaagttccaaaacattgtggttgagattttaatagaacactttggaaaaataagctcgtttttcttgcaccgctctatttag

SEQ ID NO: 233513 - DNA, 3111 bp, synthetic construct
  misc_feature 1..3111: note = Description of Artificial Sequence: Synthetic coding sequence
  source 1..3111: mol_type = other DNA
atggcctcatcagtgggcaacgttgctgacagtacagggcttgccgaactggcacaccgcgaatatcaagctggcgatttcgaggccgctgaacggcactgtatgcaactctggcgacaggagcctgataacaccggcgtgctgttgttactgtcctccatccattttcagtgccgcagactggatcggtctgcacacttctcaacgctggccataaagcaaaacccactgttagcagaagcgtatagcaaccttggcaacgtgtacaaggaaagaggacaattgcaggaggccatagagcactatcggcatgcacttcggctcaaaccagactttatcgacggctacattaaccttgctgccgcactggttgctgcgggagacatggagggcgctgtacaggcatatgtgtcggcattgcagtataaccctgacttatactgcgttcgaagcgatctaggcaacttactcaaggccctcgggaggttagaggaggcaaaggcatgctacctgaaggccatcgagactcagcccaattttgccgtagcatggtccaacctgggatgtgtgtttaacgcccagggagaaatttggctggctatccatcacttcgagaaggcggtgactctcgaccctaatttcctggatgcttatattaatctggggaacgtgcttaaggaagcacggattttcgatcgcgctgtggcagcctatttgagggctctcagtctgagccccaaccacgccgtcgtgcacggcaatctggcttgcgtatactacgaacagggcctcatcgacctggccattgacacatatagacgggctatcgagctccagcctcactttcctgatgcttattgcaatctggccaacgccctgaaggagaaaggaagtgttgctgaagctgaggattgctacaacacggccttgcggctgtgccccactcatgcagattctctgaataatctcgctaacatcaagagggaacaggggaacatagaggaagcagtcaggctatacaggaaagcactggaggtgtttccagaatttgccgcagcccactctaacttagcctcagtgctgcagcagcagggaaagctgcaggaggcactaatgcactacaaggaagcaatacgaatctccccgaccttcgccgacgcttattcaaacatgggcaatacgttgaaggaaatgcaggatgtccaaggcgcactgcagtgctacacaagggccattcagatcaatcccgcatttgccgacgcccactccaacctcgcctctatacacaaggattccgggaacatcccagaagccatcgccagctacaggactgctctgaaactgaaaccggatttccctgatgcatactgtaaccttgctcactgtctgcaaatcgtatgcgattggacagactacgacgagcgaatgaagaagttagtcagcattgtggccgatcaactcgagaaaaatagactaccctctgttcatccacaccatagcatgctgtaccccctcagccacggtttccgtaaagcaatcgccgaacgccatggtaacctatgcctggacaagatcaacgttctacataagccaccttatgagcaccccaaagacctgaagctctccgacggcagacttcgcgtaggttatgtatccagtgacttcgggaatcatccgactagtcacctgatgcagtctatccccggtatgcataatccagataagtttgaggtcttctgctacgccctcagtcctgacgacggtacaaattttagagtcaaggttatggccgaagcaaatcattttatcgatctcagtcagatcccgtgcaacggaaaggctgccgaccgcatccaccaggatggcatccatatccttgtcaatatgaacggttacacaaaaggggcacggaatgaactgttcgctttacggccagcccctatacaggcaatgtggttggggtatcccggaacaagcggcgcactttttatggactatattattaccgaccaggagacttcgcccgctgaggttgccgaacaatattccgagaaactggcctacatgccacacacgttctttatcggagaccatgccaatatgttcccccacctaaaaaagaaagctgtgattgattttaaatctaatggtcacatctatgataacagaattgttcttaatggcattgatcttaaagctttcctggatagtttgcccgacgtgaaaatagttaaaatgaaatgcccggacggcggagacaacgccgatagtagtaacactgccctcaatatgcccgtgatccccatgaatactatcgccgaggctgtgatagagatgatcaacagaggccagattcaaattactattaatggcttttccatcagtaacggtctcgctaccacacagatcaataataaagccgctaccggcgaggaggtgccaaggactatcattgtgacaactagatcgcagtatgggctgcccgaagatgctattgtatactgcaatttcaaccaactgtacaaaatagacccttctaccctccagatgtgggcaaacatcctcaagcgggtacccaattcggtgctatggcttttgaggttcccagcagttggcgaacccaatatccagcagtatgcccagaatatgggtttgccgcaaaatcgcatcatcttttcacctgtggctcctaaggaggaacacgttagacgtggacagttagccgatgtgtgtttggacacgccattgtgcaacggccacacaaccggcatggacgtactttgggcagggacacctatggtaactatgcccggagaaacactggctagccgtgttgcggctagccagctcacatgcttgggatgcctggaactcatcgccaaaaataggcaagaatacgaagacatcgccgtgaaactaggcaccgatctcgagtatcttaagaaggtgaggggcaaagtctggaagcagcgtatctccagccccctgtttaacacaaaacagtatacaatggagctagagaggctttaccttcaaatgtgggagcattacgcagctgggaacaagcccgaccacatgatcaagcctgtggaggtcacggagagtgcctag

SEQ ID NO: 233514 - DNA, 3141 bp, synthetic construct
  misc_feature 1..3141: note = Description of Artificial Sequence: Synthetic coding sequence
  source 1..3141: mol_type = other DNA
atggccagcagcgttggtaatgtagccgattctacagagcctactaagagaatgttgagcttccagggattagccgaactggcgcaccgcgaatatcaagctggcgacttcgaggccgctgagcgccactgcatgcaactgtggaggcaggaacccgataatactggcgtcttactgctgctgtctagtattcatttccaatgccggcgacttgatagatcggcccacttttcaactcttgccattaaacagaatcctctgctggccgaggcttactcgaatttgggtaatgtttataaggagagaggacagctgcaagaggccatagaacattataggcacgccttaaggctgaagccagatttcatcgatgggtatattaatctggctgctgccctggtggcagcaggcgacatggagggcgctgttcaggcctatgtgagcgccctgcagtacaatcccgacctctattgtgtgcggtcagatctagggaatctcctgaaggccctgggcagattagaagaagccaaggcgtgctacttgaaagcaattgaaactcaacctaactttgccgtcgcttggtcaaacctggggtgtgtcttcaatgcacagggggagatctggctggcgatccaccattttgaaaaagcagtgactctagatcccaactttctggacgcttacatcaatctggggaacgtgctgaaagaggctaggatttttgatcgggctgtggctgcttatttgagagcgctgtctctgtcccctaatcatgctgttgttcatggtaacctcgcctgtgtttattatgaacaggggctaatagacctggccatcgatacgtatcgcagggctatcgagttgcaaccgcattttcccgatgcctactgcaacctggccaatgcactgaaggaaaagggctctgtcgcagaagcggaggattgctacaacacagcccttcggctttgcccaacccacgccgacagcttgaacaacttagctaatattaagagagaacagggaaatatagaggaggcagtacgcctgtacaggaaggccctggaagtgtttcctgagttcgctgcggctcattctaatctcgcgtccgtgctccagcagcagggaaagttacaggaggcccttatgcactataaagaggcgataagaatttcaccaacatttgcagatgcctactccaacatggggaatacccttaaggaaatgcaggacgttcagggggctctgcagtgctatactcgggctatacagattaatcctgcgttcgccgacgcacattctaaccttgcatctatacacaaagattcaggtaatattccagaggcgatcgcatcataccgaaccgctctcaagctcaagcctgactttcctgacgcttactgcaatctcgcacactgtctacagatcgtgtgtgattggacggactatgatgaacgtatgaagaagctggtgagcatcgtggccgatcaattagaaaaaaatcgactgcccagcgtgcatccacaccattccatgctgtatcccttgtcccacgggttccgtaaagcaatcgcagagcgtcacggcaatttgtgtctggataaaatcaatgtcctgcataaacccccatatgaacatccaaaggatctgaagctctctgatggcagacttagagtcggatacgtttcgagcgactttggcaaccatcccacttctcatctgatgcagtccatccccggtatgcataatcctgataagttcgaggttttttgctacgcgctgagtcctgatgacgggaccaacttccgtgtcaaggttatggcagaggccaatcacttcatcgatctgagtcaaatcccgtgcaacggtaaggctgctgaccggatccaccaggatggcatccacatcctcgtgaacatgaacggatacaccaagggagcacgaaacgaactctttgccctcagacctgcaccaatacaagctatgtggcttgggtacccagggacttcaggggctctgtttatggactatatcattactgatcaggaaacctctcccgcagaggtggctgagcaatactccgagaaactggcgtacatgcctcatactttttttattggcgaccatgcaaatatgtttccacatctcaagaagaaagccgtgatagacttcaagtccaatgggcacatctacgataatcgcattgttctcaacggaattgatctgaaggcattcttggactccctgcccgacgtcaaaattgtgaagatgaaatgccctgatggtggagacaacgccgattcgtctaacacggcgctgaatatgcctgtcatacccatgaacaccattgcagaggctgtcattgagatgatcaatcggggacagattcaaatcactatcaacggatttagcatctcaaacggcttagccacaacccagataaacaataaggccgctactggagaggaggttccacggacaatcatcgtgacaacgagatcacaatacggcctgccggaggacgccatcgtctattgtaactttaaccaactgtataagatcgaccccagcactctccagatgtgggccaatatcctgaagagggtgcctaattctgtcctgtggttactgcggtttcccgcagtgggcgagcccaatatccagcagtatgcgcagaacatgggattacctcaaaatcggattatttttagtcctgtcgccccaaaagaagaacacgttcgtcggggacagctggctgacgtgtgcttggacacgcctttgtgtaacggccacacgacaggcatggatgtgctgtgggccggaacacctatggtgacaatgcccggtgaaacgctcgccagcagggtagcggcatctcaactcacctgtctcgggtgtctggaactgatcgccaaaaacagacaggagtatgaagacatcgcagtaaaactgggtaccgacctcgaatacctcaagaaggtgcggggtaaggtgtggaagcaaaggattagtagccctctgttcaacactaagcagtatacaatggagctcgagcgattgtacctgcagatgtgggagcattacgccgcagggaataagcctgaccatatgataaaacccgtagaagtgacggagtctgcttag

SEQ ID NO: 233515 - DNA, 330 bp, synthetic construct
  misc_feature 1..330: note = Description of Artificial Sequence: Synthetic coding sequence
  source 1..330: mol_type = other DNA
atgtcaatcactgacgttcttagtgccgacgacatcgctgctgctctgcaggaatgcagagatccagatacatttgaaccacagaagtttttccagacttccggccttagcaaaatgtccgcaaatcaggtaaaggatgtatttagatttatcgacaatgaccagagcggatatctcgacgaagaggagcttaaattcttcctccagaagttcgagagtggggcacgtgaactgactgagtcagaaacaaaatcacttatggctgccgcagataacgatggggacgggaagatcggggcagaggaattccaagagatggtccacagttag

SEQ ID NO: 233516 - DNA, 330 bp, synthetic construct
  misc_feature 1..330: note = Description of Artificial Sequence: Synthetic coding sequence
  source 1..330: mol_type = other DNA
atgtccattaccgacgtgcttagcgctgacgacatagccgctgcgctccaggaatgcagagatcctgacaccttcgagccccagaaatttttccagacctccgggctgtccaagatgagcgccaaccaggtcaaagatgtgtttcgctttatagacaatgatcagtcaggatacctcgacgaggaggaactcaagttctttctccagaaattcgaatccggcgcacgcgagctgactgagtccgaaacgaaatccctgatggccgctgcagacaatgatggcgacggaaagataggggctgaggaattccaggaaatggtccattcctag

SEQ ID NO: 233517 - DNA, 1638 bp, synthetic construct
  misc_feature 1..1638: note = Description of Artificial Sequence: Synthetic coding sequence
  source 1..1638: mol_type = other DNA
atgcctcctttcctcttgcttacctgcctatttatcaccggcacatcagtgagtcctgttgcactagacccttgttccgcttacatcagccttaacgagccctggcgcaataccgatcaccaattagacgaatcccaagggccaccattgtgcgacaatcacgtgaacggtgagtggtaccactttactggcatggccggagatgccatgcccacattttgcattccagagaatcactgtggaacacacgcaccagtgtggcttaacggatcgcaccccctggagggagacggtatagtacagagacaggcgtgcgcttccttcaatgggaattgttgcctgtggaataccactgtggaagttaaggcttgtcccggaggatactatgtttatcggctgactaaacctagtgtttgcttccacgtgtactgtgggcacttttatgatatctgtgatgaagactgtcacggttcctgttctgatacgagcgaatgcacctgtgcccctgggactgtacttggcccagatagacagacctgtttcgacgaaaatgagtgcgagcaaaacaatggaggttgttcagaaatttgcgtaaatttgaaaaactcttacagatgcgaatgtggagtagggagggttctccgctcagacggcaagacttgtgaagatgtggaggggtgccacaacaacaacggcggttgctcccactcttgcctcggctccgagaaaggataccagtgcgagtgcccacgcggactggtactcagcgaagacaaccatacctgccaggtcccggtgctgtgcaaatccaatgccatagaggtcaacattcctagggagttagtgggaggattggagttgttcctgacaaatacctcctgtagaggggtgtcaaacggaacacacgtcaacatccttttctcgttgaaaacgtgtggaacggttgtcgacgtggtcaacgataaaattgtggccagcaacctggtgactggccttcccaagcaaacccccggttcaagcggggacttcatcatccgaaccagtaagctgttgatccccgtcacttgcgagtttccccgtttgtataccatatctgaggggtatgttcccaacctaaggaattcccccttggagatcatgtctcggaaccatggtatatttccgttcactctcgagatcttcaaagacaatgagtttgaggaaccttaccgggaagcccttcccactcttaaactccgcgatagcctttatttcggcatcgaacctgtcgttcacgtgtccggccttgagtcccttgtcgaatcttgcttcgccaccccgacgtctaaaattgatgaggtcctgaagtactacttaatcagagacggatgtgtttccgacgatagtgtcaagcagtacacctcaagggatcaccttgcaaaacatttccaggtgcctgtatttaaatttgtggggaaggatcacaaagaggtgttcctgcactgtagagtcctggtgtgcggcgtcctggatgagagatccagatgtgctcaaggatgtcatcgccgtatgcgcagaggcgctggcggagaagactctgctggacttcagggacagacgcttacggggggaccaatccgcatcgactgggaggactag

SEQ ID NO: 233518 - DNA, 966 bp, synthetic construct
  misc_feature 1..966: note = Description of Artificial Sequence: Synthetic coding sequence
  source 1..966: mol_type = other DNA
atgccacctttcctacttctcacttgtctgttcatcacaggtacttcagtgagtcctgtggccctggatccttgctccgcctacatttccttaaatgaaccctggcgtaacacagatcaccagctagatgaaagccagggtccacccctatgtgataatcacgtgaatggcgaatggtaccatttcaccggcatggctggggatgcaatgcctacgttctgtatcccagagaaccattgtggtacccatgcccctgtctggttgaatggttctcatcccctggaaggcgacggaatagtccagcgccaggcgtgtgcttcatttaacgggaactgttgcctttggaacaccacggtggaggtcaaagcctgccctggtgggtactacgtataccgacttaccaagccgtccgtgtgcttccatgtctattgcggacatttttacgatatctgcgatgaagactgccacggatcctgctcagacactagcgaatgcacctgtgcgcctggaaccgtgcttgggccagacaggcaaacatgcttcgatgaaaatgaatgcgaacagaacaatggtggttgctcagaaatttgcgtcaatctcaagaactcttataggtgtgagtgtggtgtaggtagagttctccggagcgatggcaagacttgtgaagacgtggagggatgtcataataacaacgggggttgcagtcactcttgcctggggtccgaaaaggggtaccagtgcgagtgtcctagggggctggtgctgagcgaggacaatcatacttgccaggtacctgtgctgtgcaagagcaatgcaatagaggtgaatatccccagggagttggtcggagggcttgagctgtttttgaccaacaccagctgccgtggagtttccaatggcacccacgttaatatactgtttagtcttaaaacctgtggaacagtcgtggattcctgttttcagtag

SEQ ID NO: 233519 - DNA, 735 bp, synthetic construct
  misc_feature 1..735: note = Description of Artificial Sequence: Synthetic coding sequence
  source 1..735: mol_type = other DNA
atgggactggaactgttcctggatcttgtgtcccagccctcccgggcagtttatatatttgctaaaaagaacggaattccactggagcttagaacggttgatctggtgaagggtcagcataagagcaaagaattcctccaaataaattcccttggcaagttacctaccctcaaagacggagatttcatccttaccgaatcatccgccattctcatctatctgtcgtgcaagtatcaaacacctgatcactggtacccaagtgacctgcaagctagggctcgagtacacgagtaccttggatggcatgccgactgcattagagggactttcggtatcccgctgtgggtccaggtactgggacccctgatcggtgtccaagtaccgaaggaaaaggttgagcggaatcgtaccgcgatggaccaagcccttcagtggctcgaagacaagttcctcggtgaccgacctttcttggcagggcagcaggtcaccttggccgacctaatggcactggaggaattgatgcaacctgttgcccttggctatgagctgtttgaaggacgccctcggttggccgcatggcggggtagagttgaagcctttctgggagcagaactctgccaggaggcccattctatcattctctccattctggagcaagccgcaaaaaagacattgcccaccccttcccccgaggcctatcaggcgatgttgctgcgcattgctaggatcccctag

SEQ ID NO: 233520 - DNA, 696 bp, synthetic construct
  misc_feature 1..696: note = Description of Artificial Sequence: Synthetic coding sequence
  source 1..696: mol_type = other DNA
atggctagcatggcagcaatcggtagctgctccaaagagtaccgtgttctgttaggccaactacagaaacagaccgatttgatgcaggatacttccagacttctagacccatacattcggattcaggggcttgacgtgccgaagttaagagagcactgccgggaacgtcccggtgccttcccttccgaggagaccctccggggactgggtagaaggggctttctgcaaaccctgaatgcaaccctgggttgtgttctgcaccggctggctgatctggagcaacggctaccaaaggcgcaggacctcgaacgctcaggtttgaacatagaggacctggaaaaacttcaaatggctagacctaacatcctggggcttaggaacaatatctattgcatggcacagctgctggacaacagtgacacagctgagccaaccaaggccggacggggagcgagtcagccaccaaccccaacccccgcttctgatgcattccaaaggaagctggagggatgtcggttcctgcacggatatcataggtttatgcactcagtgggcagagtcttctcaaaatggggggagagcccgaatagatctaggcgtcacagcccccaccaggctttacggaaaggcgttcgaaggacccggccatcacgcaaaggtaaacgtctgatgacaagaggtcagcttcctaggtag

SEQ ID NO: 233521 - DNA, 2940 bp, synthetic construct
  misc_feature 1..2940: note = Description of Artificial Sequence: Synthetic coding sequence
  source 1..2940: mol_type = other DNA
atggctctgttcgctgtgttccagaccacttttttccttacactgttgtccctgcggacctatcagtccgaggttctcgccgagcgcttgcctctaacccctgtgtctctgaaggtaagcaccaactccacgcgccagtccctccacctgcaatggacggtccataatcttccgtaccaccaggagcttaagatggtgtttcagatccaaatctcccgcatagagactagcaacgtaatttgggtgggcaactatagtaccactgtaaagtggaaccaggttctccattggtcctgggaatccgagcttcccctcgagtgtgccacccatttcgtgaggattaagagtctggtggatgacgcgaagttccccgagcccaacttctggtcaaactggtcttcttgggaggaggtgtcagtgcaggactccaccgggcaggatatcctgttcgtattcccaaaggataagctggtcgaggaggggaccaatgtgaccatttgttacgtctcaaggaacatacagaataatgtgtcttgttacctggagggtaaacaaattcacggtgagcagctggacccccacgtgactgcatttaacttgaacagcgtcccatttattaggaataagggaaccaacatatattgcgaggctagccaggggaatgtttcggaaggcatgaagggcatcgtgcttttcgtttctaaagtcttggaagaacctaaggatttttcctgtgaaacggaggacttcaaaacgctgcattgtacatgggaccctggtaccgacactgcccttggctggagcaagcagccaagccagtcatatactttgttcgagtcttttagcggggagaaaaagctgtgtacacacaagaattggtgtaactggcaaataactcaggattctcaggaaacctacaatttcacactgattgctgagaattatttacggaagcgatctgtgaatattttattcaacctgacccaccgggtctatctgatgaatccattcagcgtgaacttcgagaacgtgaacgctactaatgccatcatgacatggaaagttcatagcatcagaaataattttacatatctgtgccagatagaactgcatggggaggggaaaatgatgcagtataacgtttccattaaagtgaatggcgagtacttcctgagtgagctggaacctgccacagaatacatggccagggtccgatgtgcggacgcctcccatttttggaaatggagtgagtggtccggccagaactttacaaccctcgaggcggcaccatccgaggcgccagatgtttggcgaatcgtgtctctcgagcccggaaaccacaccgtgacgttgttttggaagccgttgagcaagttacatgccaacggcaaaatcctgttttataacgtagtagtcgaaaaccttgacaagccctcgagcagtgagctgcactctattcctgccccagccaactcaaccaagttgatcctggatcgttgcagctatcagatctgcgtgatcgctaacaattctgtgggggctagcccagcttccgtaatcgtgatttctgcagatccagagaacaaagaagtggaggaggaacgcattgctgggactgaaggaggattctctttaagttggaaaccccagcctggcgacgtaattggatacgttgtggactggtgtgatcacacacaggatgtcttgggcgattttcagtggaagaatgtgggtcctaataccacctctactgtcatatcgaccgatgccttccgccctggtgtccgctacgattttaggatttacgggctgtccacaaagcggattgcttgtctcctcgagaaaaaaactgggtattcgcaggagctggctcccagtgacaacccccacgtgttggtcgatactttaacatctcactcattcacgctgagctggaaggactattccactgagagccaacctggtttcattcagggttatcacgtttacttaaagtcaaaagcaagacagtgtcacccccgtttcgaaaaggcggtcttaagtgacggaagcgaatgctgtaagtataaaattgacaacccggaagagaaggcgctaattgtggacaatttgaagcctgaatctttttatgagttctttattacgccattcacatcggcaggcgaagggccaagcgccacatttaccaaggtcactacacccgacgaacatagctccatgttgattcatatactgctgcccatggtgttctgtgtgctactgatcatggtgatgtgttatctcaagagccaatggatcaaagagacgtgttaccccgacattcccgatccttacaagtctagcattctctccctgataaagtttaaagaaaatcctcatcttataatcatgaacgtgtccgactgtataccagacgcgatcgaagtggtgtctaaacccgaagggacaaaaattcagttcctaggcacccggaagagtctcactgaaacagagctcactaaaccaaactatctctatctattacctaccgagaaaaaccacagcggtcctgggccttgtatctgcttcgagaacctcacctacaatcaagccgcttctgactccggcagttgcggacatgtccctgtgagccctaaagcaccaagtatgctgggattgatgaccagcccagagaacgtcctaaaggctcttgagaaaaactacatgaacagtctaggtgagatcccagccggagagacaagcttgaattacgtgagccagttagcaagccctatgttcggagacaaggattcgttgcccaccaatcccgttgaggctccccattgctccgagtataagatgcagatggctgtgtcattacgactggctctacctcctccgaccgagaatagtagccttagctctatcactttgctggatccgggtgagcattactgctag

SEQ ID NO: 233522 - DNA, 1029 bp, synthetic construct
  misc_feature 1..1029: note = Description of Artificial Sequence: Synthetic coding sequence
  source 1..1029: mol_type = other DNA
atggctctcttcgcagttttccagaccacattctttttgactctgctcagcctcaggacatatcagagcgaggtgctggctgaacgccttcctctcacacctgtgtcactgaaagtcagcacaaatagtaccagacagtctctacatctgcagtggacagtccataacttgccctatcatcaggaactgaaaatggtgtttcaaatccagataagtagaatagagacatccaatgtgatatgggtgggaaattatagcacaacagtcaaatggaatcaggtcttgcattggtcttgggagagcgagcttccacttgaatgtgcaacacattttgtgaggataaagtctcttgtggacgacgccaaatttcccgagccaaatttctggtctaactggagttcatgggaggaggtttcggttcaggactctacaggacaggacatcttgttcgtcttccctaaggacaaattggtggaagagggcaccaacgtgactatttgttacgtgtccaggaatatccaaaataacgtgtcttgttatttggagggcaagcaaatccatggggagcagctggaccctcacgtgacggccttcaatctgaatagcgtgcccttcattcggaacaaaggcactaatatttattgcgaggcaagccagggtaacgtgtccgagggcatgaaggggatcgtgctcttcgtaagcaaggtactggaggagccaaaagacttcagttgtgaaaccgaagactttaagactctccattgcacttgggatcccggaaccgacaccgccctcggctggtcaaaacaaccgtctcagagctacactctcttcgaatcgttttctggagagaaaaagctgtgcacccacaaaaattggtgcaattggcaaataacacaggacagccaagagacgtacaatttcactctgatcgcagaaaactatttacgtaaaagatcagtgaacatcttatttaacttaacacatagaggcgaaacaagagtggtcacagctcatagaggacactag

SEQ ID NO: 233523 - DNA, 1398 bp, synthetic construct
  misc_feature 1..1398: note = Description of Artificial Sequence: Synthetic coding sequence
  source 1..1398: mol_type = other DNA
atgaacgcccagttgaccatggaggccataggtgagctgcatggggtgtctcacgagcctgtcccagccccagcagacctgctgggtggcagtcctcatgcaaggagttccgtggcccaccggggtagccacctgccaccagctcatccacgatcaatgggaatggcatcgctgctggatggcggaagtggtgggggagattaccaccaccaccacagggcgccagaacattcactggcgggacccctgcatcctacaatgacaatggcctgcgaaacgccgcctggaatgagcatgcctacaacctacaccacacttacaccattgcaaccccttcccccaataagtaccgtcagcgataaatttccgcaccatcaccatcaccaccaccaccatcatcatcctcaccatcaccagcggctcgcgggaaacgtgagcggtagcttcacactcatgcgcgacgaacgcggtctggcctccatgaacaatctgtatactccctatcacaaggacgttgctggcatgggtcagagcctctcacctctgtcctcttcaggtctgggctcaatccacaacagtcaacagggtctcccacattatgcacaccctggcgctgctatgcctactgataagatgctgacccccaacggcttcgaagcccatcatccagctatgctgggacgacacggtgaacaacatctgacaccaacttccgcgggaatggtgccgattaacggactccctccacatcatccacacgctcacctgaacgcgcagggccacggccaactgctaggcacggcacgggaacccaacccctccgtaactggagcgcaggttagcaatggttccaattccggacagatggaagagatcaacaccaaagaagtcgcccaacggattacaacagaacttaagcgatacagcatcccacaggccattttcgcccagagggtgctctgtcggtcacagggcacactgagtgacttgttgcgaaaccctaagccatggtcgaaactgaagagcggcagggaaacattccggagaatgtggaagtggctgcaagaacctgaatttcagagaatgtcggctctgcggctggctgcctgcaagcggaaagagcaagagcatgggaaggacagaggaaatacccccaaaaagcccagattggtcttcactgatgtccagaggcggaccctgcatgcaatcttcaaggaaaacaaacgaccgagtaaagagctgcagattacgatttcacagcagctggggttagaactctcaactgtctcaaacttttttatgaatgccagacgcaggagtctcgacaagtggcaggatgaaggctcaagcaattccggcaattctagctccagctcaagcacgtgcacaaaggcctag

SEQ ID NO: 233524 - DNA, 1515 bp, synthetic construct
  misc_feature 1..1515: note = Description of Artificial Sequence: Synthetic coding sequence
  source 1..1515: mol_type = other DNA
atgaaagcagcgtacacagcataccggtgtctgacaaaggacctagagggttgtgccatgaatcccgaactcaccatggagtcactcggtacattgcatggaccagctgggggaggatcgggtggcggtggaggcggaggcggaggaggcggaggagggggtccgggacacgaacaggagctgttggcgtccccgagtcctcatcacgcaggcagaggagctgccggtagcttacggggtcctcctccgcctcctacagcacatcaggaactcgggacggccgcagccgcagcagctgccgctagtcgttcagcaatggtcacgtcaatggcttctatcctggacggcggtgattaccggcctgagctgagtattcccctgcaccacgccatgtctatgtcgtgcgactccagtccacccggtatggggatgtcaaacacatataccactcttactcccttgcagcccctgccaccaatttctacagtctcagacaagttccatcatccccacccacaccatcacccacatcatcatcatcaccaccatcaccagagactcagcgggaatgtatctggatcctttacattgatgagagatgaacgcggattacccgcaatgaataacttgtacagtccatacaaggaaatgcccggaatgtctcaatctttgtcacctctcgccgcaacccccctaggcaatggcttgggaggcttgcacaacgcgcagcagtctctacccaactacgggccaccaggacatgacaaaatgctctcccctaattttgacgcccaccacacagcaatgctaaccaggggggagcagcatttgtctcgtggtctgggcacaccgcctgctgcaatgatgagtcatctcaacgggttgcatcacccgggacacacccagtcccatggaccagtgctagcacccagtagggaaaggccgccaagctcaagtagtggttcacaagtagccacctccggtcaattggaggaaatcaatacaaaggaagtcgctcaacgcattactgctgaactcaagagatactccattccacaagctatattcgctcaacgggtgctctgtaggagtcaaggaacgctgtcagatttactgcggaacccgaagccctggagtaaattgaagagcggcagagaaacatttcgtaggatgtggaaatggctccaagagcctgagttccagcgaatgtccgctctgagactcgcagcttgcaaacgaaaggagcaggagccaaacaaggaccggaacaatagtcagaagaagtcccggcttgtgtttacagacctgcagaggcgcaccctgttcgcgatcttcaaggagaataaaaggccatctaaagagatgcagatcaccatctcacagcagctcggactggagctgacgacagtctctaatttttttatgaacgccaggaggcggagtctggaaaaatggcaggacgatctgtctaccgggggtagtagcagtacgtcttccacgtgcacgaaagcctag

SEQ ID NO: 233525 - DNA, 1458 bp, synthetic construct
  misc_feature 1..1458: note = Description of Artificial Sequence: Synthetic coding sequence
  source 1..1458: mol_type = other DNA
atgaaccccgaactgactatggaaagcttaggtaccctccatggcccagccggaggagggtccggagggggtggcggaggtggtgggggtggcggaggtggtgggcctggacatgaacaggaattactggccagtccctccccccaccacgctggcaggggagctgctgggagcctgcggggaccaccgcctccaccaactgcgcatcaggaacttggcacagccgctgccgcagctgcagccgcatcacgatcagccatggttaccagcatggcaagcatcctggacggcggtgattatcggccagaactcagcattcctctacaccatgccatgagtatgtcatgcgactccagtcccccagggatgggaatgtcaaatacatataccacccttacccccctccagcctctgccgccaatctccaccgtgagcgacaaatttcaccacccccacccccaccatcatccccaccaccaccaccatcaccaccaccagcggctctccggcaatgtctccggatcctttactcttatgagggacgagcggggactacccgcaatgaataacctgtattcaccctacaaagagatgcccggaatgtctcagtcattgtcccccctcgctgcaaccccactgggaaacggtctgggtggtctgcacaacgcccaacagtcactgccgaattacggacccccagggcatgataagatgctctcgccaaatttcgatgcccatcatacggcaatgttgacgagaggagagcagcaccttagtaggggtttgggaactcccccagctgccatgatgtcccatttgaatggtttacaccatcccggtcacacgcagagccatggaccagtcttggctcccagcagagaaagacccccaagctcctcttctgggtctcaggtcgccaccagcggccagctggaagagatcaacacaaaggaggttgcacagagaatcaccgctgagctgaaacgatattcgatcccacaggccatcttcgcccagagggtcctctgccgatcccaaggcacactgagcgatttgctgcgaaatccgaaaccgtggtccaagttaaagtcaggcagagaaacctttaggcggatgtggaagtggctccaagaacccgaattccagagaatgtctgcgcttcggctggcagcatgcaaacgcaaagagcaagaaccaaataaagaccggaataattctcagaagaaaagcaggctcgtctttaccgatctccagaggagaactttgttcgcaatcttcaaggaaaataagcgcccttctaaggagatgcagatcaccatcagtcagcaactagggcttgaattaacgaccgtgagtaatttctttatgaacgcgcgaagaaggtcactggagaagtggcaggacgacttgtccacgggagggtcgagcagcacgtccagcacctgtaccaaggcatag

SEQ ID NO: 233526 - DNA, 450 bp, synthetic construct
  misc_feature 1..450: note = Description of Artificial Sequence: Synthetic coding sequence
  source 1..450: mol_type = other DNA
atggtggatgatgccggtgccgcagagtcccagcgtggcaaacaaacacccgctcattccctcgagcagctgcgcaggttacccctgccccctccccagatacggatccgcccttggtggttcccagtccaagagcttcgcgatccactcgtgttctatctcgaggcctggctggctgacgagttgttcggacccgatagagcaatcatccccgaaatggagtggaccagtcaggctctgttaactgtagatatcgtggatagcggcaacctcgtggaaattacagtcttcggtagaccacgggtgcagaatagggtcaaatctatgctcctttgtctggcctggtttcacagggaacaccgggctagggctgaaaagatgaagcacctagagaaaaacctgaaagcccatgccagcgacccccactccccacaggatcccgtcgcctag

SEQ ID NO: 233527 - DNA, 387 bp, synthetic construct
  misc_feature 1..387: note = Description of Artificial Sequence: Synthetic coding sequence
  source 1..387: mol_type = other DNA
atggcgccagtgaaaaaattagtggtaaaggggggtaagaaaaagaagcaggtcctgaaattcaccctcgactgtacacaccctgtagaagatggaatcatggatgcggctaatttcgagcaatttctacaggagcggatcaaggtgaacggcaaagcagggaatttgggcggaggtgtggtgacgatcgaacggtccaagtcaaagatcacagttaccagcgaggtgcccttcagcaagagatatctgaagtatctgaccaaaaaatatttgaagaagaataacctccgtgattggctacgggtggtcgcaaactctaaggagtcttatgaactccgatacttccagataaaccaggacgaggaggaggaagaggacgaggactag

SEQ ID NO: 233528 - DNA, 975 bp, synthetic construct
  misc_feature 1..975: note = Description of Artificial Sequence: Synthetic coding sequence
  source 1..975: mol_type = other DNA
atggagccggcacctagcgcaggcgctgaattacagcccccactgttcgcaaatgcctccgacgcttacccctcagcatgtcccagcgcaggtgccaacgcctcaggtccaccgggtgcccgaagcgcatcatctctggctctggcaatcgcaattactgccctttacagcgctgtgtgtgccgtaggattactagggaacgtcctggtgatgttcggaatagttcgctataccaaaatgaagaccgcgacaaacatttatatttttaatctggctttagcagatgctctagctacctccacacttccatttcagagtgccaaatatctgatggagacatggccatttggagaactgctctgtaaggcagtgctgtctattgattattacaacatgttcacatccatcttcacgctaaccatgatgagcgtcgatcgctacattgcagtctgccaccccgtcaaggcgttggacttccgcacacctgccaaggcaaagttgattaatatctgcatctgggttctggcttctggggtgggcgtcccaatcatggtaatggcagtgaccagaccccgtgacggtgcagttgtgtgcatgctacaattcccttcaccttcttggtattgggacaccgtgacgaagatttgcgtgttcctgtttgcatttgttgtgtgctgggctcccatccatatttttgtgatcgtctggaccttggtcgacatcgatagaagagacccactggttgtggccgctcttcacctttgtattgccttaggttacgcaaactcgagcctgaacccagtgctctacgcatttctcgatgagaatttcaagcggtgctttaggcagctctgcagaaagccctgtgggaggcccgacccaagcagtttctcaagggccagggaggccactgcacgtgagcgcgtgacagcatgcacaccgagtgacggccctgggggaggtgcagcggcatag

SEQ ID NO: 233529 - DNA, 1143 bp, synthetic construct
  misc_feature 1..1143: note = Description of Artificial Sequence: Synthetic coding sequence
  source 1..1143: mol_type = other DNA
atggactcccccatccagatcttccgcggagagccaggacccacatgcgcgccaagcgcttgcctgccgcctaattcctctgcctggttccctgggtgggcagagcctgactctaatgggagcgctggatcagaagacgctcagctggaaccggctcatatctctcccgcaattcctgtgatcataacagcagtgtatagcgtcgttttcgttgtgggcctcgtcggcaacagcctcgtaatgttcgtgattatacgatatacaaaaatgaagactgccaccaacatttacatttttaaccttgcactcgccgacgctctggtgactactactatgccctttcaatctacagtgtatctgatgaactcttggcccttcggcgacgtgctttgtaaaattgtaattagtatcgactattacaatatgtttacaagtatcttcacactgacaatgatgtcagtagaccggtacatagccgtgtgccaccccgtaaaagccttggatttccggacaccattaaaagccaaaatcatcaatatttgcatctggctgttatctagctcggttggaatcagcgccatcgtgctcggcggtacgaaggtgagggaggatgtcgacgtcatagaatgttccttgcagttccctgacgacgattattcttggtgggacctcttcatgaaaatatgtgtgttcatctttgcattcgtgatacccgtactcatcatcattgtgtgctacacgctgatgattctgagactgaagagtgtgaggttgctgagtgggtcgcgagaaaaagacagaaatctgcggagaattacccgactggtgctagtcgtagtagccgtgtttgtggtgtgctggacacccattcacattttcattctggtggaggcgttgggtagtacatctcattcaaccgccgctctgtcgagctattacttctgcattgcactggggtacactaactcaagtctgaacccaattttatatgcattcctcgatgagaactttaaaaggtgtttcagagacttttgttttccacttaaaatgcgcatggagaggcagtccaccagcagggtccggaataccgtccaggatcccgcataccttcgagatattgatggtatgaataagcccgtgtag

SEQ ID NO: 233530 - DNA, 1101 bp, synthetic construct
  misc_feature 1..1101: note = Description of Artificial Sequence: Synthetic coding sequence
  source 1..1101: mol_type = other DNA
atggactctcctattcagatttttagaggcgagccagggccaacatgtgcaccttccgcctgcctaccacctaattcatccgctggatccgaggacgcccagctggagccagcccacataagccctgccatacctgtgataattacagcagtgtatagcgtagttttcgtcgtgggattagtgggcaattccttggtcatgtttgtcattattaggtacaccaagatgaaaacggccaccaacatttatatctttaacttggcccttgccgatgcacttgtgacaacaactatgccatttcagtcgacagtttacctgatgaattcctggcccttcggtgacgtgctgtgcaagatcgtgatcagcatagattattataatatgtttacctccatatttacgctcaccatgatgtccgttgaccggtatattgccgtctgtcaccccgtcaaggctttggacttccgaactccgctgaaggccaagataatcaatatctgcatctggctgctgtcttcctcagtgggaatttctgccattgttctggggggaactaaggttagggaagatgtggacgtcatcgaatgctcactccagtttcctgacgacgactacagttggtgggacctgttcatgaaaatttgcgtgtttatctttgcattcgtaatccccgtgctgatcatcattgtctgttatacactcatgattcttcggctcaaatctgttaggctgctcagtggctcccgcgaaaaagatagaaacctacgtcgcattactcgcctcgtactagtcgttgtagccgtgtttgtggtctgttggacccccatccacatattcatactggtggaagcgcttgggagtacatcgcattcaacagccgctctgagctcctattacttctgtattgcgctcggatatacaaatagctctctaaatcctatcttatatgcatttttagatgaaaactttaaacgatgcttccgtgacttttgctttccgctgaagatgcgtatggagaggcagtctacgtcccgggtacggaacaccgtgcaggatccagcctatctccgtgacatcgatggcatgaacaagccagtgtag

SEQ ID NO: 233531 - DNA, 1143 bp, synthetic construct
  misc_feature 1..1143: note = Description of Artificial Sequence: Synthetic coding sequence
  source 1..1143: mol_type = other DNA
atggatagccccatccagatttttcggggtgagcccggtcccacctgcgcgccttcggcctgcctgcctcctaattcttctgcctggttcccaggatgggctgaaccagacagcaacggaagtgcaggttcagaagacgcccaactagagccggctcacatctcaccagccatacccgttattatcacagcagtgtactctgtggtgtttgtcgtgggcttggttggaaacagcctagtcatgtttgtgatcatacgctatactaaaatgaagactgccaccaatatctatatcttcaatctggctctagcagatgcgctggtgacgacaaccatgccatttcagagcacagtctacttgatgaatagttggccttttggagacgtgctgtgcaagatcgtgatcagcattgactactacaacatgttcaccagcatctttacattgaccatgatgagcgtggataggtatattgcagtctgccatcctgtgaaggcgctggacttccggacccccttgaaagccaagatcatcaacatctgtatctggctgttaagctcctccgtgggcatatccgcaattgttctcggtggcaccaaagtgcgcgaggacgtagatgtgattgagtgttcgctacagttcccagacgatgattactcctggtgggatctcttcatgaagatttgtgtctttatttttgccttcgtaatccctgtccttattattattgtatgctataccttgatgattctcagacttaaatcagtccggcttctaagtggtagcagagagaaggatagaaacctgcgcaggatcacccggttggtgcttgttgtggttgccgtgtttgtagtatgctggacacccatacatatctttattctcgttgaggcacttggaagcacctcacattctacagccgctctctccagttactacttttgtatcgccctgggatacactaactcctctctgaatcccattctgtacgcattccttgatgaaaacttcaagcggtgcttccgtgatttttgttttccactgaagatgaggatggagaggcaatctacatccagggtccggaacacagtccaggatccagcctatttgagagacatcgacggtatgaataagcctgtttag

SEQ ID NO: 233532 - DNA, 1344 bp, synthetic construct
  misc_feature 1..1344: note = Description of Artificial Sequence: Synthetic coding sequence
  source 1..1344: mol_type = other DNA
atgtctcggcgaccttgttcctgtgctctgaggcctccaagatgttcctgcagcgccagtccatcggctgttacagcagcaggcaggcccagaccaagcgactcttgcaaagaggaatcttccacactgagcgtgaagatgaaatgtgacttcaattgcaatcatgtccacagcggtttgaagcttgtcaaacccgatgatatcggacgcctggtatcttacacccctgcctatctagaagggagttgtaaagattgcattaaagattatgagcgtctgagttgtatcgggagtcccatcgtgtctcctcggatagtgcagctggagacagagtcaaagcgactgcacaacaaggagaaccagcacgtccagcaaacgctaaatagcactaatgaaattgaggcactcgaaacgtcaagactgtatgaagatagtgggtacagcagcttttctctccagagcgggttgtccgaacatgaggagggaagtctcctagaggaaaatttcggagactctctgcagtcatgcctgctccagatccagtccccagatcagtatccaaacaaaaacctcctccctgtccttcacttcgaaaaggttgtgtgcagcactctgaaaaaaaatgctaaacgcaacccaaaggtagaccgggagatgctcaaagaaataatcgctcgcggaaattttagacttcaaaacattatcggccgaaaaatgggccttgaatgcgtcgacatcctgagtgaactgttccggcgaggcctcaggcacgtactggccactattctggcccagctcagcgatatggatctgatcaatgtgtccaaggtcagcactacctggaaaaagatcctagaggatgataagggcgcattccagctgtattccaaagctatccagcgggtgaccgagaataataacaaattctccccccatgcatccacgcgcgagtatgtcatgttcaggacccccctggcctctgtgcagaaatctgccgcacagacttccttgaagaaggacgcacagaccaaactctctaatcaaggtgaccaaaaggggagcacttattctagacacaacgagttttctgaagtggccaaaaccttaaaaaagaacgagtcactcaaggcctgtatccggtgtaactctccagccaaatacgattgctatctccaacgtgccacctgcaagcgagagggatgcgggtttgattattgtaccaaatgcttatgtaactatcacaccactaaggactgcagtgacgggaaacttttgaaagcaagctgtaagattggccctctacccggaacgaagaaatccaagaagaacctacgcagactgtag

SEQ ID NO: 233533 - DNA, 1203 bp, synthetic construct
  misc_feature 1..1203: note = Description of Artificial Sequence: Synthetic coding sequence
  source 1..1203: mol_type = other DNA
atggactcctctgctgctcctactaatgccagtaattgcaccgacgcactggcatactcctcttgtagtcccgctcccagcccagggtcctgggtcaacctctctcatttagatggtaatctgtctgacccgtgcggccctaatagaaccgacctgggcggaagggattcgttatgtccaccaacaggttcgcccagcatgatcaccgcgatcacaataatggccctgtattcgattgtgtgtgtggtgggactattcggaaactttctcgtgatgtatgtcatcgtacggtataccaaaatgaagacagcgaccaatatctacatttttaatctggcgctcgctgatgcattagccacatctaccctcccattccagtctgtaaattatttaatgggtacatggccattcggaactattttatgtaagatagtcatttctattgactactacaacatgtttacctcaatcttcactctgtgcacaatgagtgtcgataggtacatcgccgtgtgtcatcctgttaaagcgctcgattttcgcaccccacggaacgccaaaattataaatgtgtgtaattggattctgtcttcggcaatagggctgcctgtcatgtttatggctactactaaatacaggcagggtagtatcgattgcacgctgacttttagccaccccacatggtattgggagaacctgctgaagatctgtgtgtttatctttgcattcattatgcctgtcctgatcatcaccgtctgctacgggctgatgatcctccgcctgaagagcgttaggatgctcagcggctcaaaggagaaggatcgcaacctcagaagaatcaccaggatggtactggtcgtggttgctgtattcattgtgtgctggaccccgattcacatttacgttattattaaagccctggttaccatcccggagacgactttccagacagtgagttggcacttttgtatagcgctaggatacaccaactcctgtctgaatcctgtactgtatgcatttctggatgagaattttaaacgatgcttcagggaattctgtattccaacatcaagcaatatcgagcagcagaatagcacccgcattaggcagaacacccgcgatcacccttccacagctaatacggtggatcgtactaaccatcagctggagaacctggaagcagaaaccgccccattaccgtag

SEQ ID NO: 233534 - DNA, 1257 bp, synthetic construct
  misc_feature 1..1257: note = Description of Artificial Sequence: Synthetic coding sequence
  source 1..1257: mol_type = other DNA
atggattcctcagccgcacccacaaatgccagcaactgtactgacgcgctagcctattctagctgcagcccagcaccgtcacctggctcgtgggttaatcttagtcatctggacggcaacctgagtgatccttgtggcccaaaccgcactgacctgggtggacgcgatagcctgtgcccacccactggcagcccctccatgattactgctatcaccattatggccctgtactctattgtgtgtgtagtcggactgttcggcaatttcctggtaatgtatgttattgtcagatacaccaagatgaagaccgcaactaacatatatatctttaaccttgccctggccgacgctcttgctacgtccacactgccctttcagtcagtcaattacctgatgggaacttggccctttggtacaattctgtgtaagatagtcatctctatcgactactacaacatgttcacttctattttcaccttgtgcaccatgtctgttgatagatacatcgccgtgtgtcatcctgtaaaggctttggatttccgaaccccccgtaatgcaaaaattattaacgtttgcaattggatactgagttctgctatcggcctgccggtaatgttcatggctaccacaaagtacagacaggggagtattgattgtacgctgacctttagccatccgacgtggtattgggaaaatctgctcaagatctgtgtctttatctttgcgttcatcatgcctgtacttattatcaccgtgtgctatggacttatgatcttacgtttgaagtccgtgaggatgctgtcaggttccaaggagaaggaccgaaaccttagacgcataacaagaatggtgttggtcgtggtggctgttttcattgtgtgttggaccccaatccacatttacgttattatcaaagcacttgttaccatccctgaaacaacattccagactgtgagctggcatttttgtattgccctggggtacacaaacagctgcctgaaccctgtcttatatgcatttctcgacgaaaacttcaagcgctgtttcagagaattctgcatcccgacttcatcgaacattgagcaacaaaactctaccagaatccggcaaaacacgagagaccacccctccactgcgaataccgtcgatagaactaatcatcagcctcctctggctgtatctatggcccaaatcttcactcggtatcccccacctacacacagggaaaaaacctgcaatgattacatgaagagatag

SEQ ID NO: 233535 - DNA, 1209 bp, synthetic construct
  misc_feature 1..1209: note = Description of Artificial Sequence: Synthetic coding sequence
  source 1..1209: mol_type = other DNA
atggactcctccgccgctcctaccaacgcgtcaaattgcaccgatgcgctggcatactcatcatgcagtcctgccccttcccccggaagctgggttaatttgtcacacctggacggcaacctgagcgacccatgtggacctaaccgcacagaccttgggggtcgcgatagcctgtgtcctcctactggcagtccttccatgatcaccgctattaccataatggccctgtattccatcgtctgtgtggttggtcttttcggtaacttcttagtgatgtacgtcattgttaggtacacaaagatgaaaacagccacaaatatttatatcttcaatctagctctagccgacgctcttgcgacgtctaccctcccttttcaatccgtcaattatttaatggggacctggccattcggcaccattttgtgtaagattgtcatctctattgactactacaatatgtttacatccattttcaccctgtgcacaatgagcgtggatagatacatcgcggtttgccatcccgttaaagcactggattttcgcacgcccaggaacgcaaaaatcataaatgtgtgcaactggatactttcctcagcaatcgggctccccgtgatgttcatggctacaacaaagtatcggcagggcagtattgactgtacactgactttctcccaccccacttggtactgggagaacctgctcaaaatttgcgtttttatctttgcctttattatgccagtcctgattataaccgtgtgttacggtcttatgatccttcgtctgaaaagcgtccgcatgctgagtggtagcaaagagaaggaccggaacttacgtcggatcacgcgcatggtgctggtggtggtcgctgtgttcatcgtttgttggacaccaatacatatctatgtgataatcaaagctctcgtgacgattcccgagacaacgtttcagactgtgtcctggcacttttgtatcgccttggggtatacaaatagttgcctgaaccccgtcctgtatgcattcctagacgagaatttcaagagatgcttcagagagttctgcatcccaacctcatccaatattgagcaacagaatagtactcggattagacagaacaccagggaccatccgagtaccgccaataccgtcgacaggactaaccaccagataagggatccaatctccaacctgcctagggtgagtgtcttttag

SEQ ID NO: 233536 - DNA, 1212 bp, synthetic construct
  misc_feature 1..1212: note = Description of Artificial Sequence: Synthetic coding sequence
  source 1..1212: mol_type = other DNA
atggattcttcagctgcacctactaatgcctcgaactgtactgatgcactggcttatagctcctgctcaccagcacctagtcctggcagctgggtaaacttgtctcacctcgacggcaacctttccgacccttgcggccctaaccgtactgacctaggcggtcgggatagtctctgcccccctaccggatcacctagtatgatcaccgcaatcactattatggctctctatagcatagtgtgcgtcgtgggactgtttggtaattttctggtgatgtacgtcatcgtgcgctatactaaaatgaagacagctacaaatatttacattttcaacttggctctcgccgatgccttggccacatcaactctgccgtttcagagcgtcaactatttaatgggaacttggccattcggaaccatcctgtgcaagattgtcatcagtattgactattataatatgttcactagcatctttactctttgcacaatgagcgtggacaggtacattgctgtttgccaccccgtgaaggccctggattttcggacaccgaggaacgcaaagatcattaatgtatgtaactggatcctgagcagtgcaatcggcctgccagttatgttcatggcaaccacaaagtaccgtcagggttctatcgactgcaccttaacctttagtcaccccacatggtactgggagaacttgctcaagatatgtgtgttcatcttcgctttcattatgcctgtcctcattatcaccgtgtgttacggactgatgattctgaggctgaaaagcgttcgcatgctgagcggatccaaggaaaaggatagaaatctgagacgcattactcgtatggtgctcgtagtcgtcgctgtattcattgtgtgctggactcccatccatatctacgttattattaaagcgttggtgacaattccggaaaccaccttccagactgtgtcttggcacttctgcatcgctttgggttatacaaactcatgcttaaatcccgtcctgtacgcttttcttgacgagaacttcaaacggtgcttccgggagttctgtattcccacttcctcaaacattgaacagcagaatagcacacgcatcaggcagaataccagagaccatcctagcaccgcgaatacggtggatcggaccaatcatcagggccctcccgctaagttcgtggccgatcagctggctgggtcaagctag

SEQ ID NO: 233537 - DNA, 1263 bp, synthetic construct
  misc_feature 1..1263: note = Description of Artificial Sequence: Synthetic coding sequence
  source 1..1263: mol_type = other DNA
atggatagcagcgcagcgcctacaaatgcctctaactgtaccgatgctttggcatattcatcctgttcacctgccccaagtccaggtagctgggtcaacctatcacatctggacgggaatctctcagatccttgcggacccaatagaacggacctgggaggacgggacagcctgtgcccacccaccggctctccctccatgataactgcaattacaattatggcactctattctatagtgtgcgtggtaggtctgttcggcaatttcctcgtcatgtatgtgatcgtgcgatacacaaagatgaagaccgccaccaacatctacatattcaatctggctttggctgacgctctcgctacatccactctgccgtttcaaagcgtcaattacctcatgggtacatggcctttcgggactatactttgtaagatcgtgatttctatcgattactacaacatgtttaccagtatctttaccctatgtaccatgagcgtggaccgatacatagctgtatgtcaccccgtgaaagctcttgacttccgaacccctagaaacgcaaaaatcatcaacgtctgtaactggatccttagcagcgcaatcggattacccgtcatgtttatggctacgactaagtatagacagggctctatcgactgtactcttacattcagccaccccacctggtactgggaaaatctgctgaaaatctgcgtgttcatcttcgcattcataatgcctgtcctcattatcacggtgtgctatggtctgatgatcctgcgcttgaagtcggtgaggatgctgagcggctctaaagaaaaagaccgtaatcttaggcgcatcacgagaatggtcttagtggttgtggccgtgtttattgtctgttggacaccgattcatatatacgttattataaaggcactggtcaccataccagaaactacgtttcagacagtcagctggcacttctgcatcgcactgggttatacgaacagctgtctgaatccagtgctttatgctttcctcgacgagaatttcaagagatgtttccgagaattctgtatccctacatcttctaacattgagcaacaaaacagcactcgaatcagacagaatacaagggatcacccgtctactgctaacacggtggatcggacaaaccaccaggtcgagttaaatctggactgtcactgtgagaatgcaaaaccatggccattatcatacaacgctggacaatcacccttcccttttcccggtcgggtgtag

SEQ ID NO: 233538 - DNA, 1179 bp, synthetic construct
  misc_feature 1..1179: note = Description of Artificial Sequence: Synthetic coding sequence
  source 1..1179: mol_type = other DNA
atggattcgagtgcggctcctactaacgcttccaactgtaccgatgcccttgcgtactcttcctgttcacccgctcctagccctgggagttgggttaatctgagtcacctagacgggaatctgtcagatccgtgtgggcctaatcgaacggacctcggcggtagagactctttatgccccccaactggctcaccctcaatgatcaccgctatcacaattatggccctgtacagtatagtttgtgtggtcggcctgtttggcaattttcttgtgatgtatgtgatcgtgcgctacactaaaatgaagaccgccaccaacatttatatcttcaatctggccctggcggacgccctggccacatcaactctcccctttcagtcagtgaattacctgatgggcacatggcccttcggcactattctctgcaagatcgttattagcatcgactactataatatgttcacgagtatatttactctgtgcaccatgtccgtggaccgttacattgctgtatgccacccagtgaaggccttggacttccgcaccccccgtaacgcaaagattattaatgtgtgtaattggatcctgagttcagccataggactcccagtgatgtttatggctactaccaagtataggcagggctctatagactgcacgctgaccttctctcatccaacttggtactgggaaaacctgttgaagatctgcgttttcatttttgcctttatcatgccagtactgattataacggtttgctatgggctgatgatcctgcgccttaaatctgtgaggatgctctcgggctccaaggagaaagacagaaacttaagaaggattacaaggatggttcttgtcgttgtggcggtctttatcgtgtgctggacccccatccacatttacgtcatcattaaggcactggtaaccattcccgaaactacattccagaccgtcagttggcatttctgtatagcactaggatataccaattcctgcctgaaccctgttctgtacgctttccttgacgaaaatttcaagaggtgttttcgcgagttttgtatccccacctccagtaacattgagcagcagaatagcactagaatacgccagaatacgcgggaccatccgagcacagccaacactgtggacaggaccaaccaccaagttaggagtctttag

SEQ ID NO: 233539 - DNA, 1482 bp, synthetic construct
  misc_feature 1..1482: note = Description of Artificial Sequence: Synthetic coding sequence
  source 1..1482: mol_type = other DNA
atgtgcctgcaccgcagagtaccttctgaagaaacatactccctagacagatttgcccagaatcctcccctattccctccaccctctctcccagctagcgagtccagaatggctcacgccccattgctccaacgatgtggcgctgccagaacaggcttctgtaagaagcagcaggagctgtggcagcgtaggaaggaagccgcagaagcgttgggtactagaaaggtgagcgtcctcctggcaacttcccattcaggcgctcgtccagctgtgtcgacaatggactcctcagccgcaccaaccaatgctagcaattgtactgatgctcttgcatactcgagctgctcccccgcaccttcccctggctcatgggtcaaccttagtcaccttgacggcaacctctctgatccatgtggaccaaatcgcacagacctagggggaagggactccctgtgtcccccaacaggctctccttctatgatcactgcgattacaattatggcgctttatagcattgtgtgtgtggtgggattattcggaaatttcctagtcatgtatgtcattgtgcgctatacgaaaatgaagacggccaccaacatttacatttttaatctggcccttgctgatgcactcgccacctctaccttgccttttcagtctgtgaactatctgatgggaacctggccctttggcacgatcttgtgcaaaattgtaatctcaattgactactacaatatgtttacttctatcttcaccctctgcactatgtctgtggatcggtatatagccgtgtgtcaccccgtcaaggccttggatttcaggacacctaggaatgctaagattataaacgtgtgtaattggatactgtccagtgccatagggctccctgtaatgtttatggccaccaccaagtatcgccagggcagtatcgattgcacccttacttttagtcatcccacctggtactgggaaaacttactcaagatctgcgtgttcatttttgctttcatcatgcccgtgctcattatcactgtgtgttatggactcatgatactgaggttaaagagtgtgaggatgctgtctgggagtaaggaaaaggatcgaaacctcaggcggataacaagaatggttcttgtggtagttgctgttttcatcgtgtgctggaccccaattcacatctacgtgattattaaggcccttgtgactatcccagaaacgacattccagactgtgtcctggcacttttgcatagcgctgggctataccaactcttgcctgaatccggtattgtacgcatttttagacgagaacttcaaaagatgttttagagagttctgcattccgaccagcagcaacatcgaacagcaaaattcaacccgcatcagacagaacacaagagaccaccccagtaccgccaataccgtggaccgtaccaaccaccaactggaaaacctcgaagctgagaccgctcctctgccttag

SEQ ID NO: 233540 - DNA, 1194 bp, synthetic construct
  misc_feature 1..1194: note = Description of Artificial Sequence: Synthetic coding sequence
  source 1..1194: mol_type = other DNA
atggattcatccgcggctccaaccaatgcatcaaactgcacggacgcactcgcatattcttcgtgttccccagccccttcccccggaagttgggtaaacctctcacatttggacggtaatctcagcgacccttgtggacctaaccggacagatttaggcggacgtgattctctgtgcccccctaccggctctccatctatgatcactgctattactataatggcactgtacagcattgtctgcgtggtcggcttgttcggaaactttctggtgatgtacgtgatcgtacgatacactaagatgaagactgcaacaaatatctacatcttcaatctcgccttagctgacgctttggctacgtctactcttccctttcagagtgttaactacttaatggggacgtggccgtttggaaccatactctgcaaaatcgtgatcagcattgattattacaacatgttcacgagtatcttcacactatgtacgatgagcgttgatcgttatattgccgtatgtcatcctgtgaaggctttagattttcggactccacgaaacgccaaaatcatcaacgtgtgcaactggatcctcagcagtgctatagggctccctgttatgttcatggctacaacaaaatacagacaagggtcaatcgactgtacactcacttttagccaccccacctggtactgggaaaatctgctgaagatctgcgtcttcattttcgcctttatcatgcccgtcctgataatcaccgtttgttacggactaatgatcctgaggctaaaaagcgtcagaatgctgtctgggtctaaggagaaggacagaaacctgagaaggatcactaggatggttctggtggtggttgcggtgttcatcgtgtgctggacccccatccatatctatgtgatcataaaggcactggtcactattcccgaaactacttttcagaccgtgtcttggcacttctgcatcgccctgggctatacgaattcatgcctgaacccagttctttacgccttcctggatgagaattttaagcgctgcttccgagagttctgtataccaacctcctcgaatattgaacagcagaacagtacacggattcggcagaacacgagggatcatccatccaccgccaacacagttgatcggactaaccaccaaagggagcggcgacagaaatcagattggtag

SEQ ID NO: 233541 - DNA, 1221 bp, synthetic construct
  misc_feature 1..1221: note = Description of Artificial Sequence: Synthetic coding sequence
  source 1..1221: mol_type = other DNA
atggattcctccgccgcacccactaacgcctctaattgtacggacgctttggcttattcctcttgctctccagcaccctcccccggtagttgggtcaatctcagccaccttgatggtaacctgtcagatccctgcggtcccaataggacagacctcggcggtcgggattccttgtgcccccctaccggtagtcctagtatgatcactgccatcacaataatggctctgtactcaatcgtctgtgtggtggggctgttcgggaattttctcgttatgtacgtaattgttcgctatacaaagatgaagacagccaccaatatatatatattcaatctggccctcgccgacgcactggctacatcaacgctgccatttcaatcagtgaattacctgatgggaacttggcccttcggcacaatactgtgcaagatcgtaatctcaattgattattacaacatgtttacctcaatatttacgctgtgcactatgtctgttgatcggtatatagcagtttgccatccagtaaaagcccttgactttcggacccccagaaatgccaaaatcataaacgtttgcaattggattctgagttcggcaattggtcttccagttatgttcatggccaccaccaagtatcgccaggggtccatagattgcaccctcactttttcccaccccacctggtactgggagaatctgctgaagatttgcgtattcatctttgcattcatcatgcctgtgctgatcattaccgtttgttacggtctgatgatccttagattgaaatcagtgcgaatgctgtcgggcagcaaagagaaagatcggaacttgagaagaattacccgaatggtcctggtggtggtggccgtgtttattgtctgctggacccctatccatatatatgttatcattaaggctctggtgactattccagagacaacgtttcaaactgtgagctggcacttctgcatagcgctggggtacacaaatagctgtctcaatcctgtgctgtacgcatttttagacgagaatttcaaacgttgtttccgcgagttctgcattccaacgagttcaaatattgagcagcaaaattcaacaagaattagacagaacaccagagatcacccctccaccgcaaatacagtagatcgtacaaaccatcaaaaaatagatctctttcagaaaagcagcttattgaactgcgaacacacaaaaggttag

SEQ ID NO: 233542 - DNA, 960 bp, synthetic construct
  misc_feature 1..960: note = Description of Artificial Sequence: Synthetic coding sequence
  source 1..960: mol_type = other DNA
atgatgcgggctaaaagcatttccaccaaggccggaaaacccagcaggtacacgaagatgaagacggctacaaatatttacatttttaatttagcgctggctgatgcgctggctacttccacactgccattccagagcgtcaactatctgatgggaacctggccgtttgggactatactctgcaagatagtgataagcatcgactattataacatgttcacctccatcttcactctgtgcactatgtctgtcgaccggtacatagccgtgtgccacccagtaaaggctcttgacttccgcacccctaggaacgctaaaataatcaacgtgtgtaactggattctgtcaagtgcgatcggtctccctgtcatgtttatggcaaccacgaaatatagacagggatctattgattgtaccctgacatttagtcatcctacatggtactgggaaaatcttctgaagatatgcgtgttcattttcgccttcatcatgcccgttcttatcatcactgtgtgctatggtttgatgattctgcgcctgaaaagtgtacggatgttatccggcagcaaagaaaaggacagaaacttacgacggatcacacgcatggtgctcgtggtagtggccgtttttattgtgtgttggacaccaatacacatctatgtcattattaaggctcttgtgacaattcctgaaactaccttccagacagttagttggcacttttgtattgccctcggttataccaactcctgcctgaaccctgtactttatgcattcctcgatgagaacttcaagaggtgtttccgtgaattttgtatcccaacctcgtctaatatcgagcaacagaactccacacgtattcgccagaacactagagatcatccgtcaacagccaatactgtggatcgcacaaaccaccagttagagaacctggaggccgagacagctcctctaccttag

SEQ ID NO: 233543 - DNA, 1209 bp, synthetic construct
  misc_feature 1..1209: note = Description of Artificial Sequence: Synthetic coding sequence
  source 1..1209: mol_type = other DNA
atggattcctctgccgctcccactaatgcgtccaattgtaccgatgccttagcatacagttcctgtagtcctgccccatcacccggttcgtgggtgaacctcagccacttggatggaaacctgagcgacccctgcggacccaatcgaactgatctgggaggcagggatagcctctgtccacctaccggttctccatctatgattacggccatcacaattatggcactgtattccatcgtatgcgtggttggtttatttggcaacttcttagtcatgtacgtcatcgtgagatacacaaaaatgaagacagccacaaacatttatatcttcaatctcgccctcgcagatgccttggccacctcaacgctgccgttccaaagcgtgaactacctgatgggaacatggccctttggaaccattctatgtaaaattgtgatctcaattgactactataacatgttcacatcaattttcacattgtgtacaatgagcgtggaccggtatatcgccgtctgtcatccagtgaaggcactggattttcgaacacctcgcaacgctaagataataaacgtgtgtaattggatcttgtcgagcgctatagggctcccagtgatgtttatggcaaccacaaaatacagacaagggtctatcgactgcaccctgaccttttctcacccaacctggtattgggagaatctgctcaagatctgcgttttcatcttcgccttcattatgccggttctgatcatcacagtgtgttatggcctgatgatactgaggctcaagtccgtccggatgttgtcaggctctaaggagaaggaccgtaatctgcggcgaatcacgcgcatggtattagtggtagtggcagtgttcattgtctgctggactcccatccacatctacgtgattataaaggctttggtgacaatccctgaaacaactttccaaacagtctcctggcacttctgcatagccttagggtatactaactcatgcctgaatccagttctctatgcttttctggacgagaatttcaaaaggtgtttccgagagttctgcatcccaacaagttctaatatcgagcagcaaaactctacccggatccggcagaacacgcgcgatcacccctccactgcaaacaccgtggatagaacaaaccaccagattagagatcctatctccaacctcccccgagtcagcgtgttctag

SEQ ID NO: 233544 - DNA, 492 bp, synthetic construct
  misc_feature 1..492: note = Description of Artificial Sequence: Synthetic coding sequence
  source 1..492: mol_type = other DNA
atggtccaggccaggacaggattctgcaaaaaacaacaggagctgtggcagagaaggaaagaggcggcagaggctttaggaacccgaaaagtgtctgtactcctggcaacatcgcactccggagctcgtcctgctgtttccactatggattcatccgcagctcctacgaacgcttctaattgcaccgacgccctcgcttatagcagctgctccccggctccatcccccggatcgtgggtaaatttatctcacctggacggcaacctgtctgacccctgcggacctaacagaaccgaccttggcggaagagacagtctgtgtcccccaacgggttcaccttccatgattaccgccatcactattatggccctgtactcaattgtgtgtgtcgttggcctctttggaaattttctggtgatgtatgtaatcgtgcgatacaccaaaatgaagaccgctacaaatatctacatttttaacttggcgctggcatag

SEQ ID NO: 233545 - DNA, 903 bp, synthetic construct
  misc_feature 1..903: note = Description of Artificial Sequence: Synthetic coding sequence
  source 1..903: mol_type = other DNA
atgaaaaccgcaacgaacatctacatcttcaatctggcccttgcagacgccctagccacgtcaactctgcctttccagtccgtgaattatctgatgggaacctggccattcggcacgatcctgtgcaagatagtgatttctatcgattattacaacatgtttacctcaatttttacactttgcacaatgagcgtggaccggtacattgctgtgtgccatcctgtgaaggccttggactttcgaacacccaggaacgctaagatcataaacgtgtgcaactggattttgtcctccgccattggtctcccagtcatgtttatggccacaaccaagtataggcaggggtcgattgattgtacactgaccttctctcacccaacctggtactgggaaaatctgctgaagatctgtgtgttcattttcgcctttatcatgcccgtactcattatcaccgtgtgttatggactcatgattctcaggctcaaatctgtgcgtatgcttagcggctctaaggagaaagatcgaaatctgaggaggataacacgcatggtgctagttgtcgtcgccgtgtttatagtgtgctggacccctatacacatctatgtgattataaaggcattggttacgattccggagactaccttccaaaccgtgagctggcacttctgcattgccctgggctatactaactcctgtcttaaccccgtgttatatgctttcctggatgaaaactttaagcggtgttttcgcgaattctgcatccctacttcaagcaacatcgagcaacaaaattctacacggatacgccagaacacccgagaccacccttcaaccgctaacaccgttgaccgcaccaatcaccagttagaaaatcttgaggccgagacagcacctctgccatag

SEQ ID NO: 233546 - DNA, 903 bp, synthetic construct
  misc_feature 1..903: note = Description of Artificial Sequence: Synthetic coding sequence
  source 1..903: mol_type = other DNA
atgaagactgcgacaaacatatatatctttaaccttgcactggctgatgctttagcaaccagtactttaccattccagagcgtaaactacctgatgggtacatggccattcggcactatcctgtgcaagatcgtcatctccatcgattattataacatgtttacttcgatttttacactgtgtactatgtccgtggaccgatacattgctgtgtgccatcccgtcaaggccctcgacttccggactcccaggaacgcaaagataataaacgtgtgcaactggatcttgtccagcgccataggactgccggtcatgtttatggctaccacgaagtaccgccagggcagcatcgactgcacgctgacttttagccatcccacctggtattgggaaaatctcctgaaaatctgcgtgttcatctttgcctttatcatgcccgtcctcattattaccgtgtgctatggcttgatgatactgaggctcaaaagcgtccgcatgctgtccggcagtaaggaaaaagaccgaaatctgcgtagaatcacacggatggtgctcgtggttgtggccgtcttcatcgtctgctggacaccaattcacatctacgtcatcattaaggccctggttacgatccccgaaactacgttccagacagtgtcctggcacttctgcattgccctcggttatacaaactcttgtctcaaccccgtcctttatgcatttctggatgaaaattttaagcggtgcttcagagagttctgcatacctacctcctctaatatagaacagcagaattctacccggattcggcagaatacaagggaccaccctagtactgctaataccgtggaccggaccaatcatcaattggaaaatcttgaggcagagaccgcaccccttccctag

SEQ ID NO: 233547 - DNA, 903 bp, synthetic construct
  misc_feature 1..903: note = Description of Artificial Sequence: Synthetic coding sequence
  source 1..903: mol_type = other DNA
atgaagacggccacgaacatttacatcttcaacctggctctcgctgacgcactggcaacttcgacactgcccttccagagtgtgaactatcttatggggacatggccctttgggactatactgtgtaaaattgtcatctctatagactactataatatgtttacaagtattttcaccctgtgcaccatgagtgttgacaggtatatcgctgtttgtcaccctgtaaaagccctggactttagaacgccaaggaatgccaagatcatcaacgtatgcaactggattctcagcagcgctattggactaccggtgatgtttatggcaacgacaaagtaccgacagggctccatcgactgtactctgacctttagccatcctacatggtattgggaaaatctactcaagatctgcgtttttatctttgcttttatcatgccagtcctgataattacggtgtgttacgggctgatgatcttacgtctgaagtctgttaggatgctatccggttccaaagagaaagatcggaacttaaggagaatcacacgtatggtgctggtggtggttgcagtcttcattgtgtgttggaccccaatccacatttacgtgatcatcaaagcgctggtgacaattcctgagacaacattccagaccgtgtcttggcacttctgtattgcgcttggctacactaattcatgtttgaaccccgttctctacgcctttctcgacgagaatttcaagaggtgtttcagagaattctgcattcctacctctagcaacatcgagcagcaaaattccacccgcattagacagaatacaagagatcacccgtccacagccaatactgttgaccgcacgaaccatcagctggagaatctggaggccgagaccgctcctttgccatag

SEQ ID NO: 233548 - DNA, 1209 bp, synthetic construct
  misc_feature 1..1209: note = Description of Artificial Sequence: Synthetic coding sequence
  source 1..1209: mol_type = other DNA
atggattcttcagcagctccaaccaacgcttccaactgtactgacgcgctcgcgtatagctcttgcagccctgcgccttctccgggaagctgggtcaacctgagtcacctcgacgggaatctgtccgatccttgcgggcctaatcgaaccgacttgggagggagggatagtctatgtccccctacaggtagcccttccatgatcaccgccataacaatcatggccctgtactcaatagtatgtgtagtcgggctgtttggcaacttccttgtgatgtacgtgatagtccgctataccaaaatgaagacagctacaaacatctacatcttcaaccttgctttagctgacgctttagcgactagcacgctgcccttccagtccgtgaattacttgatggggacgtggcctttcgggacaatactctgtaagatagttatcagcatcgactattataacatgtttacttcaatctttactctgtgcactatgtccgtcgatcggtatatagcggtctgtcatcctgttaaggccttggactttagaacaccaaggaacgcgaaaatcatcaatgtttgcaactggatcctctcctccgccatagggctgcccgtgatgtttatggcaactaccaaataccgccaggggagcatcgattgcacattgaccttcagccatcccacctggtactgggaaaacctgttgaaaatctgcgttttcattttcgctttcatcatgcctgtcctaattataaccgtgtgttacggcctcatgattcttcgcctcaagtccgtccgcatgctgtcaggcagtaaagaaaaggataggaaccttcggagaattaccaggatggttctagtagtggtggctgtcttcatcgtttgctggacaccgattcatatctatgttatcattaaggctcttgtgactatccctgagacgacatttcagacagtctcctggcacttttgcatcgcccttggatatacgaacagttgcctcaatccagtcctgtacgccttcctggacgagaactttaagcggtgcttccgcgaattttgtattcctacatcttcaaatattgaacagcagaactcaacccggatccgacagaacactagagaccatcctagcaccgctaacaccgtggacagaactaatcaccaaataagagatccaatcagtaacctccctagagttagcgtgttttag

SEQ ID NO: 233549 - DNA, 561 bp, synthetic construct
  misc_feature 1..561: note = Description of Artificial Sequence: Synthetic coding sequence
  source 1..561: mol_type = other DNA
atggactccagcgctgcgccaaccaatgcatccaactgtactgacgcccttgcctattcgtcctgctccccagctccgagccctggaagctgggtgaacctgtcccacctggatggtaatttgagtgatccatgcgggccaaatagaactgatttgggaggacgagactcattgtgccccccaacagggtcaccaagcatgatcaccgccattaccatcatggcactttattctatcgtgtgtgtagttggcctgttcggcaatttcttagtgatgtatgtgattgtgaggttccacaggctctatacgaatatattgagctccaatcttgtgctgggcaaacccgctgaggatctgtgctttcacttgcgcctccattacgcatctgctcatcattacagggtgctctggactgacgatctggctccccaagaatgcccgcacgctctgtggctgcagcgtaaagggcaggagtctagtaaagatcaccaggacggtgctggtggagggggatgtgtacatcgccttctggactctcactctcatttacgtcaccattag

SEQ ID NO: 233550 - DNA, 1170 bp, synthetic construct
  misc_feature 1..1170: note = Description of Artificial Sequence: Synthetic coding sequence
  source 1..1170: mol_type = other DNA
atggactcatccgcagccccaacgaatgcatcaaattgcactgacgcgctggcatatagcagctgctccccggcaccctcccctgggtcatgggtgaatctctcccacttagacggaaacctcagtgatccatgcgggcctaaccgcactgatctgggcggaagggattccctctgtccacctacaggctctccatcgatgataacagccatcaccatcatggccctgtatagcatcgtatgcgtggtgggactcttcggcaactttctggtgatgtatgttatcgtgcgatacacaaaaatgaaaaccgccacaaatatctatatctttaatctcgctctggctgacgccctggccacttccactctgccattccaaagtgtcaactacctgatgggcacctggccattcggcaccatcctctgtaaaatcgtcatttccatagactactataatatgtttacttcaatctttactctatgtacaatgtctgtggatcggtatatcgccgtctgccaccctgtcaaagccctggactttcggactccgaggaatgcgaagatcatcaacgtctgtaactggattctctcatccgctatagggctccccgtgatgtttatggccacaaccaagtaccggcaaggtagtatcgactgcaccttgacttttagccaccctacctggtattgggaaaacctgttgaagatctgcgtgtttatctttgcgtttattatgcctgttctgatcataactgtgtgctacggcctgatgattcttcggctcaaaagtgttcggatgctgagtggatctaaagaaaaagaccgcaacctcaggcggattacacggatggtgctcgtggtcgtggcagtcttcatagtgtgttggacacctattcatatttacgtcatcattaaagcacttgttacgatcccagagacaacctttcagactgtgagctggcatttttgcatcgcgttaggctatactaactcatgcctcaaccccgtgttgtatgcattcctggatgaaaactttaaacggtgctttagggagttctgtatccccacctcctccaatatcgagcagcagaatagcactcgaatccgtcagaatactcgggatcacccgtcgaccgccaatacagtcgatcgcactaaccatcaaagctag

SEQ ID NO: 233551 - DNA, 1095 bp, synthetic construct
  misc_feature 1..1095: note = Description of Artificial Sequence: Synthetic coding sequence
  source 1..1095: mol_type = other DNA
atggcacaacaatggtcattgcagagactcgcaggtcgccatcctcaagactcgtacgaggacagcacacagtcctctatcttcacttacacaaactccaacagcacaagaggcccattcgagggccctaattatcacattgcacctcgctgggtctaccacctgaccagtgtgtggatgatctttgtggtcaccgccagtgtgtttaccaacgggctcgtccttgcagccactatgaaatttaaaaaactgcgacatcctctcaattggatcctggtgaatttggcagtggctgacttggcggagaccgttattgcctctactataagcatcgtcaatcaggtgagtggctacttcgtactggggcacccgatgtgcgtactggaagggtacacagtcagtctttgcggcattacaggactttggagtcttgcaattatttcatgggagaggtggttagtagtgtgtaaaccgttcgggaacgtgagattcgacgccaaattagccatcgtgggaattgcgttcagctggatctggtccgcagtgtggaccgcacccccaatttttggctggagtcgatattggcctcacgggctgaagacctcctgcggccctgatgtgttcagtgggtcctcttaccctggcgtgcagtcttatatgattgtcttgatggtgacatgttgcatcatacccctggccatcatcatgttgtgttacctgcaagtctggctggctattagagccgtggcgaaacaacaaaaggagtctgaaagcactcagaaggctgaaaaggaggtgactcgtatggtggtagttatgattttcgcgtactgcgtctgctggggcccatataccttctttgcttgctttgctgccgctaatcctggctatgctttccatcctctgatggccgctctgccagcctattttgctaaaagcgcaacaatttacaatcccgtcatctacgtatttatgaatagacagtttcgcaattgtatcctgcagttgtttggaaaaaaagtcgacgatggatctgaactgtcctccgcttcgaagactgaagtttccagcgtctcctcagtatcaccagcctag

SEQ ID NO: 233552 - DNA, 1095 bp, synthetic construct
  misc_feature 1..1095: note = Description of Artificial Sequence: Synthetic coding sequence
  source 1..1095: mol_type = other DNA
atggcccagcagtggtcactgcagcggcttgccggacggcaccctcaggactcctacgaagactccactcagtcttctattttcacatacactaactctaattcaactcggggtcctttcgaaggccctaactaccacatagcaccgcgatgggtgtatcacttgaccagtgtgtggatgatttttgtggtgattgctagcgttttcacgaatggtctagtgctggcggctaccatgaaatttaagaaactgaggcacccgctaaactggatcctcgtgaacctagccgttgctgatttggcagaaaccgtcatcgctagcacaatctctgtcgtgaatcaagtctacggctattttgtcctgggtcacccaatgtgcgtcttagaaggatatacagtgagtctgtgtgggataacagggctgtggtcccttgctataatctcttgggagaggtggatggtggtgtgtaaacctttcggcaacgtacgctttgacgcaaaactggctatagtgggtatcgcattttcctggatttgggcagccgtctggactgcgcctcccatcttcggctggtcacggtattggccgcacggccttaagacatcctgtggccctgatgtgttttccggaagcagttaccctggtgttcagtcatatatgattgtactgatggtaacttgctgtattactcctctgtcgatcattgttctttgctacctacaagtgtggctcgctatcagagcagtagcgaaacagcaaaaagagtcggaaagcactcagaaagccgagaaagaggtgacccggatggtagtcgtgatggttttggctttttgtttttgttggggaccttatgctttttttgcttgtttcgcagccgcaaaccccggttacccgttccaccctttaatggccgctctgccagccttttttgccaagtcagccaccatctataacccggtgatttacgtgttcatgaatcggcagttccgcaattgtatcctgcagcttttcggaaaaaaggtagatgacgggagtgagttgagctctgcctccaagactgaggtgtcaagtgtgtcatccgtttctcctgcctag

SEQ ID NO: 233553 - DNA, 1047 bp, synthetic construct
  misc_feature 1..1047: note = Description of Artificial Sequence: Synthetic coding sequence
  source 1..1047: mol_type = other DNA
atgcggaagatgagtgaagaggaattttatttgttcaaaaacatcagttccgtgggcccttgggatgggccacagtaccacatagcacccgtctgggcgttttacctacaggctgcatttatgggaacagtgtttctgatcggcttccctctgaatgctatggttctggttgcaacacttaggtacaaaaagctgcgccagccccttaactatatactggttaacgtgtccttcgggggttttttgctctgtattttttccgtttttcctgtctttgtggcatcctgcaatggctacttcgtgttcggacgccacgtgtgcgccctggaaggtttcctggggaccgtagccggactagtgacgggctggagtttagccttcctggctttcgagcggtacattgtgatctgtaagccatttggcaactttaggttctccagtaagcacgccctgaccgtggtgttggcaacgtggacaatcggcatcggcgtcagcatccctcccttcttcggttggagtcggtttattcctgaggggcttcaatgcagttgcggtcccgactggtataccgtgggtaccaagtatcgatctgagagttacacttggttcctcttcatcttctgcttcattgtcccactgagcctgatttgttttagctacactcagctgttgcgggctctcaaggctgtcgccgcacagcagcaggaatcagccaccacacagaaggcagagcgtgaggtgagtcgcatggtagtggtgatggtcggtagcttctgtgtgtgttatgtgccttacgccgctttcgccatgtacatggtcaataaccgcaatcacggtttggacctgaggctggtgactattccatccttcttcagtaaatctgcctgcatctacaaccctattatctactgttttatgaataaacaattccaggcctgcatcatgaagatggtttgtgggaaggcaatgaccgatgagagcgacacctgttcgtctcagaaaaccgaagtctctactgtatctagtactcaagtggggccaaactag

SEQ ID NO: 233554 - DNA, 972 bp, synthetic construct
  misc_feature 1..972: note = Description of Artificial Sequence: Synthetic coding sequence
  source 1..972: mol_type = other DNA
atgtattccgggaatcgctctgggggacacggctactgggatggtggaggggcagccggtgcagaaggcccagcacctgccggaaccctgtccccagccccattgttctcccccggaacatacgaacgccttgctctcctgctgggaagcatcggcctgcttggcgtagggaacaacctcctcgtcctggttctatactataagtttcagagactgcgaactccaacacaccttctgcttgtgaatatctccctcagtgatttgctggtttctctttttggagttaccttcacttttgtgtcatgtcttcggaatgggtgggtctgggacacagtgggctgtgtttgggatggatttagcggttctctgtttggctggatatcccaactgcaggcagcaacacgcgaagctcgcgcttctatgggccctgttcagcaggggaccatctgcatgcagcttcggtgcgtcgaggatttgcagaccatccaagtaattaagattctgaagtatgaaaaaaagctggccaaaatgtgctttctgatgattttcacctttctcgtgtgttggatgccctacatcgtcatatgttttcttgtggtgaacggtcacgggcaccttgtaacacccactatcagcatagtttcttacctgttcgccaagagcaacaccgtgtacaacccggtgatttatgtctttatgatacgtaagtttcgcaggagtttgctacagctgctctgtctgaggttactgcggtgccagagaccagccaaagatctcccggctgccggaagcgagatgcagatccggccaatcgtgatgtcacagaaggacggagaccgacccaagaaaaaggtgacttttaattcctcttccattatctttattattacttctgatgagtccctgtctgtcgacgacagcgacaagactaacggatctaaagttgacgtcatacaagtcagaccgctttag

SEQ ID NO: 233555 - DNA, 1209 bp, synthetic construct
  misc_feature 1..1209: note = Description of Artificial Sequence: Synthetic coding sequence
  source 1..1209: mol_type = other DNA
atgtattcaggtaatcgaagcgggggtcatgggtattgggacggaggcggtgccgcaggtgctgaggggcctgctcccgctggcactctctcccccgctccactgttttctcccggtacttacgagcggctggctctcttgctcggtagtatcggcctcttgggcgtgggcaacaatctcctggtgctggtattatattataagttccagcgcctccgcacacccacacacttgttacttgtaaacatttccctaagtgacctgctggtttctttatttggcgtgaccttcaccttcgtctcttgtcttagaaacggatgggtctgggatacggtagggtgcgtgtgggatgggttctcaggatctctcttcgggatcgtatcaattgccactctgactgtgctcgcatatgaacgttacatccgggtggttcatgcacgggtcatcaacttctcatgggcctggagagcgatcacctacatctggttgtatagcctcgcatgggccggagctccactgctggggtggaaccgctatattctcgacgtgcacgggctcggatgcaccgtggactggaagtccaaggatgctaacgactctagctttgtactgtttctgtttctgggatgtcttgtagtgccactgggagtgattgcacactgttatgggcacatcctttatagcattcggatgttgcgctgcgtggaagacctgcagactatacaggtcataaagatcctgaagtacgagaagaagctagccaagatgtgcttcctcatgatttttacatttctggtctgttggatgccatacatcgttatctgtttcttggtggtcaatggacacggacatctggtgacacccacaataagcatcgtgagctatctattcgccaagtcaaacactgtctacaaccctgtgatttatgtgtttatgatccggaaatttcggaggagcttactgcagctgctgtgtctgaggcttctccgatgccagaggcccgcaaaggatcttcccgcagcaggttcagagatgcagatccggcctatcgtgatgtcccagaaggatggagaccggccaaaaaagaaggtgacttttaactctagctctatcatattcattattacatccgacgagtcccttagtgtcgacgattctgataagactaatggatccaaagtcgacgttatccaggtacgacccctgtag

SEQ ID NO: 233556 - DNA, 2886 bp, synthetic construct
  misc_feature 1..2886: note = Description of Artificial Sequence: Synthetic coding sequence
  source 1..2886: mol_type = other DNA
atgtggcgcctgagaagagctgccgtggcatgtgaagtttgccagagcctggttaagcatagcagtgggatcaaaggaagcctgcctttacagaaactgcacctcgtttcccggtcaatctatcatagccatcaccctacactgaagttacagcgccctcagctgagaacctcctttcagcagttctccagcctgacaaacctgccattacgtaaactgaagtttagcccgatcaagtatgggtatcagccccgacgaaacttttggccagccaggctggccacacgcctcctaaaacttagatacttaattctgggctcagccgtgggtggaggctacactgcaaagaagacgtttgatcagtggaaagatatgatccccgacttaagcgaatacaagtggattgtgcctgacatcgtgtgggagatagatgaatacatagactttggctcgcccgaagagacagctttccgcgcaacggacagaggcagtgaatctgacaagcacttcaggaaaggactgttaggcgaattgatcctcctgcagcagcagattcaggagcacgaagaggaagccaggcgtgccgctggacagtactctacttcctacgcgcagcagaagagaaaggtttccgataaagagaagatagatcaactgcaggaggagttgctgcatactcaattgaagtaccaaaggatcctcgagcgtctagagaaggaaaacaaagagttacgtaagctcgtgctgcagaaagacgataagggaatccaccatcgcaagctgaagaaatcgctgatagacatgtattctgaagtgttggatgttctgagcgactacgacgcctcttataacacacaggaccatttaccccgtgtggtagtggtcggggatcaaagcgccggtaaaacgagtgtgctggagatgatcgcccaagcccgtattttcccgagaggtagcggtgagatgatgacccgctcccccgtgaaagtgacgctatcggaaggtcctcatcacgtcgcactgtttaaggactcttctcgagagttcgatcttactaaggaggaagatctcgccgctcttcgccacgaaatcgagcttaggatgcgcaagaacgtgaaagagggctgtaccgtctctccagaaacaatttccctgaacgtcaagggtcccggtttgcaacggatggttctggtggatctgcctggagtaattaatacagtgacgtctgggatggcacctgacactaaggagaccatatttagtatttctaaggcctatatgcagaacccaaacgcgataatcctctgtatccaggacggcagtgtcgatgcggagaggagcatcgttacagatctcgtgagtcagatggacccccatggtagacggaccattttcgtactcaccaaagtcgacctggctgaaaagaatgtggcctcaccatctcgcatccagcagatcatcgaaggaaaactgtttcctatgaaagcgctgggatatttcgcagtggttaccggcaagggaaactccagtgagtctattgaggctattcgtgaatatgaggaagaattttttcagaactcgaagcttctgaagacgagtatgcttaaagctcatcaggttacaactcgtaacctcagtctagccgtgtcagactgtttctggaagatggttagagagtctgttgagcagcaggcagactctttcaaggccacaagattcaacctggagacggagtggaaaaataattatcccagactgagagaattggatagaaatgaactgtttgagaaagctaaaaatgaaattttagacgaggtgatcagcctgtcacaggtaacacctaaacactgggaagagatcctacagcaatcactgtgggaaagagtgtccacccatgtgattgagaatatctacctgcccgctgcacagactatgaatagcggtaccttcaatacaacggtggatatcaagttgaagcagtggactgataagcagctccccaacaaagccgttgaggtggcctgggagactctacaggaggaattttctcgttttatgaccgaacctaaaggtaaggaacacgacgatatttttgataaactgaaggaagccgtgaaggaggagagcattaagagacacaagtggaacgatttcgcggaagacagtctgcgtgtgattcagcataatgctctggaggaccgaagcatctccgataagcagcagtgggacgcagctatttactttatggaagaggcgttgcaggcccgactgaaagacaccgaaaatgccatcgaaaacatggtgggcccagattggaaaaagcgttggctatactggaagaatcgcacacaagaacagtgtgttcacaacgaaactaagaatgagctggagaaaatgctgaaatgtaacgaagagcatcccgcttacctagcatccgatgaaattacgacagtgcgaaagaaccttgagagtagaggcgtggaggtcgacccatcgttaattaaggacacttggcatcaggtgtatagaagacactttttgaaaaccgctttgaaccattgtaatctctgccgcaggggtttctattactaccagagacacttcgtggattctgaactggagtgtaatgacgtggtgttgttttggagaatacagcgaatgttggctatcaccgccaatactctgaggcagcagctgactaacaccgaggtgcgcaggctcgaaaagaatgtgaaagaagtgcttgaagattttgcagaggacggagaaaagaagatcaagctgttgacaggtaagcgcgtgcagctggctgaagacctcaaaaaggtccgagaaatccaggagaaactcgatgcttttatcgaagcactacaccaggaaaaatag

SEQ ID NO: 233557 - DNA, 3048 bp, synthetic construct
  misc_feature 1..3048: note = Description of Artificial Sequence: Synthetic coding sequence
  source 1..3048: mol_type = other DNA
atgtggaggctgcgcagggccgcagtggcctgcgaagtgtgccagtcattagtcaaacacagctcgggaatcaaaggctcactgccacttcagaagttgcaccttgtgtctaggtctatctaccattcacatcacccgacactgaaattgcagagacctcagcttagaacctctttccagcagttctcttctttgacgaacttaccactgaggaagctgaagttctcacctatcaaatacggataccagccacggagaaacttctggcccgcacgtctggctacacggctcttgaaactgcggtacctgatccttggcagtgcagtgggtggtgggtacacggcaaaaaagaccttcgaccaatggaaggacatgatcccggatttgtctgagtacaaatggatcgttccagacatcgtctgggaaatcgatgaatacattgatttcgaaaagatccgaaaagcactgccatcctccgaagatcttgtgaaacttgccccagacttcgataaaatcgtggaaagcctctctctactgaaggacttcttcacgagcggccacaagctcgtttctgaggttataggtgcttccgatttactgctgcttctggggtctcccgaagaaacagccttcagagcaactgacaggggttcagagtctgataaacatttccgaaaggggctgctgggcgaattgattctccttcagcagcagattcaggagcacgaagaagaggcgaggcgcgcagcgggacaatactccacttcttacgcccaacagaaaagaaaggtgtccgacaaagagaaaattgaccagcttcaggaagagcttctccacacccagttaaagtatcaaagaatcctggagaggctggaaaaagagaataaggaactgcgcaaattggtcttacagaaggatgataaagggattcaccaccgtaaacttaagaaaagcttgatcgatatgtactcagaggtcctggatgtgctgagtgattacgacgcctcttacaacacccaagatcaccttcccagggtcgtggtggttggcgatcaaagtgcagggaaaacatcggtgttagagatgattgctcaagccaggatcttccctcggggaagtggtgagatgatgacccgaagtccggtcaaggttaccctctctgaaggtccgcaccacgtcgccttgtttaaggattccagccgggaatttgacctgaccaaggaggaggatctggctgccctgcggcatgagatagagctacgcatgaggaagaatgtgaaagaaggctgcacagtttctccagagactatctccctgaatgtgaagggccctgggcttcagaggatggtgttggtggatctgccgggtgtaataaacactgtgaccagtggcatggcccctgataccaaggagacaatcttctctatatccaaggcgtatatgcagaaccccaacgctataatcctgtgcatccaagatggctctgtcgacgcggaaagatccattgtcaccgatctggtgagtcagatggatcctcacgggcgaaggactattttcgtcttgactaaggtggatttagcggagaagaacgtggcgagccctagccggattcagcagatcatcgaaggtaaattattcccaatgaaagcactcgggtattttgcagtagttaccgggaaaggcaattcttccgaatccatcgaagccattcgagagtacgaggaggagttttttcagaacagcaagctgctgaagacaagcatgttgaaagctcatcaggtaaccacgcggaatttgtctctcgccgtgtccgattgcttctggaagatggtacgagaaagtgtcgaacagcaggcagattcatttaaggctacacgtttcaacttggagactgagtggaagaacaactacccccgattaagggagttggaccgcaacgagctgtttgaaaaagcaaaaaatgagatccttgacgaggtaatttcactctcccaggtcacaccaaagcattgggaggagatcctgcaacaatccctgtgggagagggtcagcacacatgtaattgaaaatatttacctgcccgcagcacagactatgaactcgggaaccttcaacactaccgtggatatcaagctgaagcagtggacggacaaacaactgccgaataaggcagttgaagtcgcctgggagacattgcaggaagaattctctaggtttatgaccgagcctaagggcaaagagcacgacgatatttttgataagttgaaagaggcggttaaagaggagagcattaagagacacaaatggaatgattttgccgaggactccttacgcgtgatccagcacaatgccctcgaggatcgaagtatctctgataaacaacagtgggatgcagcaatatattttatggaggaggcattgcaagcacgcctgaaggacacggagaacgccattgagaatatggtgggtcctgactggaaaaagcggtggctgtactggaaaaatcgtactcaagaacagtgcgttcacaacgaaaccaagaatgaactggaaaagatgctgaagtgtaacgaagaacatccagcgtacctcgcgagcgacgagatcactacagtgcgcaagaacctggagtctcgtggggtggaggttgatccttccctgataaaagatacctggcatcaggtgtatagaagacacttcctcaaaactgctctcaatcattgcaacctttgtcgtcggggattttactattaccaacggcactttgttgattccgaactggagtgcaacgatgtagtgctgttttggcgaatacagcgcatgctggctatcactgctaatactctgcgccaacagctgaccaacaccgaggtgcggaggttggaaaagaacgtgaaggaagtcctggaagattttgccgaggacggagagaaaaaaattaaactgcttactggcaagagggtgcaactcgcggaggacctgaagaaggtccgggaaattcaggaaaaactcgacgcgttcatcgaggctctacaccaggagaagtag

SEQ ID NO: 233558 - DNA, 2940 bp, synthetic construct
  misc_feature 1..2940: note = Description of Artificial Sequence: Synthetic coding sequence
  source 1..2940: mol_type = other DNA
atgtggaggctgcgtcgggcagctgtggcttgcgaggtgtgtcagtccctggtcaaacatagcagtggaatcaaaggtagcctccctctccaaaagctgcacctggtctcccgaagtatttatcacagccatcaccccaccctcaagttacagcggcctcagttgcgcactagctttcaacaattttcttcgctgacaaacctgccactcaggaaattgaaattctctccaataaaatacggttatcagccccgacgcaacttttggccagcacgcctcgctacccggctactcaaattgagatatctcattctggggagtgccgttgggggtggttatacggccaaaaaaaccttcgatcagtggaaggatatgataccggacctctcggagtataagtggatcgtgccagacattgtgtgggagatcgacgagtacattgattttggtcacaaacttgtgtccgaagttataggagcttcagacctgcttctgctgttaggttcacctgaagaaactgcattccgcgcaactgaccgcggaagcgagagtgacaagcactttagaaagggcctgctgggcgagctaatcttgttacagcaacagatccaggaacacgaagaagaagcacgccgagccgcaggccaatacagcaccagctacgcgcagcagaaacgtaaggtttctgacaaggagaagattgaccagctgcaggaggaacttctacatactcagctgaagtaccagcgaatcctggaacggttggaaaaagagaataaggaacttaggaagctcgtattgcagaaagatgacaaaggaatacatcaccggaagctcaagaaatcattgatagacatgtattccgaggtcttggacgtcctgtcagactatgatgcaagctacaacacccaggaccacctccctcgcgtggtggtcgtgggggaccagtccgcaggcaagacatctgtgctggagatgattgcccaggcaaggatcttccccaggggctcaggcgagatgatgacacgcagcccggttaaggtgactcttagcgaaggccctcatcatgtggccctgtttaaggactcctccagagaatttgacctgacgaaggaagaagacttggcggcactgcggcacgagatcgagcttagaatgcggaagaatgtgaaggagggctgtacggtctcccctgaaactatatctcttaatgtcaaagggcctggtctccagcgaatggtcttagtcgatctgcccggtgtcataaacactgtgacaagcggcatggcgccagacactaaagaaaccatcttcagcataagcaaagcttacatgcagaaccccaacgcaattatactttgtattcaagatggttccgtcgacgctgaacgttctatcgtgacagacctcgtgagccaaatggatccacacggtaggagaacgatatttgttttgaccaaagtagacctggcagagaaaaatgtcgcaagcccctcacggatccagcagatcatagaaggaaagctgttccccatgaaagcattgggctacttcgctgtcgttacaggaaagggcaatagcagtgagtcaatagaggctattcgcgagtatgaagaagaattcttccagaattcaaagttactgaagactagcatgctgaaggcacatcaggttaccactcggaatctctccctggctgtctccgactgtttctggaagatggtacgagagtctgtggagcagcaggcagattccttcaaagccactcgattcaatttggaaactgaatggaaaaacaattatcctcgactcagggagctcgaccgcaacgagctctttgagaaggccaagaatgagatactggatgaggtaatatcactgtctcaagtgacacctaagcattgggaggagatcctacaacaatctttgtgggaacgggtgagtacccatgttatcgaaaacatttacctgcccgctgctcagactatgaattcgggtacttttaatactaccgtagatattaagttgaaacagtggaccgataaacagttgccaaacaaggccgtggaggttgcttgggagactctacaggaagagtttagccggttcatgaccgagcctaagggtaaggagcacgacgatatctttgataagctgaaggaagccgtgaaggaggagtccattaaaagacacaagtggaatgacttcgctgaggacagcttaagagtgatccaacacaatgcgctggaagatcgctccatcagtgataagcagcaatgggacgctgctatctattttatggaagaggcgttgcaggcgagactgaaagacactgaaaacgccatcgaaaatatggtagggcctgactggaagaagcggtggctctactggaagaacagaactcaggagcaatgcgtccataatgaaactaaaaacgagctggagaagatgttgaagtgtaacgaggaacatcctgcctatttagcttccgacgaaatcactaccgtgcggaagaatctggaatctcgtggggtagaggtagatccatccctgatcaaggacacgtggcaccaggtttaccgccgacatttccttaagaccgccctgaaccattgcaatctgtgccgcagagggttctattactatcagaggcacttcgttgattccgagctcgagtgcaatgacgtagtactcttctggaggattcagcggatgctagccattacagccaacacattgagacagcaacttacgaataccgaagtgcgcaggcttgagaagaacgtcaaggaggtactcgaggacttcgcagaggatggagagaagaagatcaaactcctaaccggaaaacgcgtgcagctagccgaggatcttaagaaggtccgagagatccaggagaagcttgacgcattcatcgaggcccttcaccaggaaaaatag

SEQ ID NO: 233559 - DNA, 2937 bp, synthetic construct
  misc_feature 1..2937: note = Description of Artificial Sequence: Synthetic coding sequence
  source 1..2937: mol_type = other DNA
atgtggcggctgcggagagccgctgtcgcctgcgaggtctgccagtccctcgttaaacatagttccggaatcaagggcagtttgcccttacagaaactgcatctggtgagcaggtcaatatatcactctcatcatccaacccttaagctccagcgtccgcagctgcggactagcttccaacagttctccagcctgactaatttgccactccgcaaattgaagttctctccaattaagtatggctaccaacctagacgcaacttctggcccgctaggcttgcgacacgcctgttgaagctgcgctacctgatcctgggttcagctgtgggaggaggctacaccgccaagaaaacatttgatcaatggaaagatatgatccccgacctcagcgagtacaaatggattgtccccgatatcgtgtgggaaatcgacgagtatattgattttgagaaaattcggaaagccttgccatctagcgaggacctggtgaaattagcacccgactttgacaaaatcgtggagagcctgagcctgttgaaggacttcttcactagtggccacaagttagtatcggaagtcataggagcttcggaccttctcttattgctggggagcccagaagaaacggcgttccgtgctaccgatcggggttctgaaagtgataagcacttcagaaaagtgagtgataaggagaagatagaccagttgcaggaggagctgctgcacacccagctgaaatatcagaggattctggagcgccttgagaaagagaacaaagaactcagaaagcttgtactccagaaagacgataagggcattcaccacagaaaactgaagaagagcctgatcgacatgtattcggaggttctcgacgtcctgtccgactacgatgcgagctataacacccaggaccatctccccagagtcgttgttgttggagatcaatcagcaggaaagacttcagtcctcgagatgattgcccaggccagaatttttccacgcggttcaggcgagatgatgacacgatcccctgtaaaagttacgctctccgagggaccccaccacgtcgccctgtttaaggacagcagccgcgagtttgacctgacaaaagaggaggacctggccgcactgagacacgaaattgagttgaggatgcgaaagaatgtgaaggaggggtgtacggtttctccggaaacaatttctctgaatgttaaaggccctggcctccagcgaatggtcctggtggatttgccgggagtgatcaacaccgtgacgagcggcatggctccagacaccaaagaaactattttcagcatctctaaggcatatatgcagaaccccaacgcgattatcctctgtattcaggatggttcagtcgacgccgaacggagcatcgtgacggatctcgtcagtcagatggatccccatggacgtaggacaatcttcgttctgacaaaagtggatctagcggaaaaaaatgtggcgtcccccagtcgtatccagcagattatcgagggaaagctgtttcccatgaaggccctgggttatttcgccgttgtaaccggcaagggaaattcttcggagtctattgaggctatacgcgaatacgaggaagagttcttccagaacagcaaactcctcaaaacaagcatgctgaaagctcaccaagtcactacccggaatctgtcgctcgcggtgagtgattgtttttggaagatggtgcgggagtccgtagagcaacaggcagactcctttaaggcaacaagattcaatctggagactgagtggaagaataattacccacggttgagagaacttgataggaatgagctgttcgaaaaggcgaagaatgaaatccttgacgaagtaattagcttgtctcaggtgaccccaaagcactgggaagagatcttacagcagtctctgtgggagagggtttccacgcatgtgatcgaaaatatttatctcccagcggcacagacaatgaattctggtacgttcaacacaactgtggacatcaagttgaagcaatggacagataagcagctgcccaataaggccgtggaagtcgcgtgggagactcttcaggaagaattttcgaggttcatgaccgagcctaaggggaaagaacatgatgacatcttcgataagttgaaggaggccgtcaaggaggagtctatcaaaaggcacaagtggaatgacttcgccgaggactcactgagagtaatccaacacaacgctctggaggatcggagcattagcgataaacaacagtgggacgctgctatctattttatggaggaagccctgcaggccagactgaaagatacggaaaacgcgatagaaaacatggtgggacctgattggaaaaagaggtggctgtactggaagaatcggacccaagagcagtgcgtccataacgagacgaagaacgagttggagaagatgctgaagtgtaatgaggaacaccccgcttacttggcatccgacgagataacaaccgtcaggaaaaatctggagagtaggggcgtggaggtggaccccagcttgattaaggatacctggcatcaggtttatcggagacactttcttaagaccgctttgaatcactgcaatctgtgccgacggggattttactactatcagcgacattttgtggatagcgagctggagtgcaatgatgttgtcctgttctggaggattcagcggatgctggccattaccgctaacactcttaggcagcagctgacaaacacggaggtgaggagattagaaaaaaacgttaaagaggtactagaggattttgccgaagacggggagaagaagataaagctcctgacagggaagcgggtccagctggccgaagatctcaaaaaagtcagggagatacaggaaaagctggatgcttttatcgaggccctgcaccaggaaaaatag

SEQ ID NO: 233560 - DNA, 2994 bp, synthetic construct
  misc_feature 1..2994: note = Description of Artificial Sequence: Synthetic coding sequence
  source 1..2994: mol_type = other DNA
atgtggaggctgcgacgcgcagctgtcgcatgtgaagtctgtcagtctctggtgaagcacagttctggaattaaagggagcttacccctccagaagctacacctcgtaagtagatcaatttaccatagtcaccatccaaccctgaaacttcagcggcctcagctgagaacctcatttcagcagttcagttcattgacaaacttgccactacgcaaattgaagttcagcccaattaaatacggctaccagcctcggaggaatttctggcctgccagactggccactcggcttcttaagttacgctatctaatcttaggaagcgccgttggagggggttataccgcaaaaaagaccttcgaccagtggaaagatatgattccggatcttagcgaatataagtggatcgtccctgacatcgtgtgggagatcgacgaatacattgactttgaaaagatcagaaaggcactaccgagcagtgaagacttggtgaagctggcgcctgactttgataagatcgtggagtctctgagtcttctgaaggacttcttcacaagtgggtctccagaggaaaccgcctttagagctacagatcggggaagcgagagcgacaagcacttcagaaaaggactcttgggcgagcttattctactgcagcagcagatccaggagcatgaggaggaggctagaagagccgcaggtcagtattcaacaagctatgcccagcagaagagaaaggtctctgataaagaaaaaatcgatcagctgcaagaggagctcttgcatacgcagctaaaatatcagagaatcctagaacggcttgagaaagagaataaggagctccgcaaattggtgctgcagaaggacgacaaaggtatacaccaccggaagctaaagaaatcccttattgatatgtatagtgaggttctggacgtcctcagtgattacgacgcttcttataacacccaggaccacttgcctcgtgtggtggtggtgggagaccaaagcgccggaaaaacttctgtgctggaaatgattgcacaggcacgtatttttcctaggggaagcggcgaaatgatgactaggagcccggtgaaggtaaccctgagcgaggggccacaccatgttgcactcttcaaagatagctctagagaattcgatttgactaaagaagaagacctcgcagcactaagacacgaaatagaacttaggatgagaaagaacgtgaaagaagggtgtaccgtcagccccgagactatttctctaaacgttaaaggtcctggcttgcaacgtatggtgctagtggatctgcccggagtgattaacaccgtgactagcggcatggcccctgacaccaaggaaaccattttcagcattagcaaagcatatatgcagaatcccaacgcgatcattctgtgtattcaagatggaagcgtcgacgctgagcgaagcatcgtgaccgatctggtgtcgcagatggaccctcacgggcgtagaactatatttgtacttacaaaggttgacctcgccgagaaaaatgtcgcaagccctagtcgcatccaacagatcatcgaaggaaaactgtttcccatgaaagccctcggctattttgctgtggtgactgggaaaggtaacagctcagagagcattgaagcgatccgagagtacgaggaagagttttttcaaaacagcaaacttctcaagacttccatgcttaaggcccatcaagtcaccacacgcaatctttccttggctgtgagcgactgcttctggaaaatggtacgagaatccgtggagcagcaagctgacagtttcaaggctaccaggttcaatctcgagacggagtggaaaaacaattatcctcgattacgggagcttgacaggaacgagctcttcgaaaaagcaaaaaacgagatcctggacgaggttattagtctgtcgcaggtgaccccaaagcactgggaagagatactccagcagagtctgtgggagagggtcagtacccatgtgatcgagaatatatacttgcccgcagcccaaacgatgaactcagggacctttaacaccaccgttgacatcaaactcaagcaatggaccgacaaacagctgcctaacaaggcggtggaggtcgcgtgggagaccttgcaggaagagttctcccggttcatgacggagccaaaaggcaaggagcacgacgatatcttcgataagctgaaggaagcagtcaaagaggagtccatcaagagacacaaatggaacgattttgccgaggatagcctgcgcgtgatccaacataacgccctcgaagatcgatccatcagtgataagcaacagtgggatgctgcaatttatttcatggaagaagctttgcaggctagacttaaggacactgaaaatgccattgaaaacatggttggccctgattggaagaagcgatggttgtattggaaaaataggactcaggaacagtgtgtacataacgagaccaaaaatgagctggagaaaatgttaaagtgtaatgaggaacacccagcatatcttgcctccgatgagatcaccacagtgagaaagaacttagagtcacggggagttgaagtcgacccctcactgattaaagatacctggcaccaagtctaccgcagacactttcttaaaaccgctcttaaccactgtaacctctgcagacgcggattttactattaccagcgtcattttgtcgactccgaactggagtgtaatgacgttgtgctattttggcggattcagcgcatgctggctatcaccgcaaacacactcagacagcaactcaccaatacagaggttaggagactggagaaaaacgtgaaagaagtattggaggacttcgctgaagatggggagaagaagatcaagctgttgactgggaaaagggttcagctagctgaggacctcaaaaaggtgagagagattcaggaaaaattagacgcttttattgaagccctacaccaggagaaatag

SEQ ID NO: 233561 - DNA, 501 bp, synthetic construct
  misc_feature 1..501: note = Description of Artificial Sequence: Synthetic coding sequence
  source 1..501: mol_type = other DNA
atgtggcgtctgcggagagccgctgtggcatgcgaagtgtgccaatctctcgtcaagcattcctccggaataaaagggtctctgcctttgcagaagctccacctcgtgagcaggtctatctaccacagccatcatccaaccctgaagctccagagaccacagctaagaacttccttccagcagttctctagccttacaaatcttccccttagaaaacttaagttctcaccaatcaagtatggctaccaacctagaaggaatttttggcctgctaggctcgctaccagattgcttaagttaaggtacttgatcctgggtagcgcagtgggcggagggtataccgctaagaagactttcgaccagtggaaggatatgatccccgacctgtcagagtataagtggattgtgcccgatattgtgtgggagattgacgaatatatagacttcggctcacctgaggaaactgctttcagagccacagatcgtggctccgagtcctag

SEQ ID NO: 233562 - DNA, 2883 bp, synthetic construct
  misc_feature 1..2883: note = Description of Artificial Sequence: Synthetic coding sequence
  source 1..2883: mol_type = other DNA
atgtggcgactgaggcgggctgcggttgcgtgcgaggtctgccagtccctcgtcaaacactccagtggcatcaagggtagtctgccgctacagaagctgcacctggtctcaaggtctatctaccattctcaccatcctacactcaaattacagagaccccaacttcggacatctttccagcagttctcgtcactcactaacctcccactgaggaaattaaaattctcaccgattaaatatggctatcagccgagacggaacttttggcctgcccgactggccacacgactcctgaagttgcgatacctaatcctggggtctgccgtaggaggcggatacactgctaagaagactttcgatcagtggaaggatatgatccccgatttgtcagaatataagtggatagtgccagatatagtttgggagatagacgagtatattgactttgaaaagattaggaaagccctgccctcttccgaggatctcgttaagctggctcccgatttcgataagattgtcgaaagcctctcattgttaaaagatttcttcaccagcggctctcctgaggaaacagcctttcgggcaaccgacagaggatccgagagcgataagcactttaggaaggtgagcgacaaagaaaaaatcgatcagttacaggaagagctgctgcacacccagctgaagtaccaacggattctggagaggctggaaaaggaaaacaaggagctgagaaaacttgttcttcagaaggacgataaggggattcaccaccggaagctgaagaagagcttaatcgacatgtattctgaggtcttagacgtgcttagtgactatgacgcttcttacaatacgcaagatcatcttccaagagtagtggtagtgggagatcagagtgccggaaagactagtgtcttagagatgattgcccaggctaggatcttccccagaggaagcggcgagatgatgactcgttcccccgtgaaagttactctatccgagggcccacatcacgtcgctctgtttaaggacagctctagggaatttgacctgactaaagaggaggatctcgccgctctgcgccatgaaattgagcttagaatgcggaagaacgtgaaggaaggttgcacagtcagtccagagacaatctcattgaatgtcaaggggcctggcttacaaagaatggtgcttgtcgatctgccaggggtcattaacaccgtcacttcgggtatggcacccgacacaaaggagactatttttagcataagcaaagcttatatgcagaaccccaacgccattatcctttgtatccaggacggcagtgtggatgctgaacgcagtatagtgaccgacctggttagtcaaatggacccccacggcagaaggactatcttcgtcctgactaaagtagatctcgcggagaagaatgtggcatccccctccaggattcaacagattatcgaaggcaaactatttccaatgaaagctctgggctatttcgccgttgtcactggcaaggggaatagctctgagtctatagaggcaatacgagaatatgaagaggagttcttccagaatagtaagctgcttaagactagcatgctgaaagcccaccaagtgacaactaggaatctgtctttggcggtttcggattgtttctggaagatggtgagagagtccgtggaacagcaggctgatagcttcaaggcaactaggttcaacctcgagacagagtggaaaaataactacccacgtttgagggagcttgatagaaatgaacttttcgagaaggccaagaatgaaatcctggatgaagttatttctctctcccaagtcacacctaagcactgggaagagatattgcagcagagcctgtgggaaagagtctctactcacgttatcgagaacatttacctccccgctgcccagacgatgaattccggcactttcaacaccactgtggatatcaaactgaagcagtggaccgataaacagttacccaataaggccgtcgaggtggcatgggagaccctacaagaggaattttccagatttatgacggaaccaaagggtaaggagcatgatgatatttttgataaactgaaggaggctgtcaaagaggagagtattaagcgtcataaatggaacgacttcgccgaggatagcctgcgtgtgatccagcacaacgccctggaagaccggtctatctctgacaagcagcagtgggacgcagctatctattttatggaggaggctcttcaggcgaggcttaaggataccgagaacgcgatagagaacatggtgggacccgattggaagaaacggtggctttactggaagaaccgcacacaagagcagtgcgtacataacgagacaaagaatgagctggaaaagatgctgaagtgtaacgaggaacatcccgcttacctggcgtcggacgaaataaccactgtgcggaagaaccttgaaagcagaggtgttgaggtggatccatcattgatcaaggacacatggcatcaggtctaccgtcggcacttccttaaaaccgcacttaaccattgcaacctttgcaggcggggtttttattactatcagaggcattttgtggattccgagctggagtgtaacgacgtggtgctcttctggcgcatccagcgaatgctcgctataaccgccaacaccctgagacaacagctaactaatacagaggtccgtaggctggagaaaaacgtgaaagaggtcctggaagacttcgccgaggacggggaaaaaaaaattaagttgttgactggcaagagggtgcagctggccgaggacctcaagaaggtcagggagattcaggaaaagctcgacgcatttattgaggcactacaccaggaaaagtag

SEQ ID NO: 233563 - DNA, 558 bp, synthetic construct
  misc_feature 1..558: note = Description of Artificial Sequence: Synthetic coding sequence
  source 1..558: mol_type = other DNA
tgatacctgatcctgggctctgccgtagggggtggttatacagccaaaaaaacctttgaccaatggaaggacatgatacctgatttgagtgaatacaagtggatcgtgccggacattgtctgggagatagacgagtatatcgattttgagaagatccgtaaggccctgccctcatccgaggaccttgtcaagttagcgcctgattttgataagatcgtcgaatccctgtctttattgaaggacttctttacaagtggtcacaagctcgtgagtgaagtaattggcgctagcgacctgctgctccttcttgggagccccgaagaaacagccttcagggccacagaccggggatctgagtcagataagcactttcggaaagtgagcgataaggagaaaatagaccaattgcaggaagagctcctgcacacacagttaaaataccagcgaatcctggagaggctcgagaaggagaataaggaattacgtaagcttgttctgcaaaaggacgataagggaattcaccatagaaagttaaagaagtccctgatcgatatgtag

SEQ ID NO: 233564 - DNA, 540 bp, synthetic construct
  misc_feature 1..540: note = Description of Artificial Sequence: Synthetic coding sequence
  source 1..540: mol_type = other DNA
atggttgtgggagcattcccgatggctaaacttctctacctggggatcagacaggtctctaagccgctagctaaccggatcaaggaggcagcccgacgatctgaattcttcaaaacttatatttgtctgcctcccgctcagttgtaccattgggtggagatgcggactaagatgaggattatgggcttcagggggaccgttataaaaccattgaacgaagaggctgccgcagaattgggggcagagttgctgggagaggccactatattcatcgttggtggcggatgcctggtgttagaatactggcggcaccaggcccagcagagacacaaggaagaggagcaacgtgccgcatggaacgccctgcgagatgaggtgggacacctggccttggccctcgaagcactgcaggcacaagtgcaggccgcacctcctcagggcgcattggaggaacttcgaactgagctgcaagaggttcgcgctcagctctgtaatcctggcagaagtgcaagccacgcagtcccggcttcaaaaaagtag

SEQ ID NO: 233565 - DNA, 543 bp, synthetic construct
  misc_feature 1..543: note = Description of Artificial Sequence: Synthetic coding sequence
  source 1..543: mol_type = other DNA
atggtggtgggggctttcccaatggctaaattgctctatctggggatcaggcaggttagcaaacccctggcaaaccgaataaaagaggcagccaggagatccgagttcttcaagacgtacatatgtctgccccctgctcagctgtatcattggctcgagatgcgcaccaaaatgaggatcatgggttttaacgcagccgcaatcaagccactgaacgaaggagcggcagccgagctaggagcggaactcctgggcgaaggaatcatattcatcacggcttgttcttgtttaatgctggaatattggaggcatcaactccaacagcggcgaaaagagaaagagcgaagagtcgcgagagaagctctgcgcggtgaggtcggtcacctcggactggctctcgaggagttgcaggcccaggtacaggcaacttccacacagttggccctcgaggagctgagggcccaattacaggaagtgagagcccacctgtgtctgagagatccccctcctgcaccacccgtggccccagcttcagaaaaatag

SEQ ID NO: 233566 - DNA, 381 bp, synthetic construct
  misc_feature 1..381: note = Description of Artificial Sequence: Synthetic coding sequence
  source 1..381: mol_type = other DNA
atgaggactaaaatgaggatcatggggttccgagggaccgtcatcaagccgttgaatgaagaggccgctgcagagctcggcgctgaacttctgggagaggcgacgatttttattgttggcggtgggtgcctcgttcttgaatattggagacatcaggctcagcagcggcataaagaggaggagcagcgtgccgcttggaatgctctacgagacgaagtagggcatctggcgctggccctggaagcgcttcaagctcaggtccaggcagcaccccctcagggagccctggaagaactgaggacagagcttcaggaggttcgcgcacaactatgtaatccgggtcgctcagcctcccacgcagtgcccgcttccaagaaatag

SEQ ID NO: 233567 - DNA, 1734 bp, synthetic construct
  misc_feature 1..1734: note = Description of Artificial Sequence: Synthetic coding sequence
  source 1..1734: mol_type = other DNA
atgtcacaccagcccttgagctgcctcaccgagaaggaggattccccttccgagagcactggaaatggaccaccacacttagcgcaccctaacttagacacgttcacgccagaagagctgctgcagcaaatgaaggaattgctgaccgaaaatcatcagctcaaggaggcgatgaagctgaacaaccaagccatgaaagggaggttcgaagagctgtcagcctggactgaaaaacagaaagaagaaagacaatttttcgagattcaaagcaaggaagcgaaagagagactgatggccttgtctcacgaaaatgagaaattgaaggaagaactgggaaagctgaagggcaagtccgaaagaagtagtgaagaccccacagatgatagcagactgcctagagctgaagccgagcaggagaaagaccagcttcgcacccaggtggtgagactgcaggccgaaaaggccgatcttttaggcatagttagcgaacttcaactgaagctgaactctagcgggagttctgaagactccttcgtcgaaatccggatggccgagggagaggcagagggctccgtcaaggaaattaaacactcgcctggcccaacccgcaccgtgtccacgggaacagcactgagcaagtacaggagtcgttctgctgatggagctaaaaactatttcgaacatgaggaactgactgtgtcccagctactcttgtgtcttagagaaggcaatcagaaagtggaacgcctagaggttgctctgaaggaggccaaagagagagtaagtgacttcgagaaaaagacaagcaacagatccgaaattgaaacccagactgagggtagcactgaaaaggagaacgatgaggaaaagggtccagagactgtgggttccgaggtcgaagcacttaatctacaggtgacaagtctctttaaagaactgcaggaagcgcacactaaactctccaaggctgagctcatgaaaaagcgcctgcaagaaaaatgtcaagcactggaacgtaaaaactctgccatcccttctgagcttaatgagaaacaagagttggtttacaccaataaaaaactggagcttcaggtggagagcatgctgtcagaaattaagatggagcaggctaagacagaagatgaaaagagcaaactgaccgtattacagatgacccataacaagctactacaggaacataataacgccttgaagacaattgaggagctcaccaggaaggagagcgagaaggttgatagggctgtgctgaaggagctctctgagaaactcgaactggctgaaaaagccttggccagcaaacagttgcagatggatgagatgaagcagactatagccaaacaggaagaagacctcgaaacaatgacgatcctgagggctcagatggaagtgtattgcagcgatttccacgctgaacgagcagcccgagaaaaaatccatgaagaaaaggagcagctggctctgcaactcgcagtactacttaaggagaatgacgctttcgaggacggaggcagacagtccctgatggagatgcagtccagacatggcgcacggacctccgactcagaccagcaggcttatcttgtccaaaggggcgcagaggacagggactggagacagcagagaaacattccgattcacagctgtcccaagtgcggggaggtgctaccagacattgatacgctacagatacatgtaatggactgcatcatttag

SEQ ID NO: 233568 - DNA, 1734 bp, synthetic construct
  misc_feature 1..1734: note = Description of Artificial Sequence: Synthetic coding sequence
  source 1..1734: mol_type = other DNA
atgagccaccaacctcttagttgcctcacagaaaaagaggactcaccatccgaatccacggggaatgggccaccacacctggcccatcctaacctcgacacattcactccagaagagctcctgcagcagatgaaggagctgctgacagagaatcatcagttaaaggaagccatgaagctgaacaaccaggctatgaaaggcaggttcgaagagctgtcagcttggaccgaaaaacagaaggaagagcgacagttttttgagatccagtctaaggaggctaaagaaagactgatggcgctatcccacgagaacgagaaactgaaggaagaacttggaaaactgaagggcaagtcagaaagatcatcagaggatcccaccgatgattcacggctccccagggctgaggcggaacaggaaaaggatcagctgcgaacacaggtggtccgcttacaggctgagaaagccgacctactaggcatcgtatctgagttgcaactgaagctcaactctagcgggtcgagtgaggactccttcgttgaaattaggatggccgagggagaagccgaaggctcagtaaaagagatcaagcactcccccggtcctacaagaacagtgtctacaggaacagcgctcagcaaatatcgatcaagatcagctgatggggcaaagaattattttgagcatgaagaactcactgtatcccagctcctcctgtgtctgagggaaggcaaccagaaagtcgaaaggctggaggtagctctgaaagaagcgaaggagcgcgtgtccgactttgagaaaaagacttccaaccggagcgagattgagactcagacagaaggcagcaccgagaaagagaatgacgaggagaagggccctgagacagtcggatcagaggtggaagctcttaatctccaggttacatctttgtttaaagagctccaggaggcccacacaaagctcagcaaggctgaactgatgaaaaagcgcctgcaggaaaagtgccaggccctggagcgaaagaacagtgctatcccatccgaactcaatgaaaagcaggagctggtctataccaacaaaaagttagaattacaagtggaatctatgctgtctgaaattaagatggaacaggccaaaacggaggacgagaaaagtaaactgacggtgttacagatgacccataacaaactcttgcaagagcacaataacgcgctgaaaacgatcgaagagttgacaaggaaggagtctgagaaagtagatagggccgtgctgaaggaactttccgaaaaattggagctggctgagaaggccctggcaagcaaacagttgcagatggatgagatgaagcagacgatagcaaagcaagaagaggatttggaaactatgaccattctgcgcgcacagatggaagtttactgcagcgacttccatgcagagcgagccgcacgcgagaaaatacacgaggagaaggaacagcttgcgctccagctagcggtgctcctaaaggagaacgacgctttcgaagatggaggaagacaatccctgatggagatgcagtcccgacacggcgcaaggacgtccgatagcgatcagcaagcatatctggtgcagcgaggtgcagaagaccgcgattggcgacagcagcgaaatataccgatccattcatgccctaagtgcggggaggtcttgccagatatcgacactctgcagatacacgtgatggactgcatcatctag

SEQ ID NO: 233569 - DNA, 1734 bp, synthetic construct
  misc_feature 1..1734: note = Description of Artificial Sequence: Synthetic coding sequence
  source 1..1734: mol_type = other DNA
atgtcacaccagccattgagttgtcttactgaaaaagaggattcaccaagtgagtcaacaggcaatgggcctccccacctggctcaccccaaccttgacacctttacaccggaggaactgctgcagcagatgaaggagctgctcacagaaaaccaccaattaaaagaggccatgaaactgaataaccaggctatgaaaggacgcttcgaagaattaagcgcatggactgaaaagcagaaggaagagagacaattctttgaaatccaatctaaggaagccaaggagagactgatggcactgagtcatgagaatgaaaaattgaaagaggagctcggcaaactgaaaggaaagtcggagagatcttctgaggaccctactgacgattcccgcctcccgagggccgaggcagaacaggagaaggaccaactacggactcaagttgttcgtttgcaggcagaaaaggccgacttgctgggcatagtgagtgagctccagctcaaactgaactcttccgggtccagtgaagacagctttgtggagataagaatggcagagggagaggcagaaggctcagtcaaggagattaagcactcccccggtccaacccgcaccgtttcaaccggaaccgcgctgtccaaatatcgtagccggtctgctgatggcgcaaagaactacttcgagcacgaggagctgaccgtgtcacagcttctgttatgtctgagagaggggaaccagaaggtggaaaggttggaagtggcgctgaaggaggccaaagaaagggtgagcgatttcgagaaaaagactagcaatagaagtgaaatcgagacgcagaccgagggcagcacagaaaaagaaaatgatgaggagaagggacccgagactgtggggtcagaagttgaggcattaaatctccaagtcactagcctatttaaagagctccaggaggcccacaccaagctgtctaaagctgaactgatgaaaaagcgcttgcaggagaagtgccaggcacttgagagaaaaaatagtgctatcccctccgagctcaatgaaaagcaggaactggtctacaccaacaaaaagttggagctgcaggtggaaagcatgttgagcgaaattaagatggagcaggcaaagaccgaggatgaaaaatccaagctgacagttcttcagatgacacacaataaattgcttcaggagcacaacaatgcgctcaagaccatcgaggagttgactagaaaggaaagcgaaaaagttgatagagctgtactgaaagagctcagcgaaaaattggagcttgcagagaaggccctggctagtaaacaattgcaaatggacgaaatgaaacagactatcgctaaacaggaggaggatctcgagacaatgacaattctgcgagcgcagatggaggtatactgttcggactttcacgccgaacgggcagctcgagagaagatacacgaagagaaggaacagctcgcccttcaactggctgtcctgttgaaagaaaacgatgcctttgaagacggcggaagacagtcactgatggagatgcagtcacgtcacggggcaaggacttctgatagtgaccagcaggcatatctggtacagcgaggcgcagaggacagagattggaggcagcaaaggaatattccgattcactcatgtccgaagtgcggggaggtgctcccagatatcgataccctgcagatccatgtgatggattgtatcatctag

SEQ ID NO: 233570 - DNA, 1716 bp, synthetic construct
  misc_feature 1..1716: note = Description of Artificial Sequence: Synthetic coding sequence
  source 1..1716: mol_type = other DNA
atgtcccaccaacctctctcttgcctcactgagaaggaggacagccctagtgagtctacagggaacggccctccccacttggcccatccgaacctcgacaccttcactcccgaggaattgcttcagcagatgaaagaactgctgaccgagaaccatcagcttaaggaagcaatgaagctaaacaaccaggcgatgaagggcagatttgaagagctgtcagcctggactgaaaaacagaaggaggaaagacagttctttgagattcagtctaaggaagcaaaggaaaggctaatggctttaagccacgaaaatgaaaagttgaaggaggagttggggaagctaaagggtaaatccgagaggtcttctgaggatccaacggacgacagcagactcccaagggccgaggctgagcaagagaaggatcaactcaggacacaggtggtgcgtttgcaggccgagaaggctgatctacttggcatcgtatcggagctgcaactaaaactaaatagcagcggcagcagtgaagacagctttgtcgagattcgcatggcggagggtgaagccgaaggttcggttaaggaaattaagcactcacccggaccaacacggaccgtttcgacaggtacgtcgcgcagcgcagacggcgcaaagaattacttcgagcacgaagaacttactgtgagccagctgctgctgtgtttgagagagggcaaccagaaggtggaacgattggaggtagctctgaaggaggctaaagaacgtgtgtcagatttcgaaaagaagacaagtaatagaagcgaaatcgaaacacagaccgagggctccaccgagaaggaaaacgatgaagagaagggccctgagactgttgggagcgaagtggaagctcttaatctccaggtcacaagcctttttaaggagctccaggaagcacatacaaagctaagcaaggcggagctgatgaaaaagcgtctgcaggagaaatgccaagccttggaaagaaaaaacagcgcgatccccagcgagctcaatgagaaacaggaactggtgtacaccaacaagaagctagagctgcaggtggagagcatgctgagtgaaattaaaatggagcaggccaagacagaggacgaaaaaagtaagcttacggtgctacagatgacacacaataagctccttcaggaacacaataacgcattgaagaccatcgaagaactcacgagaaaagaaagcgagaaagttgatagagctgtcctgaaagaactgtcggaaaagctagaactggctgaaaaagccttggcctctaagcagttgcagatggatgaaatgaagcagacaattgcgaagcaggaggaggacctggaaacaatgaccattctaagggcccagatggaagtgtactgttccgacttccatgcagaacgtgcagccagggagaaaattcacgaagagaaagaacagctggcacttcagttggccgtcttactgaaagaaaatgacgcgtttgaagatggcggaaggcaaagcttaatggagatgcagagcaggcatggcgcacgtacctctgactcggaccaacaggcctacctggttcaaaggggtgctgaggatcgggactggagacaacaaaggaacattccaattcattcctgtcccaagtgcggagaggtcctacccgacatagacactttacagatacacgtgatggactgtattatttag

SEQ ID NO: 233571 - DNA, 1734 bp, synthetic construct
  misc_feature 1..1734: note = Description of Artificial Sequence: Synthetic coding sequence
  source 1..1734: mol_type = other DNA
atgtcccaccagccattgtcatgcctgaccgagaaggaggactccccctcagaatcaactggcaatgggccaccacaccttgctcaccctaaccttgatacttttacaccggaagaactgctgcagcaaatgaaggaactcctgaccgagaaccaccagctgaaggaggctatgaaactgaacaatcaggctatgaagggcagatttgaagaactgtcagcctggacagagaagcaaaaggaagaacgccagttctttgaaatacagagcaaggaggctaaagagagactcatggccctctcccacgagaacgagaagcttaaagaggagttgggcaaacttaaggggaagtccgagcggtccagtgaagatccaacggacgattcccggctaccaagggccgaggccgagcaagaaaaagatcaattacggacccaggtggtccggctgcaagccgagaaggctgatctcttgggaattgtgagcgaactccaacttaagctgaactcaagtggatcttccgaagacagcttcgtggaaatccgcatggccgaaggcgaggcagagggcagcgtcaaggagatcaaacacagtccgggacctacgcgcactgtatccacaggaactgccctgagtaagtatcgctcccgatctgctgacggtgcaaaaaactatttcgagcatgaggagctcactgttagccagctgttactgtgtttgcgggagggcaatcaaaaggtcgagcgtcttgaggtggcactgaaggaagctaaagaaagggtcagcgatttcgaaaagaaaacatctaacaggtccgagattgaaactcagaccgaaggcagcactgagaaggagaatgacgaggagaaaggccctgagactgtgggctcggaggttgaggctctaaacctgcaggttactagtttattcaaagagctccaggaagcacacaccaagttgagcaaggccgagttaatgaaaaaaaggctccaggaaaaatgccaagccctcgagcggaagaattccgctataccaagtgagctgaatgagaaacaggagctggtatataccaataaaaagctcgaactacaggtggaaagcatgttgagtgaaatcaaaatggaacaggctaagactgaagatgagaagtctaaactcacagtgttgcaaatgacccataacaaacttctgcaggagcacaataatgcattgaagacgattgaggagctaacacgtaaagagagtgagaaggttgatcgggctgtcttgaaagaactgagtgaaaaactggaacttgcggaaaaggcactcgcttctaagcagctgcagatggacgagatgaagcaaactattgctaagcaggaggaggacctcgagaccatgacaatcctgagagctcaaatggaagtgtattgttcagattttcatgccgagagagctgctagagaaaagattcacgaggagaaggaacaactggccctgcaattagccgtgttactaaaagagaacgatgcttttgaggatgggggacgtcagtccctcatggaaatgcaatcgcgccatggcgcaagaacgtctgattctgatcaacaggcgtacttagtgcaacgcggagccgaggaccgagactggcgacaacaacggaacatacctatccacagctgccctaagtgcggagaggtactgccagatatcgatacactgcaaatccacgtgatggactgtattatttag

SEQ ID NO: 233572 - DNA, 1716 bp, synthetic construct
  misc_feature 1..1716: note = Description of Artificial Sequence: Synthetic coding sequence
  source 1..1716: mol_type = other DNA
atgtcccaccaacccctctcgtgcctaaccgagaaggaggattccccctcggaatcaacgggtaacggacctcctcatctagcccatcctaatttagatacttttacaccagaagaactcctgcagcagatgaaagagctgctgactgaaaatcaccagctgaaggaggcaatgaagcttaacaatcaagctatgaaaggaagattcgaggagctttcagcctggacagagaaacagaaagaagagaggcagttttttgagattcagagcaaggaggctaaggaacgcttaatggctctcagccacgaaaatgagaagttaaaggaagagctgggtaaactaaagggaaaaagtgagaggagcagcgaggatcctaccgatgacagcagattgcccagggccgaggcagaacaggaaaaggatcagctccgaacacaggtggtacgtctgcaggccgaaaaggccgatctgctcggcattgtttcagaactgcagctaaagttaaattcttctggatccagtgaggacagttttgtggagattcggatggcggagggggaggccgaaggatctgtgaaagagattaagcatagtccaggcccaacccgcaccgtgtccaccggtacaagccgaagtgccgacggcgctaaaaactacttcgagcatgaagagctaaccgtgtcccaactgttactttgtctgcgagaaggcaatcagaaggtggagcgtctcgaagtggctctaaaggaggccaaggagcgagtcagcgatttcgagaaaaaaaccagcaaccggagcgagatagagacacagactgaaggttccactgagaaggagaacgatgaggagaaaggcccagagacagtgggcagtgaggtcgaagcgttgaacctgcaggttacgtcactgtttaaggagttgcaggaagctcatacaaagctgtccaaagctgagctcatgaaaaagaggttgcaggaaaagtgccaggctctcgagcgaaagaacagcgctatcccatccgaactgaacgaaaaacaagaattggtctacacaaataagaagctcgaactgcaggttgaaagtatgctctccgaaatcaaaatggagcaggccaaaaccgaggacgaaaagtctaagctgaccgtactccagatgacccataataaactgcttcaggaacataacaacgcccttaaaaccattgaggagctgactcgcaaagaatcagaaaaggtagaccgggctgtgttgaaagagctgtcagagaagctcgaactggccgaaaaagctcttgcctccaagcagttgcagatggatgagatgaagcaaacaatcgcaaaacaggaggaagacttggagactatgactatcctgcgggcacagatggaggtctattgcagtgattttcacgcagagagagctgcaagggagaaaatccatgaagagaaagaacagctggcactgcaactagcagtcctgctaaaggagaacgacgcttttgaagacggcggacgtcagagtctcatggaaatgcaatctagacacggggcacgtacatccgattctgatcagcaggcctacctcgtccagagaggcgctgaggacagagattggagacagcagcgaaacattccaatccatagttgcccgaagtgtggcgaggtacttcctgatatcgatacactccagatccacgtgatggactgtatcatctag

SEQ ID NO: 233573 - DNA, 381 bp, synthetic construct
  misc_feature 1..381: note = Description of Artificial Sequence: Synthetic coding sequence
  source 1..381: mol_type = other DNA
tagggggaggcagagggaagcgttaaggagataaaacactcccccggacccaccagaactgtgtctactgggactgccctctctaagtaccgaagccgcagtgccgatggcgctaagaattacttcgaacatgaggaactgaccgtttctcagctgctgctatgtctccgcgaaggcaaccaaaaggtggagcgtttggaggtagcacttaaagaggctaaagaacgggtatccgatttcgaaaagaagacgtcgaacagaagcgagattgaaacccagaccgaggggtctactgagaaggagaatgatgaagaaaagggtcctgaaacgactggattccatcatgtggggcaagatggcctggacttgctaacttcgtag

SEQ ID NO: 233574 - DNA, 444 bp, synthetic construct
  misc_feature 1..444: note = Description of Artificial Sequence: Synthetic coding sequence
  source 1..444: mol_type = other DNA
atgaaattgaacaaccaggcaatgaagggaaggttcgaggagctctcagcttggactgaaaagcaaaaagaggagagacagttctttgagatccaatctaaagaggcgaaggaacgtcttatggcgctcagccatgaaaacgagaagctgaaggaggagttaggaaagctgaaaggtaagtctgagcgaagcagcgaggaccctaccgatgatagcaggctgccaagggcggaagcagaacaggagaaggatcagctcaggacacaggtggtccgcttgcaggccgaaaaagccgatcttctgggtatcgtgtccgagctgcagctaaagctgaactcttcagggtcctccgaggacagtttcgtggaaatcagaatggccgaaggggaagcggagggcagcgtcaaggagattaaacactcacctggccctaccaggacatag

SEQ ID NO: 233575 - DNA, 912 bp, synthetic construct
  misc_feature 1..912: note = Description of Artificial Sequence: Synthetic coding sequence
  source 1..912: mol_type = other DNA
atgcatccagagcctgccccacccccaagccgtagctctccagagctcccaccttccggcggttccaccacctcaggaagtaggagaagccgtagacgttccggagatggagagccaccaggcgcacccccaccaccacctccgcctagcgccgtgacctatccggattggattggccagagctatagcgaagttatgagtctgaatgagcatagcatgcaggcactttcatggcgtaaattgtacttatcaagggccaaactgaaggccagcagtaggacgtccgccctcctgtccgggttcgcaatggtagccatggtggaagtacagctggacgcagatcatgattaccccccagggttgctgatcgctttttctgcctgtaccactgtcctcgtggctgtgcatctatttgctctgatgatttccacctgtatcctcccaaatattgaagccgtgtcgaacgtgcacaatctgaacagtgtcaaagagagtcctcacgaaaggatgcatagacacatcgagctggcctgggcattctccacagtcattggaacccttcttttcctggccgaggtagtcttactctgttgggtgaaatttcttcccctcaaaaagcaacctggacagccacgccctacatcaaagcctcccgcatctggagccgctgcgaacgtgagcacgtcaggtatcaccccaggtcaggcagcagcaatagccagcaccacaatcatggtccccttcggtttgatatttattgtctttgccgtgcacttctatcgtagcttggtcagccacaagacggaccgtcagttccaggagctgaatgaactggccgaattcgcacggctgcaggatcagctggaccacagaggggatcacccactcacacccggttcccattatgcttag

SEQ ID NO: 233576 - DNA, 765 bp, synthetic construct
  misc_feature 1..765: note = Description of Artificial Sequence: Synthetic coding sequence
  source 1..765: mol_type = other DNA
atgagcgcagaactgaacgtgcccatagacccctcggccccagcttgccccgagccgggacacaaggggatggattatagggattgggtgcgccgaagctacttggagctcgtgacaagcaatcaccacagtgttcaagcactgtcctggcggaaactctacctgagtcgtgcgaagctcaaagcctcaagtagaacgagtgcactcctctccggctttgctatggtcgctatggtcgaggttcagcttgaaacccagtatcagtaccctcgtccgttgttgattgccttttccgcatgcacgacagtgctggtggcggtgcacctttttgctctgctgatctcaacatgcatcctgccgaacgtggaagctgttagcaacatacataacctgaactctattagcgagagtccccacgaaaggatgcacccatacatcgagttggcttggggctttagcactgttctgggaatactcctattcctcgcagaagtggttctgctttgctggataaagtttctcccagtggacgcccgtagacagccaggaccccctccaggacccggaagtcacaccggctggcaggcagctttggtatccaccattatcatggtaccagtgggtttgatttttgtcgtgtttaccatccatttttatagatccttagttagacacaagaccgaacgccataacagagagattgaggaactccataagttgaaagtgcagttagatggacatgagcgctcgctgcaggtcctttag

SEQ ID NO: 233577 - DNA, 765 bp, synthetic construct
  misc_feature 1..765: note = Description of Artificial Sequence: Synthetic coding sequence
  source 1..765: mol_type = other DNA
atgtccgcggaactcaacgttccaattgacccgagtgcaccggcatgtccggaacctggacacaaagggatggactaccgtgattgggttaggagatcatatcttgaattggtcacaagcaatcatcattctgtccaggctctgagttggcggaaactgtacctatcccgggctaaactgaaggcatcctctcggacttccgccctgctctcaggattcgcaatggtagccatggtcgaagtccagctcgaaacccaatatcagtatccccgtcccctgctcattgccttttcagcgtgcactacagttctggtggccgtgcatctctttgcactgctaatctccacgtgtatcctgcctaatgtggaggccgtgtctaacatacacaacctgaactccataagcgagagcccccacgaacggatgcacccatacatcgaactcgcttgggggttctctacggtgctggggattctccttttccttgccgaagtggtgttgctctgctggatcaaatttcttccagtggatgccagaagacagcccggtccccctcctggtccaggatctcatactggctggcaggcagccctggtttctactattattatggttcccgttggcctgatctttgtcgtgttcaccattcacttctatcggagtttagttagacacaagactgaacgacacaaccgcgagatcgaggaactccacaagctcaaggtgcaattggacggccatgaacgatcactccaggtgctgtag

SEQ ID NO: 233578 - DNA, 639 bp, synthetic construct
  misc_feature 1..639: note = Description of Artificial Sequence: Synthetic coding sequence
  source 1..639: mol_type = other DNA
atgtccgcggagctgaatgtacccatcgacccgtccgcacccgcatgtcccgaaccaggccataaaggaatggactaccgcgattgggtccgaagatcttatctcgagcttgtcaccagcaaccaccactctgttcaggctttaagttggcgaaagctgtacctctctcgagctaaacttaaagccagttccagaacgagcgctcttctgagtggtttcgccatggtggccatggtagaggtccagctggagacgcagtaccagtatccccgacccctgctgatcgccttttcggcctgcactacagtgctagtagccgttcacctgttcgccctgctgatctctacgtgcatcctccctaacgttgaggccgtatcaaacattcataatctgaatagcataagcgaaagcccccacgagcggatgcacccttatatcgagttagcctggggcttctcgaccgttttggggattctcttgttcctggccgaggtcgtactgctctgttggatcaaattcctgcccgtagacgctcgaagacagcctggccctccccctgggcctggctcccacactgggtggcaggcggctctggtctctacgatcatcatggtgccagtgggccttatcttcgtttag

SEQ ID NO: 233579 - DNA, 765 bp, synthetic construct
  misc_feature 1..765: note = Description of Artificial Sequence: Synthetic coding sequence
  source 1..765: mol_type = other DNA
atgtcagcagaactcaacgttcccattgatccctcagcacccgcatgccccgagcccggacacaaggggatggactacagagactgggtgcgcaggagctacctggaattggtgacatcaaaccatcacagtgtgcaagctctgagctggagaaagctctatcttagcagggctaaattgaaggccagctcccgcacctctgccctgctatctgggtttgctatggtcgccatggtcgaggtgcaactggaaactcagtaccaatatcccagaccactcctgatcgctttctctgcgtgcaccacggttttggttgcggtgcatctgtttgcactgttgatctcaacctgcatcctgccgaacgtggaggctgtaagcaatatacataatctgaacagcatctcagagtcaccacatgaacggatgcacccatatattgagttggcctggggtttctctaccgtcctcgggatactactgtttttggcagaggtggtcctcctgtgttggatcaaattccttcccgtcgacgcgaggcgacagccgggacctcctcctgggcctggctcccacactggttggcaagcggcattagtatccaccataataatggtgcccgttggactgattttcgttgttttcactatccacttctatcggtctctcgtccggcataagacagagcggcacaatcgggagattgaggaactgcacaagttgaaggtacaattagacgggcatgagcgcagtcttcaagtgctgtag

SEQ ID NO: 233580 - DNA, 765 bp, synthetic construct
  misc_feature 1..765: note = Description of Artificial Sequence: Synthetic coding sequence
  source 1..765: mol_type = other DNA
atgtccgcggagctaaatgtccccattgaccccagcgctccggcatgtcctgagcctggacacaagggcatggattacagggactgggtgagaaggagctatctggaattggtgacctccaatcaccacagcgtacaggccctctcatggaggaaactatatctgtccagagccaagttaaaggcttcctcacggaccagtgcactgctgtcaggattcgcaatggtggccatggtggaagtccaactagaaactcaataccaataccccaggccattactaattgccttctcagcatgtacaactgtgctagtggccgtgcacctgtttgccctgctcatatctacttgtatactgcctaacgtagaggcagtgtctaacatccataacctcaattctataagcgaatcgcctcacgagaggatgcacccttacattgagctggcttggggcttttccacagtcctgggaatcctgctgtttttggcagaggtggtactgctctgctggatcaagttcctacctgtggatgctagacggcagcctggccctccacccggtccaggttcccacacaggttggcaggcagcactggtctctacgatcataatggtgcccgtcggactgatctttgtcgtctttactatacacttctacagatcattagtgaggcataagactgagagacacaatcgcgaaatcgaggagttgcacaagctcaaggtccagctcgacggacatgaaaggagtctacaggtcctgtag

SEQ ID NO: 233581 - DNA, 93 bp, synthetic construct
  misc_feature 1..93: note = Description of Artificial Sequence: Synthetic coding sequence
  source 1..93: mol_type = other DNA
atgtccgcagagcttaacgtgccaattgatcctagtgccccagcctgcccagaacccggacacaaaggcatggattatcgggactgggtgtag

SEQ ID NO: 233582 - DNA, 690 bp, synthetic construct
  misc_feature 1..690: note = Description of Artificial Sequence: Synthetic coding sequence
  source 1..690: mol_type = other DNA
atgtcagccgaacttaacgtgcccatcgacccctctgccccagcctgtcctgagcccggtcacaaagggatggattatcgagactgggtccgtcgctcctatctcgaactggtcaccagtaatcatcatagtgtacaggccctgagttggagaaaactgtacttgtctagggcaaagcttaaagcttcctcacggacctcagcgctcctaagcgggtttgctatggtggcaatggtggaagtccaactcgagacccagtaccaatacccacgccctttgctcatcgcctttagtgcttgtacaactgtgttagtggcagttcacttgtttgctctcctaatcagtacttgtattctgccaaacgtcgaggccgtctctaatattcataacctgaacagtatcagcgaatcaccccatgagaggatgcatccatatattgaactggcttggggtttttctacagttctcggaatattgctattcttggccgaggtcgtcctgttatgctggattaaatttctgccagtggatgccaggcggcaacctggcccaccgcctggtccaggtagccatactggatggcaggccgctttagtctccacaattatcatggtgccagtgggtctcatttttgtagtcttcaccatccacttttacagatcactggtacgccataaaactgaaaggtag

SEQ ID NO: 233583 - DNA, 294 bp, synthetic construct
  misc_feature 1..294: note = Description of Artificial Sequence: Synthetic coding sequence
  source 1..294: mol_type = other DNA
atgagtgccgaactcaatgtgcctattgaccctagcgcaccagcctgccccgagcccggtcacaagggtatggactaccgcgactgggtacgtaggtcttatctggaactggtgacgagcaatcaccacagtgtccaggccctaagttggcgaaaactgtacttgtcccgtgccaagctcaaagcctcgtccagaacatcagctcttttgagcgggttcgctatggtcgcaatggtagaagttcagctggagacgcagtaccagtatccccgtcctttgctgatcgccttctag

SEQ ID NO: 233584 - DNA, 888 bp, synthetic construct
  misc_feature 1..888: note = Description of Artificial Sequence: Synthetic coding sequence
  source 1..888: mol_type = other DNA
atgaaaggcggagaaggggatgctggggaacaagctccattgaaccccgaaggcgaatcaccagcaggttccgctacttaccgggagttcgtgcataggggatacttggatcttatgggcgcatctcaacatagtctgagggcactctcttggcgaagactctacctgagcagagcgaagctgaaggcttcatctagaacttccgccctgttgagcggctttgccatggtcgccatggtcgaggttcagctcgaatccgatcatgagtatccgcctggccttctcgtggcattctccgcctgcactacagtgctcgtagccgtacacttgtttgcactaatggtaagtacatgcctgctgcctcatattgaagcggtgtcaaatatacataacctgaattccgttcaccagtcacctcatcagcgcctgcaccgatacgtcgaactagcttggggtttctcaactgccttagggacttttctgttcttggcagaggtagtcctagtcggatgggtgaaatttgtgcccatcggggcaccgctagacaccccgacccctatggtgcccaccagccgcgtgcctggcaccctggccccagtggctacatccctctcccctgcgagcaatttgcctaggtcgtcggcctccgcagccccatcacaggcagaaccggcttgcccccctaggcaggcgtgcggtgggggaggagcccacggtcccggttggcaggctgccatggcctccaccgccattatggtcccggtcgggctggtcttcgtggcttttgccctgcacttttataggagtttggtggcgcacaagactgacaggtacaagcaggaactggaggagctgaatcgcctgcaaggtgaactgcaggcggtttag

SEQ ID NO: 233585 - DNA, 822 bp, synthetic construct
  misc_feature 1..822: note = Description of Artificial Sequence: Synthetic coding sequence
  source 1..822: mol_type = other DNA
atgaaaggtggcgagggtgatgcgggagagcaggcccctttgaatcccgagggagaatcgcccgcaggttccgcgacctaccgcgagttcgtgcaccgcggatatttagacttgatgggagcaagtcagcactcactgcgtgccttgagttggcgtagattgtacctgagccgggcaaaactcaaggccagtagtcggactagcgcactcctgtccggcttcgcaatggtggctatggtcgaggtgcagctcgaaagcgaccatgagtatcctcctggtttactggtggcgttctccgcttgcacaacagttcttgttgccgtgcacctgttcgccctgatggtcagtacttgtctgcttccacatatcgaggccgtgagcaacatacacaacttaaattctgtccaccagtcaccgcatcagagactccaccgctatgttgagctggcctggggcttctcaactgcactcgggacattcctgtttctggccgaagtggtcttggttggttgggtaaaattcgttcccatcggcgcaccacttgatacccccacacctatggttcctacttcaagggtgcccggaactctggccccagtggccacctctctgagtccggcttccaatctcccaaggtcgtcggcgtccgctgctccttcgcaggcagaacccgcatgcccccctaggcaggcttgtggcggagggggtgcacatggacccggttggcaggctgccatggccagcacatttccaggaattttccccattagccttagtctgggcttctgcaaattattgtgcacctgggcaggcttgtcgtag

SEQ ID NO: 233586 - DNA, 414 bp, synthetic construct
  misc_feature 1..414: note = Description of Artificial Sequence: Synthetic coding sequence
  source 1..414: mol_type = other DNA
atggccggatcacaagatatattcgacgcaattgtgatggccgacgaaagatttcacggtgagggctatagagaggggtatgaggaaggaagttcccttggcgtaatggagggcaggcagcacggaaccctgcacggagcgaagatcggaagcgagatagggtgttatcagggatttgcgttcgcctggaagtgtctcctgcatagctgtacaacggagaaggactcccgcaaaatgaaagtcctggaaagtctgatcggcatgatccagaaattcccttatgatgaccccacatacgataaactccatgaagatttagacaagataaggggcaagtttaagcagttttgctcactactgaatgttcagcccgatttcaaaatctctgctgaaggatctgggctgagcttttag

SEQ ID NO: 233587 - DNA, 666 bp, synthetic construct
  misc_feature 1..666: note = Description of Artificial Sequence: Synthetic coding sequence
  source 1..666: mol_type = other DNA
atggccggtagccaggatatattcgacgccattgttatggccgacgagaggtttcacggcgagggttatcgcgagggatacgaagagggcagctcgctaggcgtgatggagggtcgccagcacgggacactccatggtgccaaaatcggaagcgagatcgggtgttaccagggcttcgcgttcgcttggaagtgtctgctgcattcttgcacaactgaaaaagactctaggaagatgaaggtccttgagtcactcattgggatgatccagaagttcccctacgatgaccctacttatgacaagctccacgaggacctggacaaaataagaggcaagtttaagcagaccggcctgtcccctagtgcagtgatggtcagacctccaagctacgtggaactcccggtgacctgctggtgctgggaggccccaagatgcaatcagaaatgtacagatcctgcagctcgccgacccgatccacaaacgtgcgccagccaggacagactccgttgcgctccctgcacctgtcatcaaccacttgccagtcggtatacccagcacccgggactcgtgccccttccgcatcacgatagacaatccgtcccccaggggccacgagtcgtccagacagacgcggcagcacgcatggtcgaacaacagacgatgtag

SEQ ID NO: 233588 - DNA, 414 bp, synthetic construct
  misc_feature 1..414: note = Description of Artificial Sequence: Synthetic coding sequence
  source 1..414: mol_type = other DNA
atggcgggatcacaggacatctttgatgccatagtgatggcagacgagcgttttcacggggagggttacagagaaggctacgaagagggctcgagcctcggcgtgatggaagggagacagcacgggacacttcacggagcaaagatcgggtcggaaattggctgttatcagggctttgcctttgcctggaaatgcttactccattcttgcactaccgaaaaggatagccggaagatgaaggttctggagtctcttattggaatgatccaaaaatttccttatgatgaccctacctatgataagctccatgaggatttagataagattcggggaaagtttaaacagttttgttcactcttgaacgtgcagccagattttaaaatctcggcggaagggagtggtctgagcttctag

SEQ ID NO: 233589 - DNA, 237 bp, synthetic construct
  misc_feature 1..237: note = Description of Artificial Sequence: Synthetic coding sequence
  source 1..237: mol_type = other DNA
atggctggctcccaggatatcttcgatgctatagtcatggcagatgagagtcggaaaatgaaagtgctagaatccctcattgggatgatccagaaatttccatatgatgatcctacttatgacaagctccacgaggatctcgataaaatccggggaaagttcaagcagttttgtagccttctgaatgtccagcctgactttaaaatctccgccgaaggatctggcctcagcttctag

SEQ ID NO: 233590 - DNA, 3039 bp, synthetic construct
  misc_feature 1..3039: note = Description of Artificial Sequence: Synthetic coding sequence
  source 1..3039: mol_type = other DNA
atgatggcacagtctaatatgttcactgtcgccgatgtcttgagccaagatgagctcagaaagaagctctaccagaccttcaaggaccgcggaatcctggacaccttgaagactcaacttcgcaatcaactgatccacgagctgatgcaccctgtattgtctggtgaactgcagccgaggagcatttcggtggagggatctagtctgctgatcggagcttctaattctttggttgccgatcacctccaacggtgtggctatgagtacagcttaagcgtgtttttcccggagagtggtctggcgaaggaaaaagtgtttactatgcaggatctgctgcaattgattaaaataaatcccacttcatctctgtacaagagcttagtgagcggttcggataaggagaaccagaaggggttcctgatgcactttctgaaagagttagcagagtatcatcaggccaaggaaagttgtaatatggagactcagacttcgagcacgtttaatcgcgactcactggctgagaagttgcagctgatagatgaccagtttgcggacgcctatcctcagagaattaagttcgaaagcctcgagatcaagctcaatgaatataaaagggagatcgaggaacagttacgcgcagaaatgtgtcaaaaactgaagtttttcaaggacaccgaaattgcaaaaatcaagatggaagccaagaagaaatacgaaaaggaattaacgatgtttcaaaacgatttcgaaaaagcttgccaagcaaaatctgaagctctggttctgcgggagaagtccacgctggagagaatacacaaacaccaggaaattgaaactaaagagatctatgcccagcggcagctcctgttaaaagatatggacctgcttaggggaagagaggcagaactgaagcagagagtggaggcttttgaactaaatcagaaactccaggaagagaaacacaagtcaattactgaagctctccggagacaggaacagaatataaaatcctttgaagagacctacgaccggaagctgaagaacgagttgttgaaatatcagctcgagctgaaagatgattacattatccgaaccaatcgcttgatagaggacgagcgaaaaaacaaggaaaaagctgtgcaccttcaagaagaacttattgccatcaattccaagaaggaagagctcaatcagtcagtcaatagagtcaaagaacttgagctggaattggagagtgtgaaggcccagagtttggccatcactaagcaaaaccatatgttaaatgagaaggtgaaggagatgtcagattattcattgcttaaagaagagaagctcgagctcctagctcagaataagctcctcaagcagcagctcgaggagtctaggaatgagaatcttcgcctgctgaataggcttgcccagcctgccccagagctagccgtgttccagaaagaacttcggaaggccgagaaagctatagtggttgaacacgaagaattcgagtcatgcagacaggctcttcacaaacaactccaagacgaaattgaacattctgcccagctaaaagcccagatccttggttacaaagctagcgtcaaatcacttacgactcaggtggcagacttgaaactgcagttaaagcagacccagaccgccctggagaacgaagtgtactgtaacccgaaacagagcgtaattgatagatcagttaacggcttgattaacggcaacgtggttccttgcaacggcgagatttccggagattttctcaacaaccccttcaagcaggagaacgtgctcgcccgtatggtggcctccaggattacaaactacccaaccgcctgggtggagggatcttcacctgactccgacttggaattcgtggcaaataccaaggcaagagtaaaagaactgcagcaggaagctgagaggctagaaaaagccttccgatcttaccacagacgagtgattaaaaactccgcgaagagccctttggccgcaaagtccccaccatccctccacctcctcgaggcctttaaaaatataacctcttctagcccagaacggcacatctttggcgaagacagggtggtgagcgaacagccgcaagtcggcaccttggaagaaaggaatgatgtcgtcgaagctttgacaggatccgccgcatccaggctgagaggaggtacaagctcccggagattgagttcaactcccttacccaaagctaaacgatctctggaatccgagatgtacctggaggggttaggcaggagtcatattgcctccccatccccttgcccagatcgtatgcccctgccgtctcccaccgagtctcgtcactccctgtccatcccgccagtttcgagtccccctgagcaaaaggttgggctgtaccgtcgacaaaccgaattacaggacaagagcgagttctctgacgttgacaagttggccttcaaagacaatgaggagtttgaaagcagtttcgagtccgcgggtaatatgccccgacaactcgagatgggaggtttatcacctgccggtgacatgtcccatgtagacgcagcagccgcagccgtgcctcttagctaccagcacccaagcgtcgaccaaaaacagattgaggagcagaaggaggaggagaagatccgagagcaacaggtgaaggagcggcgacaacgcgaagaaagacggcagagcaatcttcaggaagtgctggaacgtgaacggagagaacttgaaaaactgtatcaggagcgtaagatgattgaagagagtctgaaaattaaaattaagaaagagttggagatggaaaatgagctggagatgagtaatcaagaaattaaagacaagtccgcccatagtgaaaaccccttggagaagtatatgaaaatcattcagcaagaacaggaccaggaatcagccgataaatctagcaagaaaatggtccaggaaggtagtttggtggatacactacagagttccgataaggtagaatctctcactggattctcccatgaggaactggacgactcctggtag

SEQ ID NO: 233591 - DNA, 2919 bp, synthetic construct
  misc_feature 1..2919: note = Description of Artificial Sequence: Synthetic coding sequence
  source 1..2919: mol_type = other DNA
atgatggcacagtcgaatatgttcacagttgccgatgtcctgtcgcaagatgagctgcggaaaaaactttaccaaacgtttaaggatcgagggattctggatactttaaaaacccaactgcgtaatcagctgattcacgaactcatgcatcctgtgctctccggagagctgcaacctagaagcatttcggtggaaggatcatcgctgctcattggagcttccaatagtcttgttgctgaccatcttcagaggtgcgggtacgaatactccctgagtgtgttttttcccgaatctggattggccaaggaaaaggtgtttacaatgcaggatctcctccagttgattaaaattaaccctacgagttctttgtacaagtctctcgtgagtgggtcagataaggaaaaccagaagggattccttatgcatttcctgaaggagctggctgagtaccaccaggcaaaggaatcatgcaatatggagacccagacatcttctacatttaatagagatagcctcgccgagaagttgcaactgatagatgatcaatttgccgacgcctacccccagcggataaagtttgagagcctcgaaataaaactgaacgagtataagagggagatagaggaacaactgagagctgaaatgtgtcagaagctcaagttcttcaaggatacagaaattgccaagatcaagatggaggcgaagaagaagtacgagaaggaacttaccatgttccaaaacgactttgagaaagcatgtcaggcaaaaagtgaggccctcgtgctgcgggagaagtcgacgttagaaagaattcacaagcaccaggaaattgaaaccaaagaaatctatgcccaacgtcagcttcttttgaaggatatggatctgctaagaggtcgggaagcggagttgaaacagagggttgaagcttttgagctgtaccagctcgaacttaaggacgattacataatccgaacaaatagactgatcgaggatgagcgcaaaaacaaggaaaaagccgtccacctccaggaagagctgatcgccattaacagcaaaaaagaagagctcaaccagagcgtcaatagggtgaaagagctggaactcgaactcgagtccgttaaggctcaatccctggcaatcaccaagcagaaccacatgcttaacgagaaggtcaaagaaatgtcagattactcactgcttaaggaagagaagttggaactgctcgcgcagaataagctgctcaagcagcagctcgaggagtccaggaacgagaatctgcgactactgaatcgccttgctcagccagcccctgagcttgctgtgttccaaaaagaactgaggaaagctgagaaggctatcgtggtggaacatgaggaatttgagagctgccggcaagccctacacaaacagctacaggacgaaattgagcatagcgcccagcttaaggctcagatcttggggtacaaggccagcgtgaaatcactcaccacccaggtggccgatctcaagctgcagttgaaacaaacccaaacggccctcgaaaacgaagtttattgcaacccgaagcagtctgtcattgatcggagtgttaacggactgatcaatggcaatgtcgttccctgcaacggcgaaatctccggcgatttcctaaataatccttttaaacaagaaaacgtcctcgcacggatggtcgcttctcgcattacaaattatcccactgcttgggttgaaggatcctcccctgactccgatctggagtttgtggcaaataccaaggcgagagtgaaggaactacagcaggaagctgagagactggagaaagcctttcgttcataccaccgcagagtcattaagaacagtgccaagagtccccttgcggctaagagtccgccatcactgcacctgctcgaggcctttaaaaacattacatcatcttctccagagcgacatattttcggcgaggaccgggtggtatctgagcaaccacaggtgggcaccctggaggaacggaatgacgttgtggaagcactcaccggctccgcagctagccgcctgcgaggcggtacatcctcaagacggctgtcttccacccctctacccaaagcaaaacggagcctggagtcggagatgtacctcgagggcctgggcagatcccacattgctagcccaagcccctgcccggatcgcatgcccttaccttcacccacagagtctcggcacagcctgtccatccctccggtgagttctcctcccgaacagaaagtcgggctctaccgaaggcagactgagttacaggataaatcagagttttcagacgtcgataaactggcatttaaagataacgaggaatttgagagttcttttgagagcgccggaaatatgccgaggcagcttgagatgggtgggttatcacctgcaggggacatgagccacgttgatgcagcagccgcagccgtcccgctatcatatcagcacccatcagtagatcagaaacaaatagaggagcagaaagaggaggagaaaatcagggagcagcaagttaaggagaggcgtcagcgagaggagagaaggcagtccaaccttcaggaggtcctggaaagagaaagaagagagttggaaaagctctatcaggagagaaaaatgatcgaggagtcgctgaagatcaagattaagaaagagctcgaaatggagaatgaactggagatgagcaaccaggagattaaggataaaagcgctcactctgaaaacccactcgagaaatacatgaagataatacagcaggagcaggaccaggaatccgctgacaaaagtagtaagaagatggtgcaggaaggatctctggttgatactctgcaaagcagcgataaagttgagtcgttgactggcttcagccacgaagaactagatgactcttggtag

SEQ ID NO: 233592 - DNA, 2619 bp, synthetic construct
  misc_feature 1..2619: note = Description of Artificial Sequence: Synthetic coding sequence
  source 1..2619: mol_type = other DNA
atgcattttctgaaggaactcgcagagtaccaccaggcaaaagagagttgcaacatggagacgcaaacctccagcaccttcaaccgggactcattagcagagaaattgcaactcatagatgaccagtttgcagatgcctaccctcagcgcattaaatttgagtctttggagattaagctgaacgaatataagagagaaatcgaggaacaactgcgtgccgagatgtgccaaaagctgaagttcttcaaggataccgaaatagccaagattaagatggaggctaagaaaaaatatgagaaggaattgaccatgtttcagaacgatttcgaaaaagcttgccaggctaaatcagaagccctcgtgctccgtgagaagtctactctcgagcgcattcataagcaccaagagatcgagactaaagagatctatgctcagagacagctactactaaaagatatggatctcctccggggacgagaagctgaactcaagcagcgcgtcgaggcctttgaacttaaccagaagctgcaggaggaaaagcataagtctattacggaagcactccgcaggcaagagcagaacattaagtcgttcgaggagacatacgatagaaagctgaagaacgagctgctgaaatatcaactggagttgaaagatgattatatcattagaacaaatcgtctcatcgaggatgagcgtaagaataaggaaaaggcagtgcatcttcaggaggagctaatcgcaattaatagtaagaaggaagaactgaaccagtctgtgaacagggtgaaagaattagaactggaactggagtctgtgaaagcccagagcttggctattacaaagcagaatcacatgcttaacgaaaaggtcaaggagatgtctgattattcactccttaaagaggagaaactggagctgctcgcccagaataagttattaaagcagcaacttgaagagagcagaaatgagaatctcaggctgttgaatagactagcccagccggcacctgagctggctgtgttccagaaggagctacgcaaagcggagaaagcgattgtggtcgagcacgaggagtttgagtcatgtagacaggcactccataaacagctccaagacgaaattgaacacagcgcacagttgaaagcgcaaatcctgggatacaaggcaagtgttaaaagcctcaccacacaagtggcagatctcaaactccaacttaaacagacgcagacagccctggaaaatgaggtgtactgtaatcccaagcaaagtgtgattgacaggtcagtgaacggattgatcaacggaaatgtagtgccctgcaacggcgagatctcgggtgatttcctgaataacccttttaaacaagagaacgtcctggcacggatggtggccagcagaatcaccaactaccccaccgcctgggtggagggcagtagtccagattcggatcttgagttcgtcgcgaacactaaggcacgggtgaaggaactgcagcaagaagcagagagactggaaaaggctttcaggagctaccatagaagggtgataaaaaatagcgcaaaaagtcctttggcggcaaagagcccgccttccctgcacctgctggaagcctttaagaatatcacttcatccagccccgaacgccacatttttggtgaagatcgggtggtgtccgaacaaccacaggtgggaactttagaagaacgaaacgatgtcgtggaagccttgacaggctccgccgcttcccggctcaggggtggaaccagttcccgacgattgtctagcaccccccttcctaaggccaaacggtcgttagaatctgaaatgtacctggagggcctcggaaggtctcacatcgcatcaccgtccccttgtccggataggatgccccttccttcccccacagagtcaagacactctttgtcgattccgcctgtctcatccccacctgagcagaaagtggggctgtaccggagacagactgaactgcaagacaagagcgaatttagcgacgtggataagctggccttcaaagataatgaggagtttgagtcgagtttcgaatcagctgggaacatgccgaggcagctggaaatgggaggcctgtcccctgccggtgacatgtctcacgtggacgcagctgccgctgcagtgcctttgtcttaccagcatccctccgtggatcagaaacagatcgaagaacaaaaggaggaggaaaaaatccgggaacagcaagtcaaggagaggcgacagcgggaggaacgtaggcagagcaacctgcaggaggttctggagcgggagagaagggagcttgaaaagttgtatcaggaacgtaagatgattgaagagtccttgaaaataaaaatcaagaaagaacttgagatggagaatgagctggagatgagtaaccaagagataaaggacaaatccgcacactccgagaatccgctggagaaatacatgaagattatccagcaggagcaagaccaggagagcgcagacaaaagtagtaagaaaatggtgcaagaagggtcactggtggacaccttgcagtcttctgataaagtcgaatctttgacagggtttagccatgaggagctggatgactcttggtag

SEQ ID NO: 233593 - DNA, 1104 bp, synthetic construct
  misc_feature 1..1104: note = Description of Artificial Sequence: Synthetic coding sequence
  source 1..1104: mol_type = other DNA
atgatggctcagagtaacatgtttaccgtggccgatgtgctgtcccaggatgaactccggaagaaattataccagacttttaaagatcgaggcatcttagacaccttgaaaactcaactacgcaatcagctgatccatgaactgatgcatcccgtgctttctggcgaactgcagcctaggagtatttctgtggagggatcctcactgcttataggtgcaagcaattccctggttgccgatcacttgcagcgatgcgggtacgaatactcactgtccgttttttttcctgaatcaggccttgccaaggaaaaagtgtttacaatgcaggatctattacagttgatcaagatcaaccctacatcttccctctataaaagcctcgtttcgggcagtgataaagaaaatcagaaaggtttcctcatgcactttctcaaagaattagcggagtatcatcaggcaaaggaaagctgcaacatggaaacacagacaagctcaacgttcaatcgcgatagcctggccgaaaagctgcagcttatcgatgaccaattcgcagacgcctaccctcagcgaatcaagtttgagtccctagaaatcaagttgaatgaatacaagcgcgagattgaagaacagctccgggctgaaatgtgtcagaaactgaaattcttcaaggacaccgaaatcgctaaaatcaagatggaagcaaaaaagaagtacgagaaggaactcacaatgtttcagaatgattttgaaaaggcctgccaggctaaatcagaggccttggtgctcagggagaagtctacactggagagaatacacaagcatcaagagattgaaactaaggagatctacgctcagagacagctgctacttaaggacatggatctcctgagaggtcgcgaggctgaattaaaacagcgtgtagaggcatttgaattgaaccaaaaactgcaggaggagaaacataaaagcataaccgaagcactgagacgccaagagcagaacattaaatcctttgaggaaacctacgatagaaaactgaaaaatgagctgttaaacttccataggctccacggtgtctgcttggctctggggatattaatctag

SEQ ID NO: 233594 - DNA, 1017 bp, synthetic construct
  misc_feature 1..1017: note = Description of Artificial Sequence: Synthetic coding sequence
  source 1..1017: mol_type = other DNA
atggtgttcctctgcattttcaaagagctcgctgaataccaccaggccaaggagagctgtaatatggaaacccagacttcatcaacattcaaccgcgattctttggcagagaaactacaactgatcgacgaccaatttgctgacgcatacccacaaagaatcaaatttgagtcactcgagattaagctgaacgagtacaagcgtgagatcgaggagcagctgagagccgagatgtgccagaagctgaaattttttaaggatacagagattgccaaaattaagatggaagccaagaagaagtatgagaaagaactgacgatgtttcagaatgatttcgagaaggcctgccaggccaagagtgaagccctggtgttgcgagagaagtccaccctggagcgcatccataaacatcaggagatcgagacaaaagagatatacgctcagcgccagctgctgttgaaggacatggacctgcttcggggaagggaagccgagctcaagcaacgagtggaagcattcgagctctaccagctcgagttgaaggatgattatatcatcaggaccaatcggctaatcgaagacgagcgcaagaataaggagaaggcagtgcatcttcaagaggagttgatagccattaatagtaagaaggaggagttgaaccagtccgtgaaccgagttaaggagctggaactggaattagaatccgtgaaggcccagtccctggcgattacaaagcagaatcatatgctcaacgagaaagtgaaagaaatgagcgattatagtttactcaaggaggaaaagctggaactattagcacagaacaagctgcttaaacagcaattagaggaatctagaaacgaaaatctgcgactgttgaataggctcgcccagccggcacccgagctggccgtgtttcagaaggagcttcgcaaagctgagaaagccatcgttgtagagcacgaagagtttgaatcatgtcggcaagctctgcataaacagctgcaggatgagccctag

SEQ ID NO: 233595 - DNA, 2586 bp, synthetic construct
  misc_feature 1..2586: note = Description of Artificial Sequence: Synthetic coding sequence
  source 1..2586: mol_type = other DNA
atggcccattacccgactcgcctgaaaacacgcaagacctacagttgggtcggtaggcctctcctagatcgaaagctccattaccagacctaccgcgagatgtgtgtaaagactgagggatgctcaacagagattcatattcaaattggacagtttgtgctgattgagggggacgacgatgagaatccatacgtggccaagttgttggaactgttcgaagacgattctgatcccccaccaaagaaaagagccagggtccagtggtttgtcagattttgcgaagtcccagcttgtaaaagacatctgctcgggcgtaaaccaggcgcacaggagattttttggtacgattaccctgcatgcgacagcaacataaatgccgaaaccatcatcgggctcgtgcgcgttatccccctggccccaaaggacgttgtgccaactaatcttaaaaatgagaaaacgctgttcgtgaaactctcatggaacgagaagaagtttcgtccattgtcctccgagctgttcgccgaactcaacaaaccccaggagagcgcagccaagtgccagaaacccgttcgcgctaagtcaaagagcgctgagtcacccagctggaccccagctgagcatgtggccaaacgaatcgagagccggcatagcgcttcaaaaagtcgtcagactcctacacacccccttacacctcgggctcgaaagaggctggaactggggaacttggggaatccacaaatgagccaacagacctcctgtgcaagtctggatagtcccggaagaatcaaacggaaagtcgcattctcagagattaccagtccgagcaagaggagtcagcccgacaagttacaaaccctcagcccagccctgaaagctcccgagaagacgagggaaactggcctaagttatacagaagacgacaagaaggcaagccccgagcaccgaataattctgcggacacgcatcgcggcaagtaagacaattgatatcagggaagagagaaccctgacccctatctctgggggtcaaagatcctcggttgtgccgtctgtgatactcaaacccgaaaatatcaaaaagcgggatgcaaaggaggcaaaggcccaaaatgaagcgacctctacaccccatagaattcggaggaaaagctctgtcctgacaatgaatagaattaggcagcaactgcggttcctgggcaactccaaatctgaccaggaggagaaggagatactgcccgcagccgagattagcgattcaagtagcgacgaggaagaggcatctactccgcctttaccgagaagggcccctagaaccgtgagcagaaacctaagatcctccctgaaatcgagcttgcatactcttaccaaagtccctaaaaaaagcctaaagccaagaaccccccgttgtgccgcacctcagattagaagcaggagccttgcagcacaggagccagcttcagtgctggaagaggctaggctgcggctgcacgttagtgcggtcccagagtctctgccctgcagagagcaggagttccaggacatttacaacttcgtggaaagtaagcttcttgaccacacaggcggatgcatgtatatctcaggtgtgcctggcaccggcaaaacagctaccgtccacgaggtcattcggtgccttcagcaggctgcacaggcgaatgatgtgcctccattccagtacattgaggtaaatggcatgaaattaacggagccccaccaggtttacgtacaaattctccagaagctgaccgggcagaaggccaccgctaatcacgccgctgagctgctggctaagcaattctgcacgcgcggttcaccccaagagacgactgtcctgctggtcgatgagttggatctgttatggacccacaagcaggatatcatgtacaacctgttcgactggccaactcataaggaagcacgcttagtagtcctggccattgctaatactatggacctccctgaaaggattatgatgaacagagtctcttctaggctggggctaactcggatgtgcttccaaccttatacatatagccagctgcaacagatattgagaagtaggctgaagcacctgaaagcgtttgaagatgatgccatacaactggttgcgcgtaaagtggccgcactctctggcgacgcgaggcgctgcctggatatttgccggagagccacagaaatctgtgagtttagccagcagaagcctgattctccaggactggtgaccatcgcccactctatggaagccgtcgatgagatgttcagctctagctatatcactgcaattaagaattcaagcgttttagagcagtcatttctgcgagctatcctagcagagttcaggcgatctggcctcgaggaggcaaccttccagcaaatttactcgcaacatgtcgctttgtgtcgtatggaagggctgccataccccactatgtcagagactatggccgtttgtagtcacttgggcagttgtcgcctcctccttgtcgaaccatcaaggaacgacttgctattgcgggtccgtcttaacgtttcacaagacgacgtgctgtatgcactgaaggatgaatag

SEQ ID NO: 233596 - DNA, 2586 bp, synthetic construct
  misc_feature 1..2586: note = Description of Artificial Sequence: Synthetic coding sequence
  source 1..2586: mol_type = other DNA
atggctcattacccaacccggttgaagactcgcaaaacttacagctgggtcggtagacctctccttgaccgcaaactgcactaccagacgtaccgcgaaatgtgcgttaagacagagggatgttctacagagatacatatacagatcgggcagttcgtgcttattgagggagatgacgacgaaaacccatacgtggccaagctgcttgagctgtttgaggacgattctgacccgccaccaaagaaaagagccagggtccagtggtttgttagattttgtgaggtaccagcttgtaagagacatctgctgggaagaaaacccggagcacaggaaatcttttggtatgattaccccgcttgcgattctaacattaacgccgaaactatcattggtcttgtgcgggtcatccctctcgcacctaaggacgtggtccctaccaatctgaagaatgagaagaccctgtttgtcaaactgtcgtggaacgagaaaaaattcaggcccctgtccagcgagctgttcgccgagctgaataaacctcaggaaagcgctgctaaatgtcagaaacctgtgcgtgccaagtccaagtcagccgaatccccgtcatggacgcccgcagagcacgtggcaaaacggattgagtcgagacactcagccagtaaaagccgccagaccccaactcacccgttgacaccacgggctagaaaacgattggaactgggcaacttaggaaacccacagatgtcccaacagacctcgtgcgcatcactcgattctcctggacggattaagcgcaaagtcgcattttcagaaatcacaagtccttctaagaggtcgcagcccgataagttgcagaccttatctcctgcacttaaggctcctgagaagactagggagacaggtcttagctacacagaggacgacaagaaagctagccccgaacacaggataattctgcgcaccaggatagcagctagcaaaactattgacatcagagaagagcgaacgctgacccctatttccggcggacagcgttcctccgtggtccctagtgtcattctgaaaccagaaaacatcaagaagcgagacgccaaagaggctaaagcgcaaaacgaggctacatccaccccacaccggatacggaggaagtctagcgtgctgacgatgaatagaatcagacagcagctgaggtttctggggaacagtaagtctgaccaggaggagaaagagatcctgccagcagctgaaatttccgactcgtcctcagacgaggaagaggcgtccacgcccccactacccaggagggctccacggaccgtgtccaggaacttgagatcatctctgaagagctctctgcacactctaactaaagtgcccaagaagtcccttaagcctaggacccctagatgtgccgctccccaaatcagaagtcgatcactggcagctcaggaaccggcatctgtcttagaggaggcgagactgaggctgcatgtgagtgctgtgccagagtcactgccgtgtagagagcaggaattccaagacatttataatttcgtcgaatcaaagctgctggaccacacaggcggttgcatgtacatctccggggtacctggtacaggtaaaacagctaccgtccatgaagtcatcaggtgtctacagcaggctgctcaggctaatgacgtgcctcccttccaatatatagaagtgaatggaatgaaactgacagagccacatcaggtttacgtgcaaattctccaaaagctgaccggccaaaaggccactgccaaccacgcagccgagctgctggcgaaacaattctgcactaggggctcgccacaggaaacaacggtactactagtcgacgagctagacctcctgtggactcataaacaagacattatgtataacctgtttgactggccgacccataaagaggccagactcgttgtgcttgccatcgcgaacactatggatctgccagagagaatcatgatgaaccgagtgtcctcacgcctcgggctgacgaggatgtgctttcaaccatacacatattcccaactgcaacagatcttacgtagtcgacttaaacacctgaaagcattcgaggacgacgctatccagttggtcgcacggaaggtcgccgctctatctggcgacgcacgaagatgccttgacatctgcaggcgcgcaaccgaaatatgtgaattctcacaacagaaacccgactcacctgggcttgtcaccatcgctcacagcatggaggccgtggacgaaatgtttagctcaagctacattactgcaatcaagaacagctcagtgcttgaacaatccttcctccgggctattctggctgaatttcgaagaagtgggcttgaggaggccacatttcaacaaatttattctcagcatgtagctctttgtagaatggagggacttccttaccctaccatgtccgagactatggctgtgtgcagccatctgggatcctgtcggttgctgctagttgaacccagcaggaacgatttattgctacgcgtccgcctgaatgtgtctcaggatgacgttctttatgcactcaaagatgagtag

SEQ ID NO: 233597 - DNA, 1599 bp, synthetic construct
  misc_feature 1..1599: note = Description of Artificial Sequence: Synthetic coding sequence
  source 1..1599: mol_type = other DNA
atggagaagagcaacgagaccaatggctatctggactctgcgcaggccggacccgctgcaggacccggagcccctggtacagctgcagggcgagctagaagatgcgcaggttttctgaggaggcaggctctggtgttattaactgtttcaggcgtgctagcgggtgctgggttaggcgctgctctgcgagggctctcactcagcaggacccaggtcacatatttggccttccccggtgagatgctgctgcgcatgctgagaatgattatccttccactcgtggtctgttccttagtcagcggagcagcaagtttagacgcctcgtgcctgggtcgcctgggtggcatcgctgtcgcctattttggactcacgacactttctgcttctgctctcgcagttgctctggcctttataatcaagcccggaagcggcgcacagacacttcaatccagtgaccttggcctggaggatagtggccctcctcctgtcccaaaggagactgtagattcctttcttgatctcgccaggaacttatttccctcaaacttggttgtcgcggcttttcggacgtatgcaacagattacaaagtggtgacgcagaactcaagttcgggaaacgtcacacacgagaaaattccgattgggactgagatcgagggcatgaacatcctgggtcttgttctctttgcgctggtgctcggcgtcgccctcaaaaagttgggttcggagggggaggatctgatcagattcttcaactcgcttaacgaggctaccatggtgttggtgtcctggattatgtggtacgtgcctgtcggcatcatgtttttggtcggttcgaagatcgtggaaatgaaagacattattgtattagtgactagcctgggaaagtacatctttgcctctattctaggacacgtgatccatggagggatcgtcctgccactgatctacttcgtcttcaccaggaagaacccctttcgttttctgctcgggctgctggccccatttgcgaccgccttcgcgacctgttctagctcagctactcttccttctatgatgaagtgcattgaggagaacaatggtgttgacaagagaatatcccgtttcatcctccctatcggggcaacggtgaacatggacggggctgccatctttcagtgtgtggctgcagtctttattgcccagcttaataacgttgagctaaacgcgggacagatttttacaatcctcgtgaccgccactgctagttccgtgggagctgcaggagtccccgctgggggagtgctcacgatcgctatcatactggaggcaattgggctgcccacccacgacttgcccttaattctcgctgtcgactggattgtggataggacaaccacagtggtgaacgtcgaaggggatgctctgggggcaggtattctccatcaccttaatcagaaagcgaccaagaaaggggaacaggaactcgctgaggtgaaagtggaagccataccgaattgtaagagcgaagaagagacgagtccactcgtgactcatcagaaccccgcagggcctgttgcctcagcgcctgagttggagagtaaagaaagcgtcctctag

SEQ ID NO: 233598 - DNA, 330 bp, synthetic construct
  misc_feature 1..330: note = Description of Artificial Sequence: Synthetic coding sequence
  source 1..330: mol_type = other DNA
atgtctaaaccagagctgaaagaggacaaaatgttagaggtgcacttcgtcggcgatgacgacgtccttaatcatattttagacagggaaggcggagccaaactgaaaaaggaacgtgcccagctattggtgaaccccaaaaagatcatcaagaagccagaatacgacttggaagaggacgaccaggaagttctgaaagatcaaaactacgtggagatcatggggagagacgtgcaggagtctctgaaaaacgggtctgctacagggggaggcaacaaagtttattctttccaaaacagaaagcattctgagaagatggccaagctctag

SEQ ID NO: 233599 - DNA, 219 bp, synthetic construct
  misc_feature 1..219: note = Description of Artificial Sequence: Synthetic coding sequence
  source 1..219: mol_type = other DNA
atgtccaagcctgagttgaaggaggataaaatgctggaggtgcattttgtgggcgacgacgacgtcctgaatcatattctcgaccgagaaggtggtgccaaattgaagaaagagagagcacagttgctcgtaaatccaaaaaaaattataaagaaacctgagtacgatctggaagaagacgatcaggaggttttaaaagatcagaattatgtcgaatag

SEQ ID NO: 233600 - DNA, 2139 bp, synthetic construct
  misc_feature 1..2139: note = Description of Artificial Sequence: Synthetic coding sequence
  source 1..2139: mol_type = other DNA
atggctacctctagtatgtctaaaggctgcttcgtgtttaagccaaacagtaaaaagcgcaagatcagcctgcctattgaggactattttaacaagggcaagaacgagcccgaggattcgaagctacggttcgaaacataccagttaatttggcagcaaatgaaatctgaaaacgaacgcttacaggaggagctgaacaagaatctgtttgataatctgatagagtttctccagaagagtcattccggctttcaaaaaaatagccgcgacctgggaggacagattaagcttcgagagattcctaccgcagctctagtgctaggcgtcaatgtaaccgatcacgatctaactttcggaagcctgacagaagcgctgcagaacaacgtgaccccttacgttgtgagccttcaggccaaggattgccctgatatgaaacatttcctacaaaaattgatctcacaattgatggactgctgcgttgacataaagtctaaggaagaggaatcagtgcacgtaacccagagaaagactcattattcgatggattcactgtcctcttggtatatgacagtcacccagaagaccgacccaaagatgctgtcaaaaaagaggaccacctcttcgcagtggcagagcccacccgtcgtggtgattctgaaggatatggagagttttgctaccaaagttctgcaggacttcatcataatctcatctcaacacctgcacgaattccctctgatcctgatcttcggaatagccacctcccccataatcatacaccgcctccttccccatgccgtcagctcacttctgtgcatcgaactgttccagagcctgtcatgcaaagagcacctgacaaccgtgctagataaactgttgctgaccacccagtttccctttaaaatcaatgaaaaggtgcttcaggtgttgacaaatatcttcctgtaccacgatttttcagtccagaacttcataaaagggttacagctgagtttacttgaacacttctactcacaaccattaagcgtgctgtgctgtaatttaccagaggccaaaaggaggattaactttctgagtaacaaccagtgtgagaacatacgcagactgccgtctttccgaagatacgtcgaaaagcaagcctctgaaaaacaggtcgccctcctgacgaatgaacggtacttgaaagaggaaacacagctgctcctggagaacttacacgtttatcacatgaactatttcctggtgctgagatgcctccacaagtttacctcatccctccctaaatacccattgggacgccagatcagggagttatactgcacctgtctggagaaaaatatatgggattctgaggagtacgcctccgtcctgcagctgttgcgtatgctggcaaaggacgagcttatgactattctggagaaatgcttcaaggtgttcaaatcatattgcgagaaccacttggggagcaccgccaaacgcatcgaagaatttctggcccaattccagtcacttgatgccgagactaaggaagaagaagatgcctcaggttctcaacccaagggcctacagaagactgacctgtaccacctgcaaaagagcctgttagagatgaaagagctgcgcaggagtaagaagcaaaccaagttcgaagtgttgagggaaaacgtggtaaacttcattgattgcctagtccgcgagtatcttctcccacctgagactcaaccgctgcatgaggtcgtgtacttttcggccgctcacgctttgcgcgagcacctgaatgccgctcccagaatcgcgctgcacaccgccctcaacaatccatattattatttgaagaatgaagccctcaaatccgaagaaggatgcatccccaatatcgctcctgatatctgtattgcttataagctgcatttggagtgtagtcgtttgatcaatttggtggactggagcgaagcgtttgccaccgtggtgaccgcggctgagaagatggatgccaacagcgcaacatcagaagaaatgaatgagatcatacacgctagattcattagagccgttagcgaactggagttattggggtttattaaacccaccaagcagaaaaccgatcacgttgcaaggctgacatggggagggtgctag

SEQ ID NO: 233601 - DNA, 2136 bp, synthetic construct
  misc_feature 1..2136: note = Description of Artificial Sequence: Synthetic coding sequence
  source 1..2136: mol_type = other DNA
atggcgacgtccagtatgtctaaaggatgttttgtatttaaacccaatagcaagaagagaaaaatctcactgccaatcgaggactacttcaacaagggaaaaaatgagcccgaagatagcaagttaagattcgagacctaccagctcatatggcaacaaatgaagagcgaaaacgagcgcctgcaggaagagttgaataagaacctattcgataatctgatcgaattccttcagaaatcccattccggcttccaaaagaatagccgcgatctgggtggacagatcaaactaagagagatccctactgctgcgcttgtcttgggtgtaaacgtgactgaccatgacctcacgttcggcagcctgacagaggccctgcaaaacaacgtgacgccatatgtggtgagccttcaggccaaagactgccccgatatgaagcactttctgcagaaacttataagccaactgatggattgctgcgtagatatcaagtcaaaggaggaggaaagcgtccatgtgacccagcgcaagacacattacagcatggactccctctcttcatggtatatgaccgtgacacaaaaaacagaccccaagatgctgtccaagaagcgcactaccagcagccagtggcaaagtccacccgtggttgtcatcctcaaagacatggagtcgttcgcgaccaaggtcctgcaagattttatcatcatatcatcccaacacctccacgagtttccactcattctgattttcggaattgcaactagccctataataattcacaggctgctgcctcacgccgtgagctcgctgctgtgcatagaactctttcagtccctgtcctgtaaagagcacctcactacagttctggataagctactgcttaccactcagtttccatttaagatcaacgagaaagtcttacaggtcctgacgaatattttcttatatcacgatttctctgttcagaatttcattaaggggcttcaattatcactgctcgagcacttttattctcaaccgctctccgtactgtgttgtaatctgccagaggccaaacgtcgtatcaacttcctttcgaacaatcaatgtgagaacattcgccgtctgccaagctttaggagatacgtagaaaaacaagcatctgagaaacaggtagccctgctcacaaatgagagatacctgaaagaagaaacccagctcctgcttgaaaacctgcatgtgtaccacatgaattatttcctcgttttgcgttgcttacacaagtttacttccagtctgccaaagtaccctctaggcaggcagatacgcgagctttattgtacctgcctggagaagaatatctgggatagcgaggagtatgcctcagtgcttcagctgctccgcatgctcgcaaaggatgagctgatgacgatccttgagaaatgctttaaagtgtttaagtcttattgcgagaatcaccttggatccacggccaaacgcatagaagaattcctggctcagttccagtctcttgatgaaactaaagaggaagaagacgcttctggatcccagcccaagggactccaaaaaacagatctctaccatctccaaaaaagcctgcttgagatgaaggaattgagaagatccaaaaagcaaacaaaattcgaggtccttcgagagaatgtcgtcaactttatcgattgtctggtgcgcgaatatttattgcctcctgagacgcagcctttgcacgaggtggtgtacttcagcgcagcccatgccctccgggagcacctgaacgccgctcctagaattgcacttcacacagctctcaataatccctactactatttgaaaaatgaagcccttaaatcagaggaggggtgcataccaaacatcgccccagatatttgtatcgcgtataaactacacttggagtgtagtagactgatcaatcttgtcgattggtctgaggcttttgccactgtggtgaccgcagccgagaagatggatgcgaactcagccacttctgaagaaatgaatgaaataatccatgctcgctttatccgggcagtctcagaactcgaactgttggggtttatcaagcctacaaaacagaaaacggatcatgtcgcacgactcacatgggggggatgttag

SEQ ID NO: 233602 - DNA, 1335 bp, synthetic construct
  misc_feature 1..1335: note = Description of Artificial Sequence: Synthetic coding sequence
  source 1..1335: mol_type = other DNA
atgaagtcggagaacgagcgcctgcaggaggaactcaacaaaaacctgttcgacaaccttattgagtttcttcagaaatctcactcaggtttccagaagaacagtcgcgatctgggaggacagatcaaacttagagagatccctactgccgctctagtgctgggagtcaatgtcactgaccacgatcttacctttggcagcctgactgaggctctgcagaataatgtaactccctacgtagtgagcctgcaggcgaaagattgtcccgacatgaaacacttcttgcagaaattgattagccagttaatggactgctgcgtcgacatcaaatcaaaagaagaagaatccgtgcatgtgacccagcggaaaacccactattcaatggatagcttatcatcctggtacatgactgttactcagaaaaccgacccaaagatgctcagcaaaaaaaggaccacttcctctcagtggcagagtcctccagtggtggtcatcctgaaggatatggaatcgtttgcgacaaaggtcctgcaggacttcattattatcagcagccaacacttgcacgaatttcctctcatcctcatcttcggaatagcaaccagccctataatcattcaccgactgcttccgcacgcagtgtcgtcactgctgtgcatcgaactgttccaaagcctgagttgtaaggaacatttgactactgtgctcgacaagctgctcctcacgacacagtttccttttaagattaacgaaaaagtgcttcaggtgttaacgaacatcttcctgtaccacgacttttctgtccagaacttcatcaaaggactgcagctgtccttgcttgaacatttttattcccaaccactttctgtactgtgctgtaatctgccagaagccaaacggcgaatcaacttcctcagcaacaatcagtgcgagaatatccgtaggttaccctccttccggaggtatgtggagaagcaggcatcagagaagcaagtcgccctgctgacgaacgagcgttacctgaaggaggagactcagctcttattggaaaacttgcatgtatatcatatgaattactttctggtattgaggtgcttgcataagtttaccagttcactgccaaagtacccactgggaagacagattagggagctgtactgcacctgtctcgaaaaaaacatctgggatagcgaagagtatgctagtgtcttgcagttgctgcgtttagggctggcttttctggatatccagctgttcggcgctcagtctggacaggagttattgctgccgctgtcttgggaggctaatccatcccatgccgctaacttgggctag

SEQ ID NO: 233603 - DNA, 1707 bp, synthetic construct
  misc_feature 1..1707: note = Description of Artificial Sequence: Synthetic coding sequence
  source 1..1707: mol_type = other DNA
atgaagcattttctccagaaactgatttctcagctgatggactgctgcgtggacatcaagagtaaagaagaggaaagtgttcatgtgacacagcgcaaaacacactattctatggattctctgtcttcctggtacatgactgtcacacaaaagacagacccaaagatgctaagtaagaagcgcaccacgagctctcaatggcagagccccccagtggtggtcatcctaaaggacatggaaagctttgctaccaaggtcctgcaggactttatcatcatcagtagtcagcatctgcatgagtttcctttgatcctcatattcggtattgctacttcacctataatcatacaccgattgctgccacatgcggtctcctccctgctgtgcatagagctcttccaatccctcagttgtaaggagcatttgacgacggtcctggataagctacttctgactacacagtttccttttaaaatcaatgaaaaagtgttgcaggtcctgacaaatatctttctgtaccacgatttcagtgtacagaactttattaaaggtctccagctgtctctgctggaacacttctactcccagcccctgagtgtgttgtgttgtaacctgcccgaggctaagcgtagaatcaattttctttcaaataaccagtgcgagaacattcggagactcccaagcttcagaaggtacgtggaaaagcaggcgagtgaaaaacaagtcgctttgctgactaacgagcgctacctgaaagaggaaacccagcttctgttggaaaacttacacgtgtatcacatgaattactttttggtcctacggtgtctgcataaattcactagttccctgccaaagtacccgttgggtcgtcagattagggagttgtactgcacctgcctggaaaagaacatctgggatagcgaagaatacgccagtgtgctgcagttgctgcgcatgcttgctaaagacgaactgatgactatactggagaaatgcttcaaagtgttcaaaagctactgtgaaaatcaccttggctcgactgccaaaagaatcgaggaattcctggcccagttccaatccctagatgagacgaaagaggaagaggacgcatcagggtcgcagccaaaagggctgcagaaaacagacctgtaccatctgcaaaaaagcctgctggaaatgaaggagctgcgaagaagcaagaaacagaccaaattcgaggtcttgcgagagaacgtagtcaatttcattgattgtctggtgcgggagtacctgttacctcccgaaacccagcctctgcatgaagtcgtatactttagtgccgctcacgcattgcgggagcacctcaatgctgctcctaggatcgctcttcatacggccttaaataacccatactattatctcaagaacgaagccctcaaaagcgaggaagggtgcataccaaacatcgctcctgacatatgtatcgcctataagctgcacctggaatgcagccggttaataaacttggtggactggtccgaggccttcgccacagtggtgactgccgctgaaaagatggacgcaaatagcgctacctcagaggaaatgaacgaaatcattcacgcacggtttatccgtgctgtcagcgaacttgagcttctcgggttcattaagcccaccaaacagaaaacagaccacgtggccaggctgacctggggaggctgttag

SEQ ID NO: 233604 - DNA, 1311 bp, synthetic construct
  misc_feature 1..1311: note = Description of Artificial Sequence: Synthetic coding sequence
  source 1..1311: mol_type = other DNA
atgtccagccgaaagtctaagtccaactctctcattcataccgaatgcttgtcgcaggtccagagaattttaagagagcggttttgccggcagagtccacatagcaatttgttcggcgtgcaggtgcagtacaaacacctatctgaactcctcaaacgtactgcgctccatggggagagtaactccgttctgattatcggccctcgcggatctgggaagactatgttgatcaatcatgcactcaaggagctaatggagatcgaggaggtgtcggagaatgtgctccaggttcatcttaatggcctactgcagatcaacgacaaaatagccctcaaagagattactcggcagctaaatctggagaacgtggtgggagacaaagttttcggaagctttgcagagaacctgtcctttcttctagaggccctgaaaaaaggggaccgaacctcctcttgtcctgtcatttttattctcgacgagtttgatctcttcgcacaccacaagaatcagactctgttgtacaatctcttcgacattagtcagtcggcccagacacctatcgcagtgatcgggctcacttgtagactggatatcctggagctgctggagaagcgagttaagagcaggttcagccatagacagatccatctgatgaacagtttcggcttccctcaatacgtcaagatctttaaagagcaactcagcttgcccgcagagttcccagacaaggtgttcgccgaaaaatggaatgagaacgtgcagtacttgtccgaggataggtctgtccaggaagtcctgcagaagcacttcaatatttctaagaacctacggtctctgcacatgctcttaatgcttgctttaaacagggtgaccgcctcacaccctttcatgacagcagtggacctgatggaagcctctcaactctgcagtatggactcgaaagccaatattgttcacgggcttagcgtcctggagatttgtttaataatcgccatgaagcatctgaacgacatctacgaggaagaaccttttaactttcagatggtttataacgagtttcagaagttcgtacagagaaaagcgcactcagtgtacaatttcgagaagcctgtcgtaatgaaggccttcgaacacttgcagcagctggagctgattaagccaatggagcgaacctctggaaactcccagcgcgagtatcagttgatgaaactactcctggataacacccagataatgaacgctctccagaaatatccaaactgccccactgacgtgcggcagtgggcaacctccagcctctcatggctgtag

SEQ ID NO: 233605 - DNA, 1311 bp, synthetic construct
  misc_feature 1..1311: note = Description of Artificial Sequence: Synthetic coding sequence
  source 1..1311: mol_type = other DNA
atgtcttctagaaaaagtaaatccaactcactgatccatacagagtgtctgagtcaagtgcagcggattctccgggagaggttttgcagacaaagtccgcattctaacctttttggtgtccaggtccagtataagcacctatcagaactgctgaagcgcaccgcattacacggcgagtcaaactccgtactaattatagggccacgaggatcgggtaagaccatgctgatcaaccacgctctcaaggagttaatggaaatcgaagaggtctccgagaacgtcctccaggtgcacttgaatggattgctgcaaattaacgataagatcgcccttaaggaaattactcggcagttgaacttagaaaacgtcgttggggacaaggtttttggctctttcgcggaaaacctttctttcctcctagaggcgctaaaaaaaggcgaccggacatcaagttgccctgttatctttattctggatgagtttgatctttttgcacaccataagaatcaaacccttttatacaacctgttcgatatatctcaatctgcccagactcccattgcggtcataggactaacctgccgcttggacattctggaactgcttgaaaaacgagtgaaatcgaggttttcacaccggcagattcaccttatgaactcgtttggattcccccaatatgtgaagattttcaaagaacagttatccctacccgctgagtttccagacaaggtttttgctgagaagtggaacgaaaacgttcaatacctctctgaagaccggagtgtgcaggaagtccttcagaaacacttcaatatctctaaaaatttacgcagcctccatatgctgttgatgctggcacttaatcgcgtgaccgccagtcatcccttcatgacggctgtggatctcatggaggcatcgcagctgtgcagcatggatagtaaagccaacatcgtccatggattgtccgttctggagatttgtttaataattgccatgaaacacctgaacgatatatatgaggaggaacctttcaactttcagatggtttataatgaattccagaaatttgttcagaggaaggcccactctgtatataatttcgagaaacctgtggtaatgaaagctttcgagcatttgcagcaacttgagttgattaagcctatggaacgcacttcagggaactcccagagggaataccagttgatgaagctcctgctggataatacccaaattatgaatgctttgcaaaaatatcccaattgcccaactgacgttcggcagtgggccacttcctcattgtcttggctttag

SEQ ID NO: 233606 - DNA, 1311 bp, synthetic construct
  misc_feature 1..1311: note = Description of Artificial Sequence: Synthetic coding sequence
  source 1..1311: mol_type = other DNA
atgtcttctcgtaaatcaaaatcaaacagcttgatccacactgagtgcctttctcaggtccaaaggatcctgcgcgagcgtttctgtaggcagagtcctcacagcaatctctttggcgtacaggttcaatacaaacatctgtccgagctgctgaagcgtacagcgcttcacggcgagagcaacagcgtcttgataataggacccagaggctcggggaaaaccatgttgatcaaccatgccttgaaggaattaatggagatcgaggaggtctctgaaaacgtcctacaggtccatcttaacggccttctccagattaacgataagattgcactcaaagaaatcacccgccaactgaacctggaaaacgtagtcggcgataaggttttcggttcgtttgctgagaacttgtcatttttattagaagcactcaagaagggcgaccggacatcttcatgccctgtgatcttcattctcgatgagtttgacctgttcgcacaccataagaatcagacactactgtataatctgttcgatatttcccaatcggcccagacccctattgcagttatcggtctgacttgccggttggacattctggaacttctcgaaaagagggttaaatcgaggtttagccacaggcagatccatcttatgaatagcttcggttttccccagtacgtgaagatcttcaaggagcagctgtccttgccagctgagttccctgataaagtgtttgcagaaaagtggaacgagaacgtacagtatctgagtgaggacagaagtgttcaagaagtgcttcagaagcattttaacatttccaaaaaccttaggtcgctgcacatgctgctcatgcttgcgttgaaccgggtgaccgccagtcacccctttatgaccgccgttgacctgatggaagcgtctcagctatgtagtatggatagcaaggcgaacatcgtgcacggcttatcagtgctcgagatctgccttataatcgccatgaagcatctgaacgacatctacgaagaagagccctttaacttccagatggtctataacgaatttcagaaatttgtccaaaggaaggcccacagtgtgtataactttgagaaacctgtcgttatgaaagctttcgaacacctgcagcagctcgagctgatcaagcccatggaacgaactagcggtaatagccagagggagtaccaacttatgaagttgctgctcgataacacccaaatcatgaacgcactgcagaaataccctaattgtcccactgatgttaggcagtgggctacatcaagcctaagctggttgtag

SEQ ID NO: 233607 - DNA, 438 bp, synthetic construct
  misc_feature 1..438: note = Description of Artificial Sequence: Synthetic coding sequence
  source 1..438: mol_type = other DNA
atgtctagtcggaagtccaagagcaacagtctgattcacacggagtgcttgagtcaggtgcagcgcatcctgcgggaaaggttctgcagacagagtccccattctaatctttttggagtgcaagtgcagtacaagcacctcagcgagttacttaagagaacggcactgcatggagaaagcaacagtgtgctgatcatcgggcctaggggctcaggcaaaacaatgttaattaaccatgccctgaaggagctcatggagatcgaggaagtgagtgagaacgtcctgcaggttcacttgaatggtttactgcagattaatgataagattgccctgaaggagattacgcgccagttgaatctcgagaacgtcgtcggagataaggtgttcggctcgttcgcggagaatctgtcttttctcctggaggccctcaaaaagtag

SEQ ID NO: 233608 - DNA, 384 bp, synthetic construct
  misc_feature 1..384: note = Description of Artificial Sequence: Synthetic coding sequence
  source 1..384: mol_type = other DNA
atgtcttctcgcaagagtaagtcaaattcactcattcacacagagtgccttagtcaagtccagagaatcctgcgagagcgcttctgcagacagagccctcactcaaacttatttggggtgcaggtgcagtacaaacatttgtcagaactactgaagagaacagccttgcacggagaatcaaatagtgtcctcatcatcggcccacggggatctggtaagactatgctcattaaccacgctctcaaagagctgatggaaattgaggaagtatctgaaaatgtcctacaggtccatctgaacggcctcctgcagatcaatgataagattgctttaaaagagattacccgccagcttaatctcgaaaatgtcgtaggagataagtag

SEQ ID NO: 233609 - DNA, 387 bp, synthetic construct
  misc_feature 1..387: note = Description of Artificial Sequence: Synthetic coding sequence
  source 1..387: mol_type = other DNA
atgagtagcaggaaaagcaagagcaactctctcattcataccgagtgcctctcgcaggtacagcggattcttagagagcgattttgcaggcagtcaccacactccaacctcttcggtgttcaggtgcagtataagcatttatctgaactccttaagcgcacagcccttcatggcgagtccaattctgtgctcatcatcggaccgagaggctcgggcaagacaatgctgattaaccacgcactcaaagaactcatggaaattgaggaggtgagtgagaacgtgctgcaggtccacctaaacggccttctccagatcaatgacaaaattgcccttaaagaaattaccagacaactgaacctggaaaacgtggtcggtgataaggtctag

SEQ ID NO: 233610 - DNA, 1311 bp, synthetic construct
  misc_feature 1..1311: note = Description of Artificial Sequence: Synthetic coding sequence
  source 1..1311: mol_type = other DNA
atgtctagcaggaaatccaaatccaacagccttattcacactgagtgtttgtcacaagttcagcgcatcctaagagagcgattctgtagacagtctccacacagtaacctgtttggcgtgcaggtgcagtataaacatttgagcgaacttttaaagcgaacagctttgcatggcgaatcaaatagcgtgctgatcattggccctagaggatcaggaaaaaccatgctgataaaccacgcattgaaagaactaatggagattgaggaggtctccgaaaacgtccttcaggtgcacctgaacgggcttttacaaatcaacgataaaattgccctgaaggaaattactaggcagctgaatctggagaatgtcgtaggagacaaggtgtttggaagctttgctgagaacctcagctttctgctcgaagccttgaagaagggcgaccggaccagttcttgtcctgtgatatttatcttggatgagttcgacctgtttgctcatcataagaaccagacactgctgtataacttgtttgatatctcacagtcagcacagacccctattgctgtgattggcctgacatgtcgactcgatattctcgagctgctcgaaaaaagagtgaagtcccggttcagccacagacagattcatctcatgaactcttttgggtttccccagtacgtcaagatcttcaaggaacagttgtccttgcctgcagagttccccgataaggtttttgctgaaaaatggaatgaaaatgtgcaatacctctctgaggataggtcagtccaagaagtcctgcagaagcactttaacataagcaaaaatttgagatcgctgcacatgctcctgatgctcgctctgaaccgggtgaccgcctcccacccctttatgaccgctgtggatttgatggaagcttcacagctttgctcaatggattccaaagccaacatcgttcatggactcagcgtgctggagatatgtctgattatcgcaatgaagcacctgaacgacatttacgaggaagaaccgttcaacttccagatggtatataacgagttccagaaatttgtgcagcggaaggcacacagcgtgtacaacttcgaaaagccagtcgtcatgaaggcattcgagcacctccagcaattagagctgattaagcctatggaacggaccagcggcaattctcagcgggaataccagctcatgaagctgcttctggacaacacccagattatgaacgccctccaaaagtatccgaactgccccactgacgtacgacaatgggcaacaagcagtctctcatggctctag

SEQ ID NO: 233611 - DNA, 1059 bp, synthetic construct
  misc_feature 1..1059: note = Description of Artificial Sequence: Synthetic coding sequence
  source 1..1059: mol_type = other DNA
atggagattgaagaggttagcgaaaatgtgttacaggtacacctgaatggacttttgcagatcaacgataagatcgccctgaaggagataacccgccagcttaacctggaaaatgtagtcggggacaaagtgtttgggagtttcgcagagaatctgtccttcctacttgaagctctgaaaaagggggaccgcacctcctcttgccctgtgatatttattctggatgagtttgacctgtttgcgcatcacaagaatcagacccttctctacaacttattcgacataagtcaatcagcgcagacccccatcgccgtgataggcctgacatgcagactggatattctggaactcttggaaaagagggtaaagtcccgtttctcgcaccgacagatccacctcatgaactcttttggatttccacagtacgtgaagatctttaaggaacagctcagcctgcccgcagaatttcctgacaaggtgttcgctgaaaaatggaacgagaacgtgcaatacttgagcgaggacagatctgtccaggaggtgctgcagaagcactttaacattagcaagaatttgagatcattacacatgcttctgatgctggctctgaatagagtcacagcctcccacccatttatgacggccgtggacctgatggaagcctcacaactgtgcagcatggactcaaaggccaacatcgtacacggactgagcgtgttggaaatctgtctgatcatcgctatgaagcaccttaatgacatctacgaggaagagccatttaacttccagatggtctataacgagtttcagaagttcgtgcaaaggaaagcccactcagtatacaattttgaaaaacctgtagtcatgaaggccttcgagcacttacagcagctggagctaattaaacctatggagcgcaccagtgggaacagtcagcgcgaataccagctgatgaaactgctgctggacaatactcagatcatgaatgctttacagaaataccccaattgtcctaccgacgtaaggcaatgggccacctcatctctatcttggctgtag

SEQ ID NO: 233612 - DNA, 1089 bp, synthetic construct
  misc_feature 1..1089: note = Description of Artificial Sequence: Synthetic coding sequence
  source 1..1089: mol_type = other DNA
atgctgataaatcacgccctcaaagaactgatggagatcgaagaagtgtcggaaaacgtcctccaagtccacttgaatggacttctccagatcaacgacaaaatcgcccttaaagaaatcactcgccagctgaatctggaaaacgtggtgggtgataaagttttcggaagtttcgctgagaacctttccttcctattagaggcactgaagaagggcgatcgaacttcttcatgccccgtgatatttattctcgatgagttcgatttgtttgctcaccacaagaatcagaccttgctgtataatctttttgacatctcacagtcagctcagacccccatcgccgtaattggactgacttgcaggttggatatactggagctgctggaaaaacgcgttaagagcaggttttcacacaggcagattcatctgatgaactctttcggatttccacaatacgttaaaattttcaaagagcagctttcactgcccgcagagtttcccgataaagtgttcgccgagaagtggaatgaaaatgtgcagtacctgtcagaggatcggagcgtgcaggaagtgttacagaaacattttaacatttctaaaaatctcagaagtctgcatatgctgctgatgctggctttaaatcgtgtcacagcctcacatccctttatgactgccgtcgatttgatggaagcttcccagttatgctccatggactccaaagccaacatcgtgcatggtctgtccgtactcgaaatctgcttgattatcgccatgaaacacctgaacgatatttacgaagaggagcccttcaacttccagatggtgtacaatgagttccagaaatttgtgcaacgaaaggctcactcagtctacaactttgagaagcctgtggtgatgaaggcgttcgaacacctgcagcagttagagcttataaagccgatggagcgaaccagtgggaacagccagagggagtaccagctaatgaagctgctgctggataatacccagatcatgaatgccctgcagaagtatccgaactgtcctaccgatgtgagacagtgggcaacttcgagtctcagttggctgtag

SEQ ID NO: 233613 - DNA, 660 bp, synthetic construct
  misc_feature 1..660: note = Description of Artificial Sequence: Synthetic coding sequence
  source 1..660: mol_type = other DNA
atgaattctttcggtttcccgcagtatgtcaagattttcaaagagcagctcagcttaccagccgagttcccggataaggtgttcgctgagaagtggaacgagaacgtgcagtatttatccgaagatagaagtgtccaggaagtgctgcagaaacatttcaacatctctaagaacctgcgttccttgcacatgctcctaatgctggcgttaaatagagtgacagcgagtcatccctttatgaccgccgttgacctcatggaggcgagtcagctgtgtagcatggactctaaagctaatattgtccatgggctgagcgtgctcgagatttgtcttatcattgccatgaagcacctgaatgacatctacgaggaggagccctttaacttccaaatggtatataacgagttccagaagttcgtgcaaagaaaggcacatagtgtgtataacttcgagaagccagtggtcatgaaggcatttgagcacctgcagcagctcgaattaatcaagccaatggaaaggactagcggtaatagtcagcgggagtatcagttgatgaaactgctgctggacaatacccagatcatgaacgctcttcagaagtatccaaactgtcccaccgacgttcggcaatgggcgacaagtagcctgtcttggctctag

SEQ ID NO: 233614 - DNA, 1308 bp, synthetic construct
  misc_feature 1..1308: note = Description of Artificial Sequence: Synthetic coding sequence
  source 1..1308: mol_type = other DNA
atgccccacctggagaatgtggtgctttgtcgggagtcccaagtcagcatccttcagtcacttttcggcgagcgtcaccattttagctttccttctatctttatctatggccacacagcatctggcaagacttatgtaacccagacactcctcaagaccctggaacttccccatgtttttgtgaactgcgtagaatgctttacgttgcggctgctcctagaacagatactgaataaactcaatcacttgagtagctctgaggatggttgcagcacggagatcacctgcgagaccttcaatgatttcgtgaggctgttcaaacaagttactactgccgaaaatctgaaagatcagaccgtgtacattgtcctcgataaagctgagtatctacgcgacatggaagccaaccttctgccagggttcttgcgactccaggagctcgctgaccgcaacgttactgttctattcctatccgaaatcgtgtgggagaaatttaggcctaacaccggatgcttcgagcctttcgtcctgtactttccggactacagtatcggcaatctgcagaagattctgtctcacgatcatccaccggagtactccgctgacttctacgctgcctacattaacatcctgctaggagtgttctacaccgtgtgtagagatctcaaagagctcaggcacctggccgttctgaactttcccaaatattgcgagcctgtcgttaagggcgaggcaagtgagagggatacaagaaaactttggcgcaatattgagccccaccttaaaaaagctatgcagaccgtctacctgagggagatctccagctcccagtgggagaaactccaaaaagacgatacggacccagggcagctcaaagggctctctgcgcatacacacgttgagctgccctattacagcaaatttatcctgatcgcggcatacctcgcctcatataacccagctcggactgacaagagatttttcttgaagcaccatggaaaaatcaagaagacgaattttttgaagaagcatgaaaaaacttccaatcatctactgggaccaaagccatttcccctggacaggttgctcgctatcctgtacagcattgtggactcccgggtggctccaaccgctaacatcttctctcagatcacaagtctggtcacattgcagctcctgacgttggtgggacacgacgaccagttggatggaccaaagtacaaatgtactgtgtccctagatttcatccgagccatcgcgcgaactgtgaacttcgatattatcaagtacctgtacgacttcctgtag

SEQ ID NO: 233615 - DNA, 975 bp, synthetic construct
  misc_feature 1..975: note = Description of Artificial Sequence: Synthetic coding sequence
  source 1..975: mol_type = other DNA
atgccacacctggagaacgtcgttctgtgccgggaatcacaggtgtcgattctgcaatcccttttcggcgagcgacaccacttcagctttccctccatatttatatatggtcacaccgcctcgggcaaaacctacgtaacacagactttgctcaaaacccttgagctgccccatgtattcgttaactgtgtcgagtgctttactctacgtcttctgctggaacaaattctgaacaagctcaatcaccttagtagctcagaggatggctgcagcacggagataacttgcgagactttcaacgattttgtaagactgttcaaacaggtgacaaccgcagaaaacttgaaggaccaaaccgtgtatattgttctggacaaggctgagtatctgcgggacatggaggccaatctgctcccaggctttttgcggttgcaagaacttgccgatcgaaatgttactgtgcttttcctgagtgaaatcgtgtgggagaagttccggcctaataccggatgctttgaacccttcgttttgtacttcccggattatagcatcggtaacctgcagaagatactgagccatgaccaccctcccgagtactcagctgatttctacgcagcctatataaatatactactcggcgtattttacaccgtgtgccgcgatctcaaggaactgaggcacctcgctgtgctgaattttcccaagtattgcgagccagtagttaagggcgaggctagcgaacgagacactaggaagctgtggaggaacatcgaacctcaccttaagaaagccatgcagactgtttatctgcgggagatttcttcatctcagtgggagaagctccagaaagacgatacagacccaggacagctcaagggtattcggggatcaatcgaaactgtcaccggcgatacatccagtgctaattatcaagatactaaagtgaacaccaaggagcactcggttcggaagtag

SEQ ID NO: 233616 - DNA, 912 bp, synthetic construct
  misc_feature 1..912: note = Description of Artificial Sequence: Synthetic coding sequence
  source 1..912: mol_type = other DNA
atggaggcaaacctgctgcctggcttcctccggctgcaggagcttgccgataggaatgtgactgtgctgttcctgtctgagatcgtttgggagaaatttcgacctaatactgggtgcttcgagccatttgttttatacttcccagattattctatcggaaacctccagaaaatattgagtcatgaccaccctccagaatattccgcagacttctacgccgcatacataaatatccttttgggtgtgttctatactgtatgccgggacctgaaagaactccgacacttggcggtcctcaacttccctaagtactgcgagcccgtggtcaaaggagaggcctctgaacgggacactcgcaagctgtggcgaaatattgagcctcatctgaagaaagcaatgcagaccgtctacctcagagagatttcctcctctcagtgggagaaactccagaaagatgacactgaccctggccagcttaaaggcctgtccgcccacacacatgtcgaactgccttactattcgaagttcatccttatcgccgcatatttggccagctacaacccagcacgcaccgataagagattctttctgaaacatcacgggaagataaaaaagaccaatttcctcaaaaaacacgaaaaaacctccaaccaccttcttggacctaagccttttcctttagaccgcctactcgccatcctgtattccattgtggactcccgagtcgccccaacggcaaacatattttcacagatcactagcttggttacgctgcagttactgacattggtgggccacgatgaccagctggacggtccaaagtacaaatgcacggtgtccctcgatttcatccgcgctatcgccagaacggttaactttgatatcatcaagtacttgtatgattttctgtag

SEQ ID NO: 233617 - DNA, 1665 bp, synthetic construct
  misc_feature 1..1665: note = Description of Artificial Sequence: Synthetic coding sequence
  source 1..1665: mol_type = other DNA
atgagcgctgacggcggtggcatccaggatacacaggataaggagaccccgcctgaagtgccggatagaggccatcctcaccaagaaatgccctccaaactgggggaggccgtgccctccggggatactcaggagtccctgcatattaagatggaaccagaagagccacacagcgagggcgcatcacaagaagatggggctcaaggagcctggggctgggcacccctaagccatggctctaaagaaaaggcgttgttccttcccggtggtgctctccctagtcctcgcatcccagtgctctcgcgggaaggcagaactagagataggcaaatggccgcagccctcctcacagcatggagccagatgccagttacctttgaggacgtcgcactgtatctttctcgggaggaatggggcagattagaccacacacagcagaacttttacagggacgtgctgcagaaaaaaaacgggttatcattggggtttccgtttagccggccattctgggcgcctcaggcccatggcaagggcgaggctagcgggtcttctaggcaggctggcgatgagaaggaatggcggggagcctgcacaggggctgtggaggtgggacagcgggttcaaacctcctctgtcgctgccttgggcaatgtcaaacccttccgaacccgagcagggagggtacagtggggcgtgcctcagtgtgcccaggaggccgcttgtggtcgctcttctgggcctgctaaggacagtggccaacctgctgagcccgacagaactcccgatgcggctcctcccgatccgtcgccaaccgagccacaggaataccgtgtgccagagaagcctaacgaggaggaaaaaggggcacctgaaagcggggaagagggattggccccagatagtgaagttggaagaaagtcctacagatgcgagcagtgcggcaaaggcttctcctggcactcacacctggtcacacatagacgcacacacaccggggagaaaccttatgcctgtactgattgcgggaaaaggttcggaaggtcctcccatcttatacagcatcagataatacacaccggcgaaaaaccctatacctgtccggcatgccggaaaagcttctcgcaccactccacgttgatccagcaccaacgcatccacaccggcgagaagccttatgtctgcgacaggtgtgccaagaggtttacccggcgaagcgacctagtaacacaccagggcacccataccggagctaagccacacaaatgtccgatttgcgctaagtgcttcacccagtcaagtgcgcttgtcacacatcaaaggacccatacgggggtgaaaccgtatccctgtcctgagtgcgggaagtgcttttcgcagaggagcaatctgatcgctcacaacagaacccataccggagaaaagccctatcactgtctggattgtggcaaatccttctcccattcttcacacctgaccgcgcaccaacgcacgcatcgcggtgtgcggccatatgcctgcccgttatgcggcaagtctttctccaggcggtcgaaccttcatcgtcatgaaaagattcacaccacgggtcccaaggccctggccatgttgatgcttggagcagccgcagccggagccctagccacacccccacctgcaccaacttag

SEQ ID NO: 233618 - DNA, 462 bp, synthetic construct
  misc_feature 1..462: note = Description of Artificial Sequence: Synthetic coding sequence
  source 1..462: mol_type = other DNA
atgaatgttggtgttgcacattctgaagtgaatcccaacactcgcgtgatgaattctaggggaatgtggctgacatacgctctcggcgttggcctactccatatcgttctattatccatcccatttttttccgtccctgtagcctggaccctgactaacattattcacaacctgggtatgtacgtgtttctgcacgccgtgaagggtactccctttgagacgccagaccaaggcaaagctcgcctgctgacacattgggagcagctggattacggggtgcagtttacctcctctagaaagttttttacaatttctcccatcattctgtactttctcgcatccttctataccaagtacgatcccacccacttcatactcaacaccgcatccttgctgagtgtcctgatacctaaaatgcctcagctacacggcgtcaggatttttgggatcaataagtattag

SEQ ID NO: 233619 - DNA, 462 bp, synthetic construct
  misc_feature 1..462: note = Description of Artificial Sequence: Synthetic coding sequence
  source 1..462: mol_type = other DNA
atgaacgtaggggtggcgcatagtgaagttaaccctaacacacgtgtaatgaatagtcgtggaatgtggttaacctacgctcttggggtgggcctcttgcatatagtgctgctgagtatacctttcttttccgtcccagtcgcatggacactgacaaatatcatacacaatctcggaatgtatgttttcctccacgctgtcaagggaaccccatttgagaccccagatcaaggaaaggcgagactactgacgcattgggagcagttggactacggtgtccaattcaccagcagtcgcaagtttttcaccatctcgccgattatcttgtactttttggcaagtttttatactaagtatgatccaacgcattttatcctaaacacagcatctctgctgagtgtgcttatccctaaaatgcctcagctgcatggtgtgcgtatcttcgggataaacaaatattag

SEQ ID NO: 233620 - DNA, 462 bp, synthetic construct
  misc_feature 1..462: note = Description of Artificial Sequence: Synthetic coding sequence
  source 1..462: mol_type = other DNA
atgaacgtgggcgttgcccatagcgaggttaatccaaacacccgcgtgatgaattccaggggaatgtggttgacctacgctctgggtgtgggcctgctgcacatcgtgctcctttcaatcccgtttttttcagtaccggtggcttggactctgactaatatcatccacaatctgggcatgtatgtattcctgcacgccgtcaagggcactccattcgaaacccccgaccaaggtaaggcgcgactcctcacacattgggagcaattagactacggtgtgcaattcacaagcagtagaaaattttttactattagccctattattctatacttccttgcgagcttctacactaagtacgatccaacacacttcatccttaacaccgcctccctgctctccgtgcttatcccaaagatgccacagctgcatggcgtgcgaatctttggaattaacaaatactag

SEQ ID NO: 233621 - DNA, 330 bp, synthetic construct
  misc_feature 1..330: note = Description of Artificial Sequence: Synthetic coding sequence
  source 1..330: mol_type = other DNA
atgaacgttggagtggcccattcggaagtaaaccccaatacccgcgttatgaattcccgaggtatgtggttgacatatgctctcggtgtaggcctgctgcatatagtgctcctgtccatcccattcttttccgttcccgttgcttggacacttaccaacatcatccacaacctaggaatgtacgtttttctgcatgccgtgaagggaactccttttgagactcctgaccagggtaaggcgaggctgttgactcattgggaacaactcgactatggagtgcaatttactagctcccgtaaattttttacaatctcccctatcatcctctag

SEQ ID NO: 233622 - DNA, 330 bp, synthetic construct
  misc_feature 1..330: note = Description of Artificial Sequence: Synthetic coding sequence
  source 1..330: mol_type = other DNA
atgaatgtaggtgttgcgcactccgaggtgaaccccaacactagagtaatgaactcgcgcggtatgtggctaacttacgccctgggagtgggcctgctgcacatcgtcctgcttagtatcccattcttttcggtccccgtggcttggacacttacaaatattattcacaatttaggaatgtatgtgtttctccacgctgttaaaggaactccttttgaaactccagatcaaggcaaagctcgtctactgacacattgggaacagcttgattacggagtgcagtttacaagttcccgcaagttcttcactatcagtcccattatcctctag

SEQ ID NO: 233623 - DNA, 462 bp, synthetic construct
  misc_feature 1..462: note = Description of Artificial Sequence: Synthetic coding sequence
  source 1..462: mol_type = other DNA
atgaatgtgggcgttgctcacagcgaggttaatccaaacacccgggttatgaatagtaggggaatctggttggcctacatcatactggtgggattgttacacatggttcttttgtccatccctttcttctcgattcctgtcgtttggaccctgaccaacgttattcacaacctcgccacatatgtattcttgcacacagtgaaggggactccgtttgaaacaccggaccagggcaaagccaggcttctcacccactgggaacagatggattacggactccaatttacgtccagccgcaagtttcttagcatatcgcccattgtgttgtatttgttagccagcttttatactaaatatgatgctgctcattttctaattaacactgccagccttttatctgtacttctgccgaagctgccgcaatttcatggggtacgcgtcttcggaattaacaagtattag

SEQ ID NO: 233624 - DNA, 462 bp, synthetic construct
  misc_feature 1..462: note = Description of Artificial Sequence: Synthetic coding sequence
  source 1..462: mol_type = other DNA
atgaatgtgggcgtcgctcattcagaagttaatcctaacacaagagtgatgaattcgcgcggaatttggctggcctacatcatccttgttggcttgctgcatatggtgttactgagcatcccgttcttctccatacctgtggtatggacgttaacaaacgtcatccataacttagcaacttacgtctttctgcacacagtcaagggaacgccttttgaaacccctgatcagggaaaagccaggctcctgacgcattgggagcaaatggactacggtctgcagttcaccagcagccgaaaatttctgagcattagcccaatcgtcttgtatctgttggcctccttttataccaagtatgacgctgcccactttttgatcaacacagccagcctactcagcgtgttacttccgaagctccctcaattccacggagttcgcgtgtttggcatcaacaagtattag

SEQ ID NO: 233625 - DNA, 462 bp, synthetic construct
  misc_feature 1..462: note = Description of Artificial Sequence: Synthetic coding sequence
  source 1..462: mol_type = other DNA
atgaacgttggcactgcccacagcgaggtgaacccgaataccagagtcatgaatagccggggtatttggctttcatatgtgttggctattggtctccttcacatcgttctgctgtcaataccatttgtgtccgtacctgtcgtctggaccttaaccaacctcattcacaacatgggcatgtacatattcctccacaccgtgaaggggactccctttgagactcccgaccagggaaaagcaaggctgctcacccactgggagcaaatggactatggggtgcaatttaccgcttcaagaaagttccttacgatcacgccaattgtgttatactttctcactagtttttatacaaaatacgaccaaatacactttgttttgaacaccgtttctcttatgagtgttctgatccctaaactgccacagctgcacggggtaaggatattcgggatcaacaaatattag

SEQ ID NO: 233626 - DNA, 462 bp, synthetic construct
  misc_feature 1..462: note = Description of Artificial Sequence: Synthetic coding sequence
  source 1..462: mol_type = other DNA
atgaacgtgggcaccgcccactccgaggtcaatcccaacactagggtaatgaactctcgcggaatctggttgtcgtacgtgttagcaattggcttgctgcatatcgtccttctgtcaattccatttgtgtctgtgcctgtcgtgtggaccctgacaaacctgatacacaacatgggcatgtatattttcttgcatacagtcaagggcactcctttcgaaacaccagaccaggggaaagcacgcttactcacccattgggaacagatggactatggcgttcagtttactgcctcccggaaattcctcacaatcacacccatcgttctctatttcctgacatcattctacactaagtacgatcagatccacttcgtacttaacactgtatccctcatgagtgttcttatccccaagctaccacaactgcacggcgtgagaatctttggaatcaacaagtactag

SEQ ID NO: 233627 - DNA, 1320 bp, synthetic construct
  misc_feature 1..1320: note = Description of Artificial Sequence: Synthetic coding sequence
  source 1..1320: mol_type = other DNA
atgttttcaaagctggcccatctgcagcgcttcgcagtgctaagccgcggagtccattcctcggtggctagcgcaacttctgtggctacgaagaagaccgttcaggggccaccaacttctgacgatatctttgagagagagtacaaatatggagctcataattaccaccctctgcctgtcgcactagaacgcggaaagggaatttatctttgggacgtggagggaagaaagtacttcgatttcctttcttcgtatagtgcagtgaatcagggacattgccacccaaagatagtgaatgctctgaaatcccaggttgataagctcacattaacctcccgtgcattctacaacaacgttcttggcgagtatgaggagtacatcacaaagctttttaactatcataaggtgctgccgatgaatactggcgtcgaggctggtgagacggcttgcaagctggccagaaaatggggctacaccgtgaagggaattcaaaaatataaagccaagatagtctttgctgctggcaatttctggggtaggactttgtctgccatatctagtagcacagacccaacatcttatgacggattcggcccttttatgccagggtttgacatcatcccgtataacgaccttccagcacttgagagagccctgcaagaccccaacgttgccgcattcatggtcgaaccaattcagggagaagcgggtgtagtcgtgccagacccaggttacctaatgggcgtgagagagctctgcacacggcaccaggtgttgttcatcgcagatgagatccagactggactggccagaacaggccgttggctggccgtagattacgagaacgtgcgacccgacatcgtgctgctcggcaaggcactaagtggagggctgtatcccgtctctgccgtcctgtgtgatgatgacatcatgctcactattaaacctggtgaacacgggtctacctacggcggaaaccctcttggatgccgggttgctatcgctgcccttgaggtgcttgaagaggaaaacctggctgagaatgctgataagcttggaatcatccttcggaatgagttgatgaagctgcctagcgatgtggtcacagccgtccggggaaagggactcctgaatgccattgtgatcaaagagacaaaggactgggacgcctggaaagtgtgtctccgtctcagagataacggactcctggccaaaccgactcatggtgacatcatccgctttgcccctccgctggttatcaaggaggacgagcttcgcgaaagcatcgaaatcatcaataagacgattctgagcttctag

SEQ ID NO: 233628 - DNA, 906 bp, synthetic construct
  misc_feature 1..906: note = Description of Artificial Sequence: Synthetic coding sequence
  source 1..906: mol_type = other DNA
atgaacaccggagttgaagctggcgagactgcttgcaagcttgctagaaagtgggggtatactgtgaaaggtattcagaagtataaagcaaagatcgtgtttgccgcaggaaacttttggggtcggaccttgagcgctatttcatccagcaccgatcctactagctacgatgggttcggaccgtttatgcccggattcgacatcatcccctacaatgatctacccgcactcgagcgtgcactgcaagatcccaacgtagctgcctttatggtggagccaatacagggcgaggctggagtggtcgtgcccgatccaggttatctcatgggggtccgtgagctttgtacgcgccaccaggtgcttttcattgccgacgagatacagacaggcctggcacgcaccggcaggtggctcgcggtggattacgagaatgtccggccagacatcgtcctgctgggtaaagcactgtccggaggcctctaccccgtctctgccgtgctgtgtgatgatgacatcatgcttactatcaaaccaggcgaacacggatccacttacggcggaaacccattaggctgtagggtggcaatcgccgcacttgaagtgttggaagaggagaatcttgcagaaaacgctgataagttgggcatcatattgcggaatgaactcatgaaattgccttctgatgtggttacagctgtgaggggcaaagggctgctgaacgccatagtgattaaagaaactaaggactgggacgcgtggaaggtctgcctacgcctgagagacaacggcttgcttgctaagcctacccacggggacatcattaggtttgcaccaccactggtgattaaggaagacgagctgcgggagagtattgaaatcattaacaaaaccatcttgagtttctag

SEQ ID NO: 233629 - DNA, 405 bp, synthetic construct
  misc_feature 1..405: note = Description of Artificial Sequence: Synthetic coding sequence
  source 1..405: mol_type = other DNA
atgaaggcttttagcccagttcgaagcgtccggaaaaactccctgtcagatcactctctcggaatcagtaggtctaagacccccgtcgacgatccgatgtcactgctgtataacatgaacgattgttattccaagctgaaggagttggtcccatccatcccacagaacaagaaggtgtccaagatggaaatcctgcagcacgttatcgattatatcttagatcttcaaatcgctctggattcccaccctaccatcgtaagccttcatcatcagagacccggacaaaaccaggcctcccgtacacccttgaccaccctgaacaccgatatcagcattctttcgctccaggcgtctgaattcccttctgagctgatgtcgaatgattcaaaagctctgtgcgggtag

SEQ ID NO: 233630 - DNA, 1386 bp, synthetic construct
  misc_feature 1..1386: note = Description of Artificial Sequence: Synthetic coding sequence
  source 1..1386: mol_type = other DNA
atgaataattttgggaatgaggaatttgactgtcacttcttagatgagggattcacggcgaaagatatcctggatcaaaagataaatgaggtgtccagtagtgacgataaggacgcgttttatgtcgctgatctaggagacatcctgaagaaacacctgcgctggctgaaggctctgcctagggtcacaccattctatgcggttaagtgtaatgacagcaaggccattgtgaagactttggccgctaccgggactgggtttgattgcgcttccaaaacagaaatccagctggtccagagcttgggagttcccccagaaaggattatctatgcgaacccttgcaagcaagtatctcagattaagtatgctgccaacaacggagtgcagatgatgacctttgacagcgaggtggagctgatgaaagtggcacgggctcatccaaaggctaagctggtccttagaatcgccactgatgactcgaaggctgtatgcaggctctcagttaaatttggcgcaacattgcggacttcacggctgttgctggaaagagctaaagaattgaacattgatgtcgtcggcgtatcatttcacgtgggctctggatgcactgatcccgaaacctttgtccaagccatatccgacgcgcgatgcgttttcgatatgggagctgaggtgggattttcgatgtaccttcttgatatcggtggaggcttcccgggttccgaagatgtgaagctaaagtttgaggagattaccggtgtgattaatccagccctggacaaatactttcctagcgacagcggtgtcagaattatagccgagcccggacgctattacgtggccagcgctttcacactcgcggtgaacatcatcgcaaaaaagatcgtactgaaagagcaaacaggaagtgatgatgaagatgagtccagcgagcagacattcatgtattacgtgaatgacggggtgtacggtagcttcaattgcatcctgtatgaccatgctcacgtaaagcccctgctgcagaaacggccaaagcctgatgagaagtactatagctcaagcatatggggccctacttgcgacgggctcgatcggattgtggagcgctgcgaccttcccgagatgcacgtgggggactggatgctctttgagaacatgggcgcttacactgtggcagcagctagcacctttaatggctttcagcgtcctacaatctattacgtcatgtccggcccagcctggcagttaatgcagcagttccaaaatcccgactttccaccggaagtggaggaacaggacgcaagcactctgcctgtctcatgtgcttgggagtctggcatgaagcgacacagggcagcttgcgcaagtgcaagtataaacgtatag

SEQ ID NO: 233631 - DNA, 207 bp, synthetic construct
  misc_feature 1..207: note = Description of Artificial Sequence: Synthetic coding sequence
  source 1..207: mol_type = other DNA
atgaacaatttcggtaacgaggagttcgactgccattttcttgatgaagggttcacggccaaggacattctggaccaaaagatcaatgaggtttcctcgtccgacgacaaggatgccttctacgtggctgacttgggtgatatcctcaaaaagcacttaagatggcttaaagctttgccacgggtcaccccattctatgccgtctag

SEQ ID NO: 233632 - DNA, 927 bp, synthetic construct
  misc_feature 1..927: note = Description of Artificial Sequence: Synthetic coding sequence
  source 1..927: mol_type = other DNA
atgatgacttttgattctgaagtggagctgatgaaagtcgccagagctcaccctaaggccaagctcgtcctcagaattgccacggatgactccaaggctgtgtgtagattgagcgtcaagtttggtgccacactgcggacatccaggctgcttctcgagagagccaaagagttaaacattgacgtagtgggcgttagcttccacgtcggctctggttgtaccgacccagagacattcgtgcaggccatttccgacgcacgctgtgtgttcgacatgggtgccgaggttggctttagtatgtatctactcgatataggtggtgggttccccggtagtgaggacgtcaaactgaaattcgaggaaatcacaggagtgataaacccagccctggacaaatactttccttcagatagtggcgtgagaataattgctgaaccagggagatactacgtggcctccgccttcacgcttgcagttaacataatcgccaaaaagatcgttctgaaggagcaaaccggcagcgacgacgaggatgagtcaagcgagcagacctttatgtactatgttaacgacggtgtgtacggatcattcaattgcatcttgtacgaccatgcacacgtgaaacccttactgcagaaaaggccaaaacctgacgagaagtactattccagctccatatggggaccaacatgcgacgggctggatcgcatagtggaacgttgtgaccttcctgagatgcacgtaggcgactggatgctgtttgagaacatgggcgcttatactgtggcagccgcatctacctttaatggttttcaacggccaacaatctattacgtcatgagcgggccagcctggcagttaatgcagcagttccagaacccagattttccaccctgcttgtgtctcgtccctggcagagtcggctag

SEQ ID NO: 233633 - DNA, 684 bp, synthetic construct
  misc_feature 1..684: note = Description of Artificial Sequence: Synthetic coding sequence
  source 1..684: mol_type = other DNA
atggtcaagagcagtttgcagcgcattctgaacagtcattgtttcgccagagagaaggagggagataaaccaagcgccactatccacgcgagtcgaaccatgccgctgctctccctgcacagccgcggaggatctagcagtgagtcttctagagtctcgctccattgttgttcaaatcctgggccaggcccacggtggtgcgacgctccccatccccctttgaagattcccggtgggcgagggaatagtcagcgggatcacaatctctcggccaatctgttctattccgatgacagactcaacgtaacagaagagctgacttcaaacgacaagaccagaattttgaatgtgcagagtaggcttaccgatgccaagcgaatcaactggagaaccgtactgtcagggggatccctatatatcgaaataccaggcggtgcgctccctgaaggtagcaaagattcattcgccgtgctgctggagttcgctgaagaacagctacgtgcagatcacgtgtttatctgctttcacaaaaatagagaggaccgggcagcactgctgcggacattctcttttttggggttcgagatagtgcgaccaggccaccccttagtcccaaagagacctgatgcctgcttcatggcctatacttttgaaagagagtcaagtggggaagaagaggagtag

SEQ ID NO: 233634 - DNA, 831 bp, synthetic construct
  misc_feature 1..831: note = Description of Artificial Sequence: Synthetic coding sequence
  source 1..831: mol_type = other DNA
atgtggatcacatccctgatcaccatgaaagacgaggacatttttgatctggctggagatccacaagactcccttattcctggacctagtccaacacctaagcagaacccagtgtgtaatgaagccttttttgggcatcagacgtttagcctgagagaaaccgggctcaagtccgtccattgccagggccaagaggctgaaaacatggagagggaaaagttccagcagaaggctcttaaacagacgaaacagaaaaagtctaagagtgccgagtttttgatggtgaaagaggatagggaagcaaccgagggtaccggcaaccccgcttttaacatgtcatctcctgatctaagtgcatgccagaccgcagaaaaaaaagttattcggcatgatatgccggacagaacccttgctgcacaccagcaaaagtttcggcttcccgctagcgcagagccaaaggggaatgagtatgggcgtaattattttgacccactgatggatgaggagattaatccacgccaatgtgcgactgaagtgagcagggaagacgaaagcggaagggaagagacgctgaattcggaagcacccggatcgtctaacaaaagccacgaaattcataaggaagccagtgaggcgaccacagcccacttagaggaattccagcggtcccagaagacaattatactgctgggtagcagtcccctggagcaggaaataaggagcacgtcactgcattgtatggaggatgaaatgtcccatccctggattcttctgctgaaggtgactgctgtgattagatctaggcgatattacagggagcagcgattctag

SEQ ID NO: 233635 - DNA, 1443 bp, synthetic construct
  misc_feature 1..1443: note = Description of Artificial Sequence: Synthetic coding sequence
  source 1..1443: mol_type = other DNA
atggaacgagagaagtttcagcaaaaggccctaaaacagacaaagcagaaaaaatccaaatccgcagagtttctgatggtgaaggaggaccgcgaagccacagaaggaacaggtaacccagccttcaacatgagtagccccgacttgagcgcctgtcaaaccgccgaaaagaaagtgattcgccatgatatgcccgaccggacactggctgcacaccagcagaagtttcggctcccagcaagcgccgaaccaaaaggcaatgaatatggtagaaactacttcgacccgctgatggacgaagagattaaccccagacagtgcgccacagaggtgagtcgggaggtgtgtttaatggcaaagggggagaaagcagagagcggagtagacaacacggcagggttgagcgagaaagagacacaaaaaaatcccagggcgccaatggatgaagccgatgtgaaatctgctgcgcattcttcgcaaggttctatccctaagaaaattggcccttgcagtatggactatgacccgaatttattggaggaagacgatgagctccactctcaaggcgatagtctaaccgatcatagtgtgaagggtaagagcacagtgtggaggataggtgaggctgaagattatagccaggatattagttatctagaggagctcgaagaacaccgattcagcgtctgctgttccagcgtagccgatagccggtatggcgacttcttcaagcacctgcacttcgtcctggtgtccgcaagctctgagctccagctaagccagtggcagtcccaggggttttggtacattatccttttaatgttcttcttatggtttcttcgattgtatctgcactatctgggacaatggctgtttctgcaggcaattagcaccccggtgaccaagtttcatttctcactgcacatcgtggaactctgctaccccaccagtagtctccacattggggaggagctgccagtcgttgtgatggggcctctgatgctcaatgcaatactgttgctgctggtgctgatcaggtggggatgtcagctgctgtttgcgagctgtccagacgtcttaagcaagctcatcataacaatgggattgtggacaattttagatccactcgcagtgtttattctggacactttgctggggaggctaaccgataacgaagaaactcctgtagccgatgccgctaagttatattggatgtttgtacgcacagtccagccagggatactaggagtcgtgattacggtactgctatacatcctcctattcgtgatcagcagcctgatactttacttgtactgccttcgccttcacaatgactcttggatcttggatgcttttcagcgcatccattcagaggaaaccaagttttttatcccttatgacttggaaatctcaaaccaggagctaagttacatagtgaagtag

SEQ ID NO: 233636 - DNA, 606 bp, synthetic construct
  misc_feature 1..606: note = Description of Artificial Sequence: Synthetic coding sequence
  source 1..606: mol_type = other DNA
atggccctgtcctgggtactgacggtcttgtccttgctgccgctgctcgaggcacagatacctctgtgcgccaacctcgtaccagtgccaattacgaacgcaactctggataggattacgggtaagtggttttatatcgccagcgcattcagaaacgaagaatacaacaaatctgttcaggaaattcaggctacgtttttctacttcacacctaacaagaccgaggatacaatcttcctcagagagtatcagacaagacaggatcagtgcatatataataccacatacctgaacgtgcagagagaaaatggcacaatttcaaggtacgttggcggacaggaacactttgcccacttactcatcttaagagataccaagacatacatgctggcttttgacgtgaacgatgagaaaaactgggggctttccgtctacgctgacaagccagaaacaaccaaagaacaactgggcgaattctacgaagccctcgactgtcttaggattcccaagtccgatgtagtttacactgattggaagaaggataagtgtgagcctctggagaaacagcacgaaaaggagaggaaacaggaagaaggggagagttag

SEQ ID NO: 233637 - DNA, 585 bp, synthetic construct
  misc_feature 1..585: note = Description of Artificial Sequence: Synthetic coding sequence
  source 1..585: mol_type = other DNA
atggcactatcgtgggtgctgaccgttctgagtctgctgcccctcctggaggcccagatcccgctgtgtgctaatctggtgcccgtgccaattaccaacgctaccctcgatcgggtgtcagcatgggcatcccctgtcctctcaacatgggccgctgcctctctgctgtgggcgagtctttctctgctggcagtcgtcggaccccctctgccggctctaccattttccttgctggggcctcaaggcgagatcctgacttctcctggagattcagggggaacaccgtgtttacagactcagaaaccacattgcagagtactgcacgggggacggttctgcgctggacctgggggagctgcctggggggctatgacagacccccagggcgaattattacacgcccattgtcctcctggcgctagttcccctcaccttcagaaccagggcgagatctgcctttcactcctgcccgcagactcacagcggttctcaattaaaccaccttcgcccgctcccacatttagtcccgatcactggcaggttgtgctgtatagaattggacttagcaagagaggggtacaatag

SEQ ID NO: 233638 - DNA, 585 bp, synthetic construct
  misc_feature 1..585: note = Description of Artificial Sequence: Synthetic coding sequence
  source 1..585: mol_type = other DNA
atggccttgagctgggtactgacggtgctttccctgctgcctctccttgaggctcaaattcctctctgcgccaacctggtaccagtgccaataaccaacgcgacactcgacagagtgagtgcctgggccagccctgttctctccacatgggccgctgctagtctgttgtgggcttctctgtacctactggctgtggtggctcccccacttccagcactgccattcagcctgttgggcccacaaggggaaatcctgacatccccgggagattctggaggaactccttgtctgcaaacgcagaagccccattgtcgagtcctgcatggtggaagattttgtgctggtcccggaggagctgcttggggtgccatgacagaccctcaaggtgaactcctacatgcccactgccctccaggcgctagctcccctcatttgcagaatcagggggaaatatgcttgtctctgttaccagcagattctcagcgctttagcattaagccacccagcccagctcctccgtttagcccagaccattggcaggtggtcctgtaccggatcggactatctaagcggggagtgcagtag

SEQ ID NO: 233639 - DNA, 606 bp, synthetic construct
  misc_feature 1..606: note = Description of Artificial Sequence: Synthetic coding sequence
  source 1..606: mol_type = other DNA
atggcactctcgtgggtccttactgtgctgtctttgttaccactcctagaggcacagatcccgttgtgtgcgaatcttgttccagtgcccataaccaatgccaccttggacaggatcacggggaaatggttctacatagcgtccgcattccggaatgaggagtacaacaaaagcgtgcaggaaatccaggctacattcttctatttcacgccaaacaagactgaagataccattttcctgcgcgagtaccagacacggcagaatcagtgcttttacaacagctcttacctgaatgtgcagagagagaatgggaccgtgagccgctacgagggaggaagagaacacgttgcccacttgctgtttctacgagataccaagactctaatgttcgggtcctacctcgacgacgaaaagaattgggggctgtccttctacgccgataagcccgaaacgaccaaggagcagctaggtgaattctacgaggctctggactgtctgtgtattccaagaagcgatgtgatgtatacagattggaagaaagataagtgcgaaccgttggagaagcagcacgaaaaggagcggaagcaggaggaaggcgaatcatag

SEQ ID NO: 233640 - DNA, 1065 bp, synthetic construct
  misc_feature 1..1065: note = Description of Artificial Sequence: Synthetic coding sequence
  source 1..1065: mol_type = other DNA
atgatgtcttacttgaagcaaccgccttacggtatgaatgggctggggctggcaggacccgctatggatctcttgcatccttcggtgggataccccgcaactccccgaaagcagcggagagaaaggaccaccttcacacgaagccagctggacgtactagaggccctgtttgccaagacgcggtaccccgatatttttatgcgagaggaagtggctctcaaaatcaatttgccagaatccagagtgcaagtctggttcaagaatagacgcgctaaatgtagacagcaacagcagagcggctctggaacaaagagtagaccggcaaagaaaaagtcatcccctgttagagaatcttccgggtcagagtcttccggacagttcacaccacccgctgtctccagctccgctagtagttcatcttccgcatcctcatcgtccgccaatcccgctgccgctgccgcagctggcctgggcggaaacccagtcgccgcagcaagctccctgtccacacccgcagccagctcaatctggagtcccgcttccatttcccccggaagcgcaccagcgtctgtctcggtgcctgagccactggcggcaccatccaacacatcatgcatgcaacgttctgtcgcggctggggctgcaacagccgctgcatcatacccaatgagttacgggcaggggggttcctacgggcaaggctatccaacaccatcatccagctattttggtggagtcgattgcagtagctacctggctccgatgcattcccatcatcatccccatcagctgagtcctatggccccatccagtatggctgggcaccaccaccaccatcctcacgctcatcaccccctgtcgcagagtagcggacaccatcaccatcaccatcatcatcaccaccagggatacggcggatcaggactggcattcaattctgccgattgcttggattataaagagcctggggctgctgctgcctcaagcgcatggaaactgaacttcaactctccagattgcttggattataaggatcaagcatcctggcgttttcaggtactctag

SEQ ID NO: 233641 - DNA, 1065 bp, synthetic construct
  misc_feature 1..1065: note = Description of Artificial Sequence: Synthetic coding sequence
  source 1..1065: mol_type = other DNA
atgatgtcctaccttaaacagcccccatatggaatgaacggcttgggactcgccggtccagcaatggatttgttacacccatcagttggataccctgccaccccacggaagcagagaagagagagaactacctttacacggtcccagctggacgtgctggaagcgctgtttgccaaaacccgatatcctgacatctttatgagagaggaagtcgccctaaaaattaatctgcctgagagtagggtacaggtctggtttaagaaccgcagagccaaatgccgacaacagcaacagagcggctctggaactaaatctaggcccgcaaagaagaaaagttctccagtcagggagagttcaggttctgagtcctcaggacagtttacaccacctgctgtgtcttcctcagctagcagttcctcctccgcgtcttcgtcatcagcaaatcctgcagccgctgccgctgccggactaggaggcaatcctgtagccgctgccagcagtttatccacgcctgccgcaagctccatatggagcccagccagcatatcccctggctctgcaccagctagtgttagcgttcccgaacccttggccgcaccatccaacacctcctgcatgcagcgaagcgtggccgcaggcgcagctaccgcagcagcaagctatccgatgagctacggccagggaggatcctacggccaagggtatccaactccttcctcatcctacttcggcggtgtcgattgttccagctatctggcaccaatgcattcccatcaccacccccatcagctcagccctatggcaccaagcagcatggcaggccaccatcatcatcacccccatgcgcaccaccccctctctcagagcagcggacaccaccatcaccatcaccaccaccaccatcagggatatggtggttccggtctcgcctttaattcggctgattgcctagactacaaagaacctggagccgcagctgcgagcagcgcttggaagcttaacttcaattctcctgactgtctggattataaagaccaggctagttggcgattccaggttctctag

SEQ ID NO: 233642 - DNA, 894 bp, synthetic construct
  misc_feature 1..894: note = Description of Artificial Sequence: Synthetic coding sequence
  source 1..894: mol_type = other DNA
atgatgtcataccttaaacagccgccttatgcagtcaacgggctgagcctgacaacaagcggtatggacctgctgcacccgtcagtgggttacccaggcccttgggcatcttgccccgcagcaaccccccgtaagcagcgtagagaaagaactactttcactagagcacagctagatgtcttagaggcactatttgcaaaaactcggtatccagacatctttatgcgcgaagaagttgccctgaagataaacttacccgaatcccgcgtccaagtgtggttcaaaaatcgccgagctaagtgccgccagcagcaacagcagcaacagaatggcggtcagaacaaggtacgcccagccaaaaagaaaaccagtcccgctagagaggtgagctcagagtctggcacaagcgggcagttcactcctccttcctccaccagtgtcccaactatcgcatcgtcctctgccccagtgtcaatttggagcccagcctcaatttctccacttagcgatccattaagcacttcatccagctgcatgcagcggagttatcctatgacatacacccaggcatctggctatagccagggctacgctggaagtacatcttacttcggcggaatggattgcggatcttatctgactcccatgcaccaccaactgccaggcccaggagcaaccctttcgcctatgggcaccaacgccgttacatctcacctgaatcagagccccgctagtctgagtacacagggttacggggctagcagcctgggctttaattccacaactgattgcctcgattacaaggatcagacagccagttggaagcttaacttcaacgctgactgtcttgattataaagatcagaccagcagttggaagtttcaggtcctctag

SEQ ID NO: 233643 - DNA, 870 bp, synthetic construct
  misc_feature 1..870: note = Description of Artificial Sequence: Synthetic coding sequence
  source 1..870: mol_type = other DNA
atgatgtcctatcttaagcagcctccgtatgcagtgaacggtctctccctaaccactagcgggatggacctgcttcacccaagtgtgggttaccccgctactccacggaagcagcggagagaacggactacttttacgcgggcacagctcgatgtgctagaggcactattcgccaaaactaggtacccagatatctttatgcgggaggaggtggccctcaagatcaacctgcctgaatccagggtccaggtgtggtttaagaacagacgtgcaaaatgccggcagcagcaacagcagcagcagaacggagggcagaacaaggtgcgcccagcaaaaaaaaagacaagccctgctcgagaggtttcatctgaaagcggaacatccggccagttcacacctccatcttcaacgtctgttcctaccattgcaagctcaagtgcacccgtatcaatttggagcccggcatccatctcccctctgtctgaccccttatcaacaagcagcagttgcatgcagaggagttatccaatgacgtacacacaagcgtcaggatattcccaaggatatgccggatctactagctactttgggggtatggactgcggctcatatctcacacctatgcaccatcagttgcctggtcccggagcaaccctgagcccaatgggtacgaatgcagtcacatcacaccttaatcaaagtccggcaagtctaagcacccagggttatggcgctagtagcctcggttttaatagtaccacagattgccttgattataaagaccagacggcatcatggaaactaaatttcaacgcagactgccttgattataaggatcagacatcctcttggaagttccaggttctgtag

SEQ ID NO: 233644 - DNA, 720 bp, synthetic construct
  misc_feature 1..720: note = Description of Artificial Sequence: Synthetic coding sequence
  source 1..720: mol_type = other DNA
atgatgagctacctcaaacaaccaccatacgctgttaatggcctcagcctcactactagtgggatggacctgctgcaccctagtgtggggtacccaggcccatgggccagctgcccagccgcaactcctagaaaacagaggagggagcgcactacattcactagggcccagctggatgtgctggaagcactatttgcaaagactcgctatcctgatatcttcatgcgcgaagaagtcgctctcaagattaacctcccagagagccgcgtccaggtctggtttaagaaccggagagccaagtgcagacagcagcagcagcagcaacagaatggtggtcagaataaagtccgacccgctaaaaaaaagacctcaccagccagagaggtgtcctcagagagcggaacaagcgggcagtttacacccccttcctccacttctgtgccaaccatcgcatcttcctctgcgcctgtgtccatatggtcccctgcttctatcagccccctttcagatcctctctcaacgtctagctcctgtatgcagcgatcgtaccctatgacctacacccaagcatctggatatagccagggttatgccggatcaacctcatattttggaggtatggactgcgggtcttacctcaccccgatgcatcaccagctgccgggacccggagccaccctgagccccatgggtacaaacgccgtgacttctcatctttag

SEQ ID NO: 233645 - DNA, 870 bp, synthetic construct
  misc_feature 1..870: note = Description of Artificial Sequence: Synthetic coding sequence
  source 1..870: mol_type = other DNA
atgatgagctacctgaaacagccaccatacgccgtgaacggcctctccttgaccacttccggaatggatctgctgcatccatcggtgggatacccagctacccctcgcaaacagagaagagaaagaacaacattcaccagggctcagctggacgtccttgaggccctgttcgccaaaaccagataccccgacatctttatgcgtgaagaggttgcattgaaaatcaacctccccgaatccagggtgcaagtttggttcaaaaataggcgagctaagtgtcgccagcagcagcagcagcagcagaacggcggacagaacaaggttcggccagcaaaaaagaagaccagccctgcaagggaagtttcctccgagagtggcacttcaggacaattcacccctccaagctcaactagtgtgccaaccatagcaagctcaagcgctcctgtgagcatctggagccccgcaagcatctctcctctttcagatccgctgtccacctcgagcagctgcatgcagagaagctacccaatgacctacacccaggcaagtggctacagccagggctacgcagggagcacctcctattttgggggaatggattgtggcagctacctgacaccgatgcatcaccagctgccaggtcctggggcaacactaagccccatgggaacaaatgccgtgacgtcccatctcaatcagtcccctgcaagcttgtcaacccaaggttatggtgctagcagtctgggtttcaactcgacgactgactgtctcgactacaaggaccagactgctagttggaaactgaattttaatgccgactgtctcgattacaaggaccaaacaagtagctggaagtttcaggtgctttag

SEQ ID NO: 233646 - DNA, 492 bp, synthetic construct
  misc_feature 1..492: note = Description of Artificial Sequence: Synthetic coding sequence
  source 1..492: mol_type = other DNA
atgatgagctacctcaagcagcctccatacgctgtcaatggactgtctctgacgaccagcggaatggatctcctccatccaagcgtcggataccccgctaccccacgaaaacaacggagagaaagaactactttcaccagggcccagctagatgtgcttgaggccctcttcgctaagacaaggtatcctgatatctttatgagggaagaggtggcattaaaaatcaatctgccggagagccgggtccaggtatggtttaaaaaccgccgtgcaaaatgcagacagcagcaacaacagcagcaaaatggcggacagaataaggtcaggccggcaaaaaagaagactagtccagcaagggaggtaagttctgagtccggcacctcggggcagtttacccccccttcctctacttccgtccccactatcgcaagtagcagtgcaccagtgagcatttggagtccggcaagcatcagccctctcagtgatccttag

SEQ ID NO: 233647 - DNA, 978 bp, synthetic construct
  misc_feature 1..978: note = Description of Artificial Sequence: Synthetic coding sequence
  source 1..978: mol_type = other DNA
atgctgtctcacgcagatttactcgatgcccgtttaggcatgaaggacgccgctgagctgttaggccatcgggaagcggttaaatgccggctcggcgttggcggatctgatcctgggggacatccgggagatctggcacctaacagcgaccctgtggaaggggctacattgctgccgggagaagacattactaccgtgggatcaacacctgcctctcttgcggtttctgccaaagatccagacaaacagcctggccctcaagggggacctaacccttctcaggcaggccagcagcaggggcagcagaaacagaaaagacatcgcactcgatttacgcccgctcagcttaacgagctcgagaggagctttgcgaagacccattaccccgacatctttatgcgcgaggaactcgccctgcgtatcgggttgacagaaagtagagttcaggtttggtttcaaaatcggagggctaagtggaaaaagcggaaaaaaaccacgaacgtgtttcgcgctcctggcactctgctgcccacacctggactcccccagtttccaagcgcagcggctgcagccgcagccgcaatgggcgactccctctgcagcttccacgccaatgacactcgctgggccgcagcggcaatgcctggtgtgtctcagctcccgttgccgcctgcgctaggacgtcagcaggctatggctcagagcctgtcccaatgttcccttgccgcaggaccccctcccaactccatggggctctctaacagtctggccggtagtaatggtgccggactgcagagccacctgtatcaaccagccttccctggaatggtgccagccagccttcccggaccttccaatgtctctgggtccccccagctgtgcagctcacctgattccagcgacgtctggcggggaacctcaatcgcttctcttagaagaaaggcgctggaacacactgtctccatgagcttcacgtag

SEQ ID NO: 233648 - DNA, 912 bp, synthetic construct
  misc_feature 1..912: note = Description of Artificial Sequence: Synthetic coding sequence
  source 1..912: mol_type = other DNA
atgggtatagtgcagatctgtaagggggagtatttctggttagagcccaaaaacgcgttcgaaaatttccaggagcctgatattgggctggtggcactggccttccttcagggaagttttgcctatgggggttggaactttttgaactatgtgacagaggagctggtggatccctacaaaaacttaccgagggctatttttatttccatacctcttgtcacattcgtctacgtatttgcgaacgttgcctacgtaactgcaatgtctccacaggagcttctggctagcaacgccgttgcagtcacatttggggaaaaactgctcggagtgatggcctggattatgcctatatctgtggctctgtcaaccttcggtggggttaacggaagtttattcaccagcagcagactgtttttcgctggggctcgtgagggccacctgccttccgtgctcgctatgattcatgtcaaaagatgcacacccatacccgctctgttgtttacttgcatttctactctcttgatgctcgtgacatccgatatgtatacccttattaactacgtggggtttatcaactatttgttctatggcgtgactgtggccggacagatcgtactgagatggaaaaaacccgacatccccagacccattaaaataaatctcctcttcccaataatatacctcttgttctgggcattcttactcgtgtttagtctttggtctgagcctgtggtctgcgggatcgggctggcaattatgctgacaggcgtgcctgtgtatttccttggcgtctactggcagcacaaaccaaagtgctttagcgactttattgagttactgaccttggttagccagaagatgtgcgtcgtggtgtacccggaagtggagggcctccgtgaccgcggtggttag

SEQ ID NO: 233649 - DNA, 861 bp, synthetic construct
  misc_feature 1..861: note = Description of Artificial Sequence: Synthetic coding sequence
  source 1..861: mol_type = other DNA
atggccctggtactgattctgcagctgctgaccctctggcctctatgccatactgacattactccatccgttgccatcatcgtcccccctgcaagttatcaccctaaaccttggctcggcgctcagccagctacagtggtgacaccaggagtcaacgttactctaaggtgcagggcaccacagccggcatggcgattcggtctgtttaaaccgggagagatcgcgccactcttatttagggatgtgagctcagaactcgctgagttcttcctggaagaggtcaccccagcacagggtggcatctatcgttgctgctatcggcgtccagactggggaccaggggtgtggagccagccctcagatgtcttagaattactcgtgactgaggagctcccacggccttctctagtggccctgcctgggcctgttgttggaccaggagctaatgttagcctgaggtgcgctggtcgcctgcgtaacatgagcttcgtcttatatagggaaggcgtcgccgctcccttacagtatagacatagtgcacagccttgggccgattttaccctgctgggggctagggctccagggacttattcatgctactatcacacccctagtgccccttacgtgctgtctcagagatcagaggttctggttatcagttgggaaggcgagggcccagaagcccgacccgcttccagcgctcccggtatgcaggcgccaggccctcccccaagcgaccccggagcccaggctccgtcccttagctcattccgtccaagaggactggtccttcagcctctcttaccccagactcaagattcttgggatcccgcaccccctccatccgaccccggtgtgtag

SEQ ID NO: 233650 - DNA, 849 bp, synthetic construct
  misc_feature 1..849: note = Description of Artificial Sequence: Synthetic coding sequence
  source 1..849: mol_type = other DNA
atggcgctcgtcctcatcttgcaactgctgactctttggccactttgccacacagacataactccttctgttccaccggctagctatcatcccaagccttggctgggcgcacaacctgccacggtggtaacgccaggtgttaatgtcacgctgcgctgcagagccccacagccagcatggcgctttgggctatttaagcctggggagatcgctcctctactgttccgggatgtgtcttcagagctggccgagttcttcctggaggaagtgacacccgcacaggggggaatatacagatgctgctacagacgccctgactggggcccaggggtttggtcccagcccagtgacgtgttagaactgctggtgactgaggagctgcccaggccatctctcgttgcacttcctggccctgtggtaggcccaggcgctaacgtctcccttcgttgtgccggtcgactacggaacatgtctttcgtattatatcgtgaaggcgtggcagccccactccagtatcgccatagcgcacagccgtgggctgatttcactctcctgggcgctagggccccagggacatattcctgctactaccatacgcccagtgctccatatgtgttaagccaaagaagcgaagttctcgtgatatcatgggaaggcgagggcccagaggcccgacctgccagttccgcgccaggaatgcaagctccgggtccccctccaagcgatcctggcgctcaggctccttccctgtcaagttttcgccctcgtggacttgtcttgcaacccttacttccccagactcaagacagctgggaccctgcacctccaccctctgatcctggcgtctag

SEQ ID NO: 233651 - DNA, 759 bp, synthetic construct
  misc_feature 1..759: note = Description of Artificial Sequence: Synthetic coding sequence
  source 1..759: mol_type = other DNA
atggcattggtgcttatcctgcagttattgaccctcttcccaccagcctcatatcaccctaaaccatggttaggagcacaaccagccacagtagttacacccggagtgaatgtgacactccgctgtcgcgctccacagcccgcatggcggtttggtctgttcaaacccggtgaaatcgctcctttactgtttagagatgtaagttctgaattagccgagtttttcttagaagaggttaccccggctcaaggcggaatctaccggtgctgctacagacggccagattggggtcccggtgtctggtcacagccaagtgacgtgctggagctgcttgttaccgaagagctcccaagaccttctctggtggcactgccaggcccagtggtgggcccaggtgccaacgtctcactcaggtgtgcagggagactccggaacatgtcatttgttctctatcgagagggcgtagcggctccactgcaatacagacactccgcccagccttgggccgattttaccctgctgggagcacgcgctcctggtacctactcttgctactaccacactccatccgcgccatacgtcctgtcccagcggagcgaagtccttgtgatctcctgggaggattccgggtcttccgattatacgcggggtaacctggtgagactgggtctggctggcctggtccttattagcctcggagccctggtgactttcgactggaggagccagaatcgggcacctgccggtatccgcccttag

SEQ ID NO: 233652 - DNA, 804 bp, synthetic construct
  misc_feature 1..804: note = Description of Artificial Sequence: Synthetic coding sequence
  source 1..804: mol_type = other DNA
atggctctcgtcctaattttgcagctcctgactctgtggccactatgccatacagacattaccccttccgtcgccattattgtgcccccagccagttatcaccccaagccctggttaggtgcccaacctgctactgtagtcacacctggggtcaatgtcacgctgagatgccgcgctcctcagcctgcctggaggtttgggttgtttaagcctggggaaattgctcccttactgtttagagatgtgtctagtgagctggccgagttttttctggaagaagttacacctgcccagggcggtatttatcgatgttgttaccggagacccgattggggtccaggcgtgtggtcgcagccctcagacgtgctcgagttgttagtgactgaggaactgccaaggccctctttagtggctctgcctgggccagtcgtgggtcccggagccaacgtttccctacggtgcgctggtcgtctccggaacatgagtttcgtgctgtacagggagggggtggccgctcccctgcagtatcggcatagcgcccagccttgggcagacttcaccctactgggagccagggccccaggcacttactcatgctactatcacaccccctcagccccatatgttctgtcccagcggtctgaagttctggttatttcttgggaggactccggctccagcgattacacccggggaaacctggttcgcttaggactggctggcctcgtactgatctcgctcggtgcccttgttaccttcgactggcgaagccaaaatagagcgccagctggaattagaccatag

SEQ ID NO: 233653 - DNA, 792 bp, synthetic construct
  misc_feature 1..792: note = Description of Artificial Sequence: Synthetic coding sequence
  source 1..792: mol_type = other DNA
atggcccttgtcctgatcttgcaactgctcacgctctggccactatgccacacagacatcacaccctcagtgcctccagcttcgtaccaccccaagccttggctaggggcacaacctgccacagtggtgaccccaggggtgaatgtgacactcaggtgtagagctccgcagccagcttggagattcggactgtttaaacccggagagatcgctcctttactgtttcgcgacgtctcatccgagctggccgaatttttcctggaggaagtgactcctgctcagggaggaatctatcgttgctgctaccggagaccagactggggacccggagtgtggtctcagccaagtgacgtgttagaactgttagtcacggaggagcttcctcggccatcacttgtggcccttccaggtcctgtggtgggacctggcgcaaacgtaagtcttagatgcgcagggagactgcgaaacatgagtttcgtgctataccgggagggcgtggctgctccacttcagtatcgccacagcgcgcagccatgggccgactttaccctgctgggagcccgagccccaggaacctattcttgctactatcacacacctagtgctccgtatgttctttctcagcggagtgaggtgctggttattagctgggaggattccggaagctctgactatacacgaggtaacctagtccgcctcggactcgcaggactggtgttgattagcctcggcgcattggttaccttcgactggagatcacagaaccgcgctcctgcaggtatccgtccgtag

SEQ ID NO: 233654 - DNA, 645 bp, synthetic construct
  misc_feature 1..645: note = Description of Artificial Sequence: Synthetic coding sequence
  source 1..645: mol_type = other DNA
atgagtaagcctcctcccaagccagtaaagccaggccaagttaaggtgtttcgggctttgtataccttcgagccgcgaactcccgacgagctgtacttcgaagaaggcgacattatatacatcacagacatgagcgacactaactggtggaaaggcaccagcaaaggtagaaccgggctaatcccttctaactacgtagctgaacaagctgaaagtatcgacaatcctctccatgaagccgcaaagcgaggtaacctgtcatggttacgagagtgccttgacaatagagtaggggttaatgggttagataaggccggtagcaccgccctgtattgggcttgtcacggaggtcataaagatatagtggaaatgctgttcactcagccaaacattgaacttaatcagcaaaacaaactcggagacaccgccttacatgctgccgcatggaagggatacgctgatatcgtccagctcttgctcgctaagggggcaaggacggaccttcgtaatattgagaagaaacttgctttcgatatggctactaatgctgcatgtgcaagcttactcaagaagaagcagggcaccgatgctgtcagaacgctgagtaacgctgaggactacctggacgacgaggactccgactag

SEQ ID NO: 233655 - DNA, 897 bp, synthetic construct
  misc_feature 1..897: note = Description of Artificial Sequence: Synthetic coding sequence
  source 1..897: mol_type = other DNA
atgaaaacccttcagtcaacacttctgttgttactgctggttcctttaatcaagcccgctccaccaacgcagcaggactctcgcattatttatgactatggaactgacaatttcgaagaatcaattttttcccaggactatgaggataaatatctggacggtaaaaatataaaagaaaaagagactgtaatcataccaaacgaaaagagcctgcagctgcagaaggacgaggcaatcacacctctgccaccaaaaaaggagaatgacgaaatgccaacctgtctcctctgcgtatgtctcagtggcagtgtatattgcgaggaggtggatatagacgcggtccctcccctgccaaaagaatccgcttacctgtatgcacgatttaataagattaaaaagctgacggctaaggactttgcagacatcccgaatcttcggaggctggacttcaccggtaatctgatagaggacattgaagacggaaccttttcgaagctgagcctcctcgaggaactgtcactagcagagaatcaactcctgaaattgcctgtgctgcccccaaagctcaccctttttaatgcaaaatataataaaatcaagagccgaggtatcaaagctaatgctttcaaaaaactaaacaatctgacattcctgtatctcgaccacaatgccctggaatctgtgcctctgaatcttccggagagcttgcgggtcatccaccttcagtttaataatatcgcaagcattacagatgatacattctgcaaggcaaacgacactagttacatccgggatcgcattgaggaaatccgactcgaaggcaaccccatcgttctgggcaaacatcctaactcatttatttgcctgaaacggctgcctatcgggtcatacttttag

SEQ ID NO: 233656 - DNA, 897 bp, synthetic construct
  misc_feature 1..897: note = Description of Artificial Sequence: Synthetic coding sequence
  source 1..897: mol_type = other DNA
atgaaaactcttcagtccaccttgttactgcttttactggtgcccttgatcaaacccgcacctcctactcagcaggactccagaattatttatgattacggcacagataacttcgaagaatcaatctttagtcaagactatgaggacaagtacttggacggcaagaatataaaggagaaagagactgtcataatcccaaatgaaaaaagtctgcaactccaaaaggacgaggccatcacccctctgcctccaaaaaaggaaaacgacgagatgccaacttgtttgctttgcgtgtgtctgtctgggtcagtgtactgtgaggaagtggacatcgacgcagtcccgccacttccgaaagaaagtgcttatttatatgcgaggttcaataagattaaaaagcttactgctaaggattttgccgacatacccaacctccggaggcttgatttcacgggcaacctgattgaagatatagaggacgggacatttagtaagctgagtctgctggaggaattaagtctcgccgagaatcagctcctgaagctgcccgtgctgccaccaaagttgacgcttttcaacgctaagtataacaagatcaagagtcgcggaatcaaggcaaacgcttttaagaagttaaataatctcacgtttctatatctggaccacaacgctctggaatctgttcccttgaatcttcccgaatctctgcgagttatacacctacagttcaataacatcgcaagtatcacagatgatacattttgtaaggctaatgatacctcctacatccgtgataggatcgaggaaattcgcctggagggcaaccctattgtcctaggaaaacatcccaattctttcatctgcttgaagaggctgccaattggttcatatttttag

SEQ ID NO: 233657 - DNA, 807 bp, synthetic construct
  misc_feature 1..807: note = Description of Artificial Sequence: Synthetic coding sequence
  source 1..807: mol_type = other DNA
atgcttgctaaaatctccacaacatggaaactctttctgaagctgttgggcccagaaatcctgctttcatcattgaagtccagacatagttttagccatagtcccagtcacctggggttaatgcaccggcatgaacatctcctgcggaaaaccactaaaaacttcaagactgccactaccaccctccaatctaccctgctcctgctgcttttagtgcccctgatcaaaccagccccaccgactcagcaggactcccgcataatttacgactatggcactgacaacttcgaggagtcgatcttctcccaggactacgaggataagtacctcgatggcaagaacataaaggagaaggaaacggtgatcattcctaatgagaagtccctccagctgcagaaagacgaggccattacccccctccccccaaagaaggagaatgatgagatgcccacgtgtttgctgtgcgtgtgcttgagcgggtcggtgtattgtgaagaagtagatatagacgcggtgccacccttacccaaggagagcgcatacctgtacgctcgatttaacaagatcaagaaattgactgcgaaggacttcgctgatatccctaacttgcgcagactggatttcacagggaaccttatagaggacatcgaggacgggacgttctctaagctcagtctgctggaggagctcagtcttgcagagaaccagctgctgaaattgcctgtgctcccgccaaaactgacattattcaacgctaagtacaataagatcaagtctaggggcattaaggctaacgcctttaaatag

SEQ ID NO: 233658 - DNA, 1842 bp, synthetic construct
  misc_feature 1..1842: note = Description of Artificial Sequence: Synthetic coding sequence
  source 1..1842: mol_type = other DNA
atggctgccgagacccttctcagcagtctgctgggtttgctgctgctaggcctgttactgccagcatccctaaccggaggagtgggcagtctgaacctggaagaactgagtgaaatgaggtacgggattgagatcctacccttgccggttatggggggacagtcacagagctcagatgtcgtcatcgtgtctagcaagtacaaacagcgttatgagtgccgtctgcccgctggcgcaatacactttcaaagagagcgggaggaagagacacccgcataccaggggccaggcatcccggaactcctctctccgatgcgcgacgccccatgtctcctgaagacaaaagattggtggacttatgagttctgttacggccgtcacatccaacagtaccacatggaggacagcgaaattaagggcgaagttctctacttggggtattaccagtccgccttcgattgggacgatgaaacagctaaggcatcgaagcagcacagacttaaaaggtaccattcccagacctacggaaatggtagcaagtgcgacctgaatggcaggcccagagaagcagaggttcgcttcctctgtgatgagggggctggtatctctggagattatatcgatcgggttgacgagcccctgtcctgcagttatgtgctgaccatccgcaccccaaggctctgcccgcacccgttactgagacctccaccatccgccgcaccccaagccatcttgtgccaccctagcctccagccggaggagtatatggcatatgtccagcggcaggccgtcgactccaaacagtatggtgacaagattatcgaggagctccaggacttaggaccccaggtgtggagtgaaacgaaaagcggagtggctccccagaaaatggccggagcgagccctaccaaagatgattcaaaggacagtgacttttggaaaatgttaaacgaacctgaggaccaagccccaggcggtgaggaagtgcccgctgaggagcaggacccttcgccggaggccgcagactccgcatctggagcccctaacgacttccaaaacaacgtgcaggttaaagttatccgatcccctgccgacttgatccggtttatcgaagaactcaaaggcggtacgaagaagggcaagcctaatataggccaggagcaaccagttgatgacgccgctgaggtgccccaaagagaacccgagaaggaaaggggtgaccccgaacgccagagggagatggaggaggaagaggacgaggatgaggatgaggatgaggacgaggacgagcggcagctgctcggcgaatttgaaaaagaattggaagggattctgcttccatctgatagagatagacttcgcagcgaagtgaaggctggcatggagagagagttggagaatattattcaggagacagagaaggagctggatcctgatggtcttaagaaggaatctgagcgagaccgggcaatgctggcgctgacatcaaccctgaataagctgataaagaggctggaagaaaagcagtctcccgaactggtgaaaaagcacaagaagaagcgggtggtccccaagaaaccccctccctctcctcagccgaccggcaagatcgaaatcaagattgtccgcccatgggccgagggcaccgaggagggggcacgctggctgaccgacgaagataccagaaatttgaaagagatcttcttcaacattctggtacctggcgctgaagaggcacagaaagaacgacagcggcagaaggagctcgagagcaactaccgcagagtgtggggatcccccggaggagaagggactggggacttggacgagtttgatttctag

SEQ ID NO: 233659 - DNA, 1959 bp, synthetic construct
  misc_feature 1..1959: note = Description of Artificial Sequence: Synthetic coding sequence
  source 1..1959: mol_type = other DNA
atggcagctgagaccctattgagttccctactgggcttgctgctgctcggcctgctgctgccggcttctcttaccggcggtgtcggatccctgaacctagaagagctgtctgagatgaggtacggtatcgagattctgccgctgcctgtgatgggagggcaaagccagtccagtgacgttgtaattgtttccagtaagtacaaacagcgttacgaatgtcgcctccctgccggagctattcattttcagagagagcgcgaggaggaaacccccgcttaccaagggcctggcatccctgagctgctgtcacctatgagagacgctccctgccttttgaagactaaagattggtggacctacgagttttgctacggtagacacatccagcagtatcacatggaggactccgagatcaaaggtgaagtgctttatcttggctactaccaaagtgcttttgactgggatgacgaaacggctaaagcctccaagcaacataggctgaagcggtaccactcccagacctacgggaacggttccaagtgtgatctcaacggaaggcctagggaggctgaggttcggtttctttgtgatgaaggtgcgggaatctccggagactacattgatcgtgtcgatgaaccactgagttgtagttacgtgctgaccattagaacccccagactgtgccctcacccactcctgcggccacctccgagtgccgctcctcaggccatcttgtgtcatccctctttacagcccgaggagtacatggcatatgtgcagaggcaggccgatagcaagcagtatggcgacaagataattgaggagctgcaggacttaggccctcaggtgtggtccgaaaccaagtctggcgtcgctccccagaagatggccggtgcgtcccccaccaaggatgatagcaaggacagcgacttttggaaaatgctcaatgaaccagaagatcaagcccctgggggtgaggaggtgcctgctgaagagcaagacccatcccctgaggccgctgactccgcaagtggtgctccgaatgattttcagaacaatgtgcaggttaaggttataaggtctcccgcagatctgatccggttcatagaggagctgaaaggcggaaccaaaaaaggaaaaccaaacattggacaggaacagccagtcgacgacgccgcagaggtgccccaaagagagcccgagaaagagaggggagaccccgaaaggcagagggagatggaagaggaggaggacgaggacgaggacgaagatgaagatgaggatgaaagacagctcctcggcgaatttgaaaaagaattggaagggatcctcctcccatccgatagagaccgtcttagaagtgagaccgaaaaggagctggatcccgatgggctgaaaaaagagtccgaacgtgacagagccatgctggccctgacctcaacactgaataaattaatcaagcgcctggaggagaagcagtctcccgaattggtcaaaaagcacaagaagaaacgagtggtccccaaaaaaccccctccatcgcctcagccaaccgaggaagacccagaacacagggtgagggttagagttaccaaacttaggctgggaggtccaaaccaggacctgacagtcctcgaaatgaagagagagaacccacagctcaagcagatcgagggcctcgtgaaagagctcctcgaacgggaaggtctgaccgcggcaggcaaaattgagatcaaaatagttcgcccttgggccgaagggaccgaggagggggctcggtggctcactgatgaagacacgagaaacctgaaggagatattttttaatattctggtccctggggcagaggaggctcagaaagaaagacagagacagaaagagctcgagagcaattaccggagggtgtggggctcgcccggaggagagggcacaggcgacctcgacgagtttgatttttag

SEQ ID NO: 233660 - DNA, 1683 bp, synthetic construct
  misc_feature 1..1683: note = Description of Artificial Sequence: Synthetic coding sequence
  source 1..1683: mol_type = other DNA
atggctgccgaaaccctgctgtcgtcactactcggcctgctcctgctcggactcctgctcccagcctctttgaccgggggagtagggagcctaaaccttgaagagttgagcgagatgagatacggcattgagattctccctctgccagtaatggggggacaatctcagtctagtgatgtggtcattgtttccagtaagtataaacagaggtacgagtgtcgcctgccagcgggagctatccactttcagcgcgagcgagaggaggaaacccccgcataccaagggcctggaatccctgaacttctgtctcccatgcgggacgccccttgtctgctgaagactaaggattggtggacctatgagttttgctacggacgtcacatccagcagtatcatatggaggactccgaaatcaaaggcgaatttctgtgtgacgaaggcgctggcatctctggagattacatcgacagggttgacgaacccttgtcttgctcttacgtgttaactatccggacccccaggttgtgtcctcacccgttgcttcgtccacctcccagtgccgctccccaagccattctttgtcacccctcactgcaacctgaggaatacatggcttatgtccagcgtcaggcggactctaaacagtatggcgacaagattatcgaagaactccaggacttaggcccacaggtgtggtcagagaccaaaagtggggttgccccacagaaaatggcaggggcttcgccaaccaaggatgattccaaggattcggacttttggaagatgcttaatgagcccgaagatcaggcacccggtggggaggaggtgcctgccgaagaacaggacccttctcccgaagctgccgactctgcctctggcgctcccaacgacttccagaacaacgtgcaggtaaaggttattcggtcaccagcagatcttatacgttttattgaggaattgaaggggggaactaagaagggtaagcccaacatcggccaagagcagcctgtggatgacgctgcggaggtgccccagagggagccagagaaggagaggggagatcctgaaaggcagcgtgagatggaggaggaggaggacgaggacgaggacgaggacgaagatgaagatgagaggcaactcctcggggagttcgagaaggagctcgaaggaattctcctcccatctgatagagatcgcctgagatctgaagtcaaggcgggaatggaacgggagctcgaaaatattatccaagaaacggagaaagaactggatcctgatgggctgaagaaggaatctgagcgggatagggccatgctggccctcacatcaaccctgaacaaactgatcaagcggttggaagaaaaacagtcccctgagttggtaaaaaaacacaagaagaagagggttgtgccgaagaagcctcccccatcccctcagccaactggaaagatagagatcaagattgttcggccttgggcagagggcaccgaggaaggcgctaggtggctcaccgacgaagataccaggaatcttaaggagatattctttaacatcctggtgccaggcgctgaggaggcccagaaagagaggcagagacaaaaagaactagaatccaactacaggcgggtgtggggctctccaggtggcgaagggacaggagatctcgacgagtttgacttctag

SEQ ID NO: 233661 - DNA, 1743 bp, synthetic construct
  misc_feature 1..1743: note = Description of Artificial Sequence: Synthetic coding sequence
  source 1..1743: mol_type = other DNA
atggctgctgagactttgctgtcttccctgctgggtttattgctgctggggctgcttttacctgcgtccttgaccggaggagtgggttcgttgaatctggaggagctgagtgagatgagatatggcatagaaatcttgccactgcccgttatggggggtcagtctcagtccagcgacgtcgtgatagtttcttccaaatacaagcaacgttacgagtgcagactgccagctggggctatccactttcagagggagcgtgaggaagaaacccccgcttatcaggggccaggcatcccagagcttctgagtcccatgagggatgccccatgcctgctgaagaccaaagactggtggacatatgagttctgctatgggcgtcacattcagcagtaccatatggaggatagtgagatcaaaggagaagtgctgtatctgggttactatcagagcgcctttgattgggacgacgagactgccaagttcctgtgcgatgagggtgcaggcatctcaggtgattatatcgacagagtcgatgaacctctgtcctgcagctatgtactgacaatcaggacccccagattatgtccccacccactgctaagacccccaccttcagccgcacctcaagcaatcctgtgccacccctcccttcagccagaggagtacatggcatacgtgcagagacaggctgttgatagtaagcagtacggcgacaaaataatcgaagagctccaggatctcggacctcaggtctggagtgagactaaatccggtgtggcgccacagaaaatggctggcgcatccccaacgaaagacgattcgaaggattccgacttttggaagatgttgaatgagcccgaggatcaggcacccggtggggaagaagtacccgcagaggaacaggatcccagtcctgaggccgctgattctgccagtggagcaccgaacgactttcaaaataacgttcaggtgaaagtgatacggagcccagccgatttgatccgcttcatagaggagctaaaaggagggaccaaaaaaggtaaacctaacattggacaggagcagcccgtggacgatgcggctgaggtgccacagagggagcctgaaaaggaaagaggagaccctgaacggcaacgcgaaatggaggaagaggaggacgaagatgaggatgaggatgaggacgaggatgaacgacagctgttgggggagttcgagaaagagctggaggggatcttacttccctcggacagggatcgcctgcgctcagaggttaaggccggtatggagcgcgagttggagaacattatacaggagaccgaaaaggagctggatcccgacggtctgaagaaggagtctgaacgagacagagccatgctggccctgacttccactttaaataagctgataaagaggttggaggaaaagcaatctccagaactggtgaaaaagcacaagaagaagcgcgtcgtgcccaaaaagccaccaccttccccccagccaaccggtaagatcgagattaaaattgtgcgtccgtgggctgaaggaacggaagagggcgcacgctggcttacagacgaggatacccggaatttgaaggaaatcttctttaatatcttggtgcctggggcagaagaagcccagaaggagaggcagcggcagaaagagttggaaagtaattaccgcagagtgtggggcagtcctggcggagaaggaactggcgacctcgatgagttcgacttctag

SEQ ID NO: 233662 - DNA, 2004 bp, synthetic construct
  misc_feature 1..2004: note = Description of Artificial Sequence: Synthetic coding sequence
  source 1..2004: mol_type = other DNA
atggcagccgagactctgctttcaagtctcttaggtctattactgttaggcctgctgctgcctgcatccctgaccgggggagtggggagcctgaaccttgaagagctctccgagatgaggtacggaatcgaaattttgccgctgcctgtcatgggcggacagtctcagagttcagacgtagtgatcgtgagcagcaagtacaagcaacgttatgaatgtaggctccccgctggggcaatccactttcagagagagcgagaggaggaaacacctgcttaccagggccctggcattccagagctgctgtcgccgatgcgggatgcgccatgtttgctcaagacgaaagactggtggacctacgagttctgctatgggaggcacattcagcagtatcacatggaggatagcgaaatcaaaggagaggtactttatctcggttactaccagtcagcgttcgattgggacgacgagacggccaaagcatctaaacagcacagacttaaacgttaccattctcaaacatacggcaatggttctaaatgtgacctcaatggcagaccgagagaagctgaagtgcgctttctctgcgacgagggtgcgggtatctcaggggattatattgacagagtggatgagccattaagttgttcctacgttctgactatccggacccccaggctttgtccacatccgttacttcggcctcctccaagcgccgcaccccaagctattttgtgccacccaagcctccagccagaagagtatatggcttatgttcagcgccaggcagattcaaagcagtacggtgacaaaattatcgaggagttgcaggatctgggcccacaagtgtggtctgagactaaatcaggcgttgcaccacagaagatggccggagcgtctcctaccaaagacgactccaaagatagcgacttttggaagatgctgaacgaaccagaggaccaggcacccggtggtgaagaggtgcccgctgaagagcaggacccttccccggaagcggcagatagcgcctccggcgcaccgaacgattttcaaaataacgttcaggttaaggttatcaggtcgcctgccgacctcatccggtttatcgaagaattgaagggcggaaccaagaagggcaagccaaacatcgggcaggaacaacctgttgacgacgcagccgaagtgccacaacgcgagcctgagaaggagcggggtgaccctgaacggcagcgggaaatggaggaagaagaggatgaggatgaggacgaagatgaggacgaagacgagcgccagctgttaggcgagttcgaaaaggagctggagggcattttgctgcccagtgatagggatcgtctccgttccgaagtgaaagccggtatggaaagggagctggagaacatcattcaagaaacagagaaggaacttgatccggatggactgaagaaggagtccgagcgcgaccgggctatgctcgcactcacgtccactctcaacaaactgatcaaaagacttgaggagaaacagtctccggaactggtaaaaaagcataagaagaagcgggtggttccaaagaagcctcccccaagtccgcaaccgaccgaagaggatcctgagcatagagtgcgggtgcgagtgacaaagctgcggctgggtgggcctaatcaggatctgaccgttctggagatgaagcgtgagaacccccaactgaaacaaattgaaggcctggttaaagaattgctggagagggaaggcctcaccgccgctggaaaaattgaaattaaaatcgtacggccatgggccgagggaactgaggaaggcgcacggtggctcacagatgaggatactcgcaatctgaaagagatatttttcaacattcttgtccccggtgcagaagaggcccaaaaagagcggcaaagacaaaaggaactcgaaagcaactaccgccgagtttggggcagtccaggaggagagggcactggagacctagacgagttcgacttttag

SEQ ID NO: 233663 - DNA, 1794 bp, synthetic construct
  misc_feature 1..1794: note = Description of Artificial Sequence: Synthetic coding sequence
  source 1..1794: mol_type = other DNA
atggccgcagagactctactgtccagcctgctggggttactactcttggggttgctattgcccgcaagccttaccgggggagtgggttcactcaatctcgaggaacttagcgagatgaggtatgggatagagattctgcccctgccggtcatgggtgggcaatcacaaagtagcgacgtagtgatagtctccagcaagtataagcagcgttatgaatgccgcctgccggctggggcaattcacttccaaagagaaagagaggaagagaccccggcatatcaaggaccaggaatccctgaacttctctcccccatgcgcgatgccccttgtctcttgaagaccaaggattggtggacatacgagttctgttatggacgccatatccagcagtaccatatggaagattccgagataaaaggcgaggtcctctatcttggctactaccaatccgcctttgactgggacgacgagactgcaaaggcttcaaaacagcaccgccttaagcgctatcactctcaaacatacggtaacggatctaaatgcgatcttaacggcaggccaagggaagccgaggtgcgattcctttgtgatgaaggcgctgggatcagcggggactacattgaccgagtggacgaacccctgtcctgctcttatgtcttgactatccggacccctaggctgtgtccacaccccctgcttagaccacccccttctgctgccccacaagccatcctgtgccatccatctctccaaccggaagaatatatggcctacgttcagcgccaggccgactcgaagcaatatggggacaaaataatcgaggaactgcaggatctcggcccacaggtgtggtcagagactaagagtggtgtcgcccctcagaagatggcaggcgcatctccaactaaagatgattccaaagattcagatttctggaaaatgctcaatgaacctgaagaccaggccccagggggagaggaagtcccagctgaagagcaggaccctagccctgaagcagccgactccgcatctggcgctcctaacgacttccagaacaatgtgcaggtcaaagtcattagatcccctgcagatctgatccggttcattgaagagctgaagggaggcaccaaaaagggcaaacccaacatcggccaggagcagcctgtggatgacgctgcggaggtgccacagagggagccagagaaggaaagaggagaccctgagcgtcaacgtgagatggaggaagaggaggacgaagacgaggatgaagacgaagacgaagatgagcgacagctgctgggagagtttgagaaagaattagaggggatcctgctgccttcagaccgcgatcggttgcgtagcgaaactgaaaaagagttggatcccgatgggctgaagaaggagagtgaaagagaccgagcgatgttggctctgaccagtacattgaacaagctgataaaacgcctggaagaaaaacaatctccggaattggtgaagaagcacaagaagaagagggtggttcctaaaaaacccccaccttctccacagcctaccggcaagatcgagatcaagattgtccgcccatgggctgaggggacagaggaaggcgctcggtggcttaccgacgaggatacccgcaatctaaaggagatttttttcaacattttggtccctggagctgaggaggctcagaaggagcggcagagacagaaggaactcgagtcaaactatcggagagtgtgggggtcccctggcggagaaggaaccggcgatctggatgaattcgatttttag

SEQ ID NO: 233664 - DNA, 1839 bp, synthetic construct
  misc_feature 1..1839: note = Description of Artificial Sequence: Synthetic coding sequence
  source 1..1839: mol_type = other DNA
atggctgcggagactttgcttagctccttactaggcctgctgctgctggggctgctgctccccgcatctcttactgggggtgtggggagcctgaatctggaggagctttccgagatgcggtacggcattgaaattctaccgcttcctgtcatgggtggccaaagccaatcatccgacgtagtgatcgtgagtagtaaatataagcaacggtacgagtgtcggctccctgcgggagccatccacttccagcgggagcgtgaggaagaaactcccgcttaccaggggccagggattccagagttgctgtcacccatgcgcgatgccccttgtttgctaaaaacaaaagactggtggacttacgagttttgctatggacgacatatccaacaatatcatatggaagatagtgaaatcaagggggaggtgctatacctcggatactaccagagtgctttcgactgggacgatgaaaccgccaaggcttcgaagcaacatagattaaaaagatatcattcacagacctacgggaatggatccaaatgtgacctgaacggccgaccaagggaagcggaggtcagatttctgtgcgacgaaggggctggtatcagcggcgactacattgatcgggtcgacgagcctctgtcatgctcctatgtgttaacgatccgaacccccaggctgtgcccgcaccctctgctcaggccacctccgagcgctgcccctcaagccatcctctgtcacccctccctgcagcccgaagagtacatggcatatgtccaaagacaggctgacagcaaacagtacggggacaagattatcgaggaactgcaagacctggggcctcaagtgtggtctgagactaaaagtggtgtcgcccctcagaaaatggccggagcgtcaccgacgaaggacgatagcaaggacagtgacttctggaagatgctgaacgaacccgaagatcaggcgccaggaggagaggaagtccccgctgaagaacaagatccttccccagaagccgctgattccgctagtggcgctcctaacgatttccaaaacaatgtccaggttaaagtgatccggtcccctgccgaccttatccgcttcatcgaggagctcaaagggggaaccaagaagggcaaacctaacatcggacaggagcagcctgtcgacgacgccgcagaggtccctcagagagaaccagagaaagaacgaggtgatccagagaggcagcgggaaatggaagaggaagaagacgaagatgaagatgaggacgaagacgaggacgagcggcagctgctaggagagttcgagaaggaactggagggcatcctgctaccatccgatcgggaccgactgcgcagtgaggtgaaagccggaatggaacgtgagctggaaaacatcatacaggagaccgagaaggaactggacccagacggccttaaaaaggagtccgagcgtgacagggcgatgctggccctgacctccaccctcaacaagctgattaagcggcttgaggaaaagcagagccccgaactggtgaagaagcacaagaaaaagagagtggtgcctaagaagccccctccctccccgcagccaacaggcaaaatcgaaatcaagattgtgaggccctgggccgagggtactgaagaaggggctagatggctcacagatgaagacacaaggaacctgaaagaaatttttttcaacatcctggtaccaggagcggaggaagcgcaaaaggagcgccagagacagaaggagctcgagagtaactaccgcagagtctggggatctcctggaggtgaaggcactggggatttggacgagtttgacttctag

SEQ ID NO: 233665 - DNA, 3462 bp, synthetic construct
  misc_feature 1..3462: note = Description of Artificial Sequence: Synthetic coding sequence
  source 1..3462: mol_type = other DNA
atgtctcaagaacctacaacatattcactgtttctgtttttgttcctatcccatggagtgtcgtcctatacggtgccgaactcaagacaagatcttcatcctctattgcagaatatggccgaggagattatcgatggttcataccttaatgcccttctcgacctgatccaattccagtcctcacacgtgtggacagatgacctaagtcatcgcgtgctggcgtatttgaacagcaggaatgtggctttcacaattccgagtcttcaagcggctgtggaaaatcaccttgaacagagactgcatcagccccaaaaactgctggaagacctgaggaaaacggacgcccagcagttccggaccgccatgaaatgtttgctggaggataagaaggacgggctggatcttaaggatatcatcattgacctcggcgaaattagggaacgggcactgcaaagccccggagtgaaccgctccctcttcttaattaccttggaacggtgctttcaaatgttgaactccctggaatgtgtggagatcttgggtaaagtccttagaggctcttctggctcatttcttcagcctgacattacagagcgtctgccgagggatctgcgtgaagatgccttcaaaaacctctctgccgtgttcaaagatctttatgacaagacctctgcccattcacagagggccctttacagctggatgactgggatccttcaaacgagcagtaacgccaccgacgattctgctagctgggtaagtgctgaacatctgtgggtgttgggtaggtacatggtccacctgtcttttgaagagatcacgaagatctctccaattgaaatcggcctcttcatctcttacgataacgccacaaagcagctcgatatggtctacgacataacaccggaactcgctcaagcctttcttgaacgaatttcttcctcaaattttaacatgcgaaatacatctactatccaccggcaagctcatgaactttgggcacttgagccttttcctaagatgcttggactgctggtgtgcttttataacgacctagagttactggatgctaccgttgcccaagtgttactctaccagatgataaagtgtagccatctgagagggtttcaagccggagtccaaaagctgaaggccgaacttcttgacatcgccatggagaatcagactctgaacgagacgctcggatccctttccgacgccgtggtgggcctcacttattcccagctagaaagccttagccctgaagccgtgcatggcgcaatcagcacactgaatcaggtgagcggatgggccaaatcccaagtgataattctctccgcaaaataccttgctcatgagaaggtcctcagcttctacaatgtatctcagatgggcgctttactggctggcgtttcaacacaggctttctgcagcatgaaacggaaagatatatcacaagtcctgcggagtgcagtgtcccagtacgtgtccgatctgtcccccgcacagcaacagggaatactgagcaagatggtgcaggcagaagataccgcccctggcatcgtggagatccagggtgcttttttcaaagaagtctcgctgtttgacctaaggcggcagcccggttttaactccacggtgctgaaggacaaggaattaggacggtcacaggccttgttcttgtatgagctcctgttgaaaaccacgaggcgcccagaggagctgctatcagcgggacagctggtgaagggggttacctgttcgcatatcgatgctatgagtaccgacttctttctggcccactttcaggatttccaaaacaattttgctcttcttagcccctatcaggtcaattgcctcgcctggaagtattgggaagttagccgcctgtcaatgccgccttttctgctagccgctctcccagccaggtatcttgcgagtgttcccgcatcacagtgcgtgcctttcctcatctcactggggaagagttggctggattctctggtcctggattcacacaagaaaacctccgtgttaagaaaggtacaacagtgtttagacgactccattgccgacgagtataccgtcgacataatgggaaatctgctctgtcacctgcctgctgcaattattgacagaggcatctcaccaagggcatgggctaccgccttacacggattacgggattgtcccgatttgaatccggaacagaaggcggcagtgaggctaaaacttctcggccagtacggactcccccaacattggaccgctgagacgaccaaagacctaggcccatttctggtgctattttccggagatgaattgtcaagcatcgcaacgaaattcccagagattctgctgcaagccgctagcaaaatggcgcgtacactgccaaccaaggagtttctgtgggctgtgttccaatccgtacgcaacagcagcgataaaatccccagctacgacccaatgccaggctgtcacggtgtggtggcaccatcctccgacgacatatttaagctcgctgaggcaaacgcttgttgggccctggaggatctacgctgtatggaagaggacacttttattcggaccgtggaacttttaggtgcagtccagggcttctccagaccccaacttatgaccttaaaggaaaaagcgatccaagtctgggatatgccttcctactggagagaacatcacatcgtgagtctcggcagaatagccctggcattgaatgagtcagaacttgagcaactggacttgagctcaattgacacagtcgcctcgctctcttggcaaacagagtggacacctggtcaggcagagtctatcctgcagggatacctcgatgactccggctattccatccaggatctgaagagcttccatctggtgggtttaggggcaaccctgtgcgctatcaacatcacggagattcctctcatcaaaatcagtgaattccgggtggtggtcgcgcgaatcggtaccctcctgtgcagcactcacgttcttgcagagtttaagcggaaggccgaggtggtcttcggcgatccaaccgagtggacttcctcagtactgcaagaactcggaactatcgccgctggcctcacaaaagcggagttgcgcatgctggataaggacctcatgccttattttcagccgagcgccataaaatgcctgcctgacgaaatcttcaaggaactctccgctgaacagatcgcttctctggggcctgaaaatgcagccgctgtgacacatgcccagagaagacggctcagtccactccagctccaatcgctacagcaggctttggatggtgcgaagacgcatagctggcaggatgccccagcctccgcgggtcccactcggacttcgtcttcccgctcccctgccggagcgttgcaatcttggggcctgtggctcggttgccccctgctcgtcctaatggcaaagctactctggtag

SEQ ID NO: 233666 - DNA, 1647 bp, synthetic construct
  misc_feature 1..1647: note = Description of Artificial Sequence: Synthetic coding sequence
  source 1..1647: mol_type = other DNA
cctcgggctgtgtgggtggaggcacggggtggagcccagcaccccacgatgcgccgaacagctccactgcaccggggtacatggtcaaaaatgtcgatcattttgagggctcggtacctcgcaagcgtgccagcctcccaatgcgtaccattcctgatatccctggggaagagttggttggattctctggttctggactctcataagaagacgtcagtcttacggaaggtgcagcagtgtctcgatgactcaatcgccgacgagtacacagtcgacatcatggggaatctgctgtgccacctgccagctgccatcatcgatcgcggtattagccccagggcgtgggctacggccctgcacggcttgcgggactgtccggatctgaatccagaacagaaggccgctgtgaggctgaagctgctcggacaatacggtctgccacagcactggaccgccgaaaccactaaggatctaggcccattccttgtgctctttagcggagatgaactgagtagcatcgccaccaagtttcccgagattctactgcaggccgcatccaagatggccagaacccttccaacaaaagaatttctttgggcagtgtttcagagtgttcgcaattcaagtgataagatcccatcctacgaccccatgccaggttgtcatggggtcgtggctccaagctcagacgatatcttcaaactcgctgaggccaatgcgtgctgggctctggaagacctacgctgtatggaagaagatacttttatccgaactgttgaacttctcggtgctgtccagggattctctcgtcctcagttgatgacactcaaagagaaagcaatccaagtgtgggatatgccaagctactggcgtgaacaccacatcgtgagtctgggacggattgcactcgccctgaatgaaagcgaattagaacagctggacctctcgagcattgacaccgttgccagcttaagttggcagaccgagtggacaccgggacaggcagagagcatccttcagggatatctcgacgactctggatactcaatccaggatttaaaatccttccacctggtggggctgggtgctactctctgcgcaattaacatcaccgaaattccacttatcaaaatttcagagtttagggtcgtggttgccagaatcgggacccttctatgctcgacgcatgttctcgccgagttcaaaagaaaggctgaagtggtctttggcgaccctaccgagtggaccagcagtgtgctgcaagagctcggaacaattgccgctgggttgaccaaagccgagttacgaatgttggataaagacttgatgccgtattttcagccctccgcaataaaatgtctgccagatgaaatctttaaagagctgagcgcagagcagatcgccagtctcggcccagagaacgcagctgccgtgacccacgctcagcggaggcggctttccccgctccaacttcagagtctccagcaggcactcgatggagctaaaacgcattcttggcaagatgctcctgcctctgcaggaccaacccggacctccagctctcgaagtccagccggagcccttcagagctggggactctggctgggttgccccctcttggtgctgatggcaaagctgctgtggtag

SEQ ID NO: 233667 - DNA, 3183 bp, synthetic construct
  misc_feature 1..3183: note = Description of Artificial Sequence: Synthetic coding sequence
  source 1..3183: mol_type = other DNA
atgggaaattctatcacataccgtgatcaggcagccgtggagaatcacctggaacagcggctgcaccaacctcagaagcttctggaggatctgcgaaagacagatgcccagcagttccgaactgccatgaaatgcctactggaggacaaaaaagatggcctcgacctgaaggatatcataattgatctgggtgagatacgcgagcgcgcactgcagagtccaggagtcaaccgatccctctttctcatcaccttggagcgctgcttccagatgctgaactctcttgagtgcgtcgaaattctaggcaaggtcttaaggggcagttctggttctttccttcaaccagacatcaccgaaagactccccagggacctgagagaagacgcgtttaaaaacctgtccgcagtgttcaaagatctgtacgacaagacctctgcccattcccagagagctctctatagctggatgactggaatcttgcaaacatcttctaacgcaacagatgatagcgcatcgtgggtcagtgcggagcatctgtgggtgttgggcagatacatggtccacctgtcgtttgaggaaattacaaagattagccctatagagattggtcttttcatcagctacgacaacgctacaaagcaacttgacatggtatatgacattacgccagagcttgcccaggcctttctggagagaatctcttcatccaattttaatatgcgcaatacgtcaacgatccacagacttggactgctcgtgtgtttttacaatgacctggaactgttagacgctacagtggctcaagtgttactataccagatgattaaatgctctcatttgagagggttccaggcaggcgtccagaaactgaaggcggaactcttggacatcgcaatggaaaatcagaccttgaatgagaccctggggtcactctcagatgcagtggtgggactcacctactctcagttagagtctctttcgcccgaggcggtgcacggagccattagtacattgaatcaggtctcaggttgggccaagtcccaggtcatcatactcagtgctaagtacctcgcacacgaaaaagtgttatctttctataatgtgtctcagatgggcgctctgttggctggcgtgtctactcaggctttttgctcaatgaagcggaaggacatcagtcaggtgttacgcagcgccgtttcccagtacgtgagcgacctcagcccagcgcagcaacaaggaattttatctaagatggtgcaggctgaagatacagctcccggtattgtggagatccagggcgcatttttcaaggaggtgagcctgttcgatctgcggagacagccgggatttaattccacagtgctcaaggataaggaactcggcaggagccaggcattattcctgtacgagctccttctcaaaaccactaggaggcctgaagagctcctgtcagccggacagctggtgaagggagtgacctgttctcacattgatgcaatgagcactgacttcttcttagcccacttccaggattttcaaaataatttcgctctgctgagcccataccaggtaaactgtctggcttggaagtattgggaagttagtaggttgtctatgccaccatttctgttagctgctctgcctgcaaggtacctggccagcgtcccagctagccagtgcgttcccttcctgatttctctcggaaaatcctggctcgatagtctagtgctcgacagccataagaagaccagtgtgctccgcaaagtgcagcaatgcttggatgactctatcgcggacgagtacacagtggatatcatgggcaatctgctctgccaccttcctgcagcaatcattgaccggggaataagcccgcgtgcgtgggccaccgctctccacggcctccgcgactgccccgacctgaatcccgagcaaaaagccgctgtcaggctgaagcttttggggcagtacggattgcctcagcactggaccgctgagactactaaggacctggggccttttctggtcttgttttcaggagatgaattgtccagcatcgctaccaagtttccagaaattctcctccaagcagcgtctaaaatggcccgaaccctgcctaccaaagagttcctctgggccgtattccaaagcgtgaggaactctagcgacaagatcccgagttacgaccctatgcccggttgccatggagtggttgcccctagcagcgatgatattttcaagcttgccgaagccaacgcatgttgggccctggaagatttacgatgtatggaagaggatacctttatccggacagtggaattgttaggggctgtgcagggcttctccagacctcagcttatgaccttgaaagagaaggctattcaggtctgggacatgccctcttactggcgcgagcaccacattgtctccctcggaaggatcgcactggcactgaatgaaagcgagctggagcagttggacctgtcctccattgacaccgtggcttcactgtcctggcagaccgaatggacccccggtcaggccgagagtatacttcagggatacctggatgactctggctacagcattcaagacctgaaatctttccatctggtggggctcggagcaacactttgtgccattaatattactgagatacctttaatcaagatatcagaatttagagtggtagtggccagaattggcacccttctgtgcagcactcacgttctggccgaatttaagcgcaaggccgaagttgtgtttggagatccaacagagtggacctccagcgttcttcaggagctcgggaccattgcagctggactaaccaaggcagagcttcgaatgctagacaaggacctcatgccctacttccagccttctgcgattaaatgcctaccggacgagatctttaaggagctgtctgccgagcaaatagcctctctgggaccagagaacgctgctgccgtgacacatgcccagaggaggcgcctgagccccctacagctgcagtcgctacagcaggccctcgatggtgcaaagacacactcttggcaagatgcccctgcctcagctggcccaacccgtacgagcagctcacggtctccggctggcgcactgcagtcatgggggctgtggcttggctgtccactgctggttctgatggcgaagctcctctggtag

SEQ ID NO: 233668 - DNA, 2448 bp, synthetic construct
  misc_feature 1..2448: note = Description of Artificial Sequence: Synthetic coding sequence
  source 1..2448: mol_type = other DNA
atgttccgcctgggcctgttggtctgcttttataacgacctcgaactgcttgatgcaactgtcgcccaagtgcttctctatcagatgatcaagtgctcacaccttcgcggatttcaagcaggagtgcagaaactgaaggccgaactcctagacatagcaatggaaaaccagacccttaacgagaccttaggatctctgtctgatgcagtggtaggactcacctactcacaattggagagtctgtcccccgaggccgttcacggagcgatcagtacactgaatcaggtgtcagggtgggctaagagccaggtcatcattctcagtgcaaagtatctggcccatgaaaaagtactgtcattctataacgtttcccagatgggtgctctgttggccggagtctccacacaagctttttgctctatgaagcggaaggacatctcccaggttctcaggtccgccgtgtcgcagtacgttagtgacctaagtcctgcccagcaacaaggcatcctcagtaaaatggtccaggcggaggacaccgccccaggcattgtggaaattcagggcgctttctttaaggaagtctccttgtttgatcttcgccgtcaaccaggatttaattccacagtccttaaggacaaggagctgggccgatcacaggcgttatttctgtacgaactgctattgaaaacaaccaggagaccagaagaactgttaagtgcaggtcagttagttaagggcgttacctgttcccacatagacgctatgtcgacggatttctttctcgcccatttccaagatttccaaaataacttcgccctacttagcccttaccaggtgaattgcctggcttggaaatattgggaggtgtccaggctgagcatgcctcctttcctcctggccgcactgcccgcaagatatctggcttctgtacctgcttctcaatgtgtacccttcctaatttcactgggaaagagctggcttgattctctagtcctcgactcccacaaaaagacgtccgtgttaaggaaagtgcagcaatgtctagatgactccatagcggacgagtacacagtcgacatcatgggaaacctactttgtcatcttcccgcagctatcatcgacagaggtatctccccaagagcatgggccacagcattacacgggctacgggattgtcccgaccttaaccccgagcagaaggctgcagtgaggctgaagctgctcggccagtatggccttccacaacattggacagccgaaactaccaaggatctgggcccttttcttgtgctgttttcaggcgatgaactctcaagcatcgcgactaagtttccagaaattctcctccaggcggcatctaagatggcacgtacacttccaacaaaggaatttttatgggccgttttccagtctgttcgaaattcctctgataagattcctagttacgatcccatgccgggttgccacggtgtcgtggcaccaagctcagacgacatctttaagctggcagaggctaatgcttgttgggccttggaggatctgaggtgtatggaggaggacactttcatcaggactgtcgagctattaggcgctgtacaggggttttccagaccccagctgatgacgttgaaagagaaggcaatacaggtttgggacatgccatcctattggagggagcaccacatagtcagtctgggccgtattgctttggctctgaacgagtccgagctcgaacagttagacttgagctctatagacacagtggccagtctatcgtggcagacggaatggaccccaggacaggccgagtcgatcttacagggctacctggacgacagcggctacagcatccaagaccttaaatcattccatctggtggggctcggggctactctgtgcgccatcaatattactgagatccccctgataaaaattagcgagttccgagttgttgtggcacgtatcgggaccctcctgtgtagcacacacgtgctcgcagagtttaaaagaaaggcggaggttgtgttcggtgaccctaccgagtggactagctcagtcttgcaagaactcgggaccatcgctgcaggcctgaccaaagctgagctgcgtatgctcgacaaggatctgatgccttactttcagccttccgccattaagtgccttccagacgagatctttaaggagctttcagcagaacagattgcaagtttaggtccagagaatgcagcagctgtcacccacgcccagagacgtagactgagcccactccagctgcagtcacttcaacaagctctggacggcgcaaagacccactcttggcaagatgcgccagcttcagccggaccaacccggacatccagcagccgatccccggcaggcgctctacagtcatggggtctatggctagggtgccccttgctcgtactgatggccaaactgttgtggtag

SEQ ID NO: 233669 - DNA, 3420 bp, synthetic construct
  misc_feature 1..3420: note = Description of Artificial Sequence: Synthetic coding sequence
  source 1..3420: mol_type = other DNA
atgtcccaggagcccacgacttatagtctgtttctattcctcttcttgtcccatggagtctcctcctatacagtgccaaacagcaggcaggatctgcaccccctgctccagaatatggccgaggaaatcatcgatggctcctatctcaatgcactgcttgatttgatccagtttcaaagctcccacgtttggaccgatgacctatcccacagagtgttggcctacttgaacagtcgtaatgtggcattcactattccttccctgcaggctgctgtagaaaatcacctcgagcaacggcttcatcagccccagaagctgctcgaggacttgaggaagacggacgcccagcagttccgaaccgcgatgaagtgcttactggaagataagaaggacggccttgatctgaaggatataattatcgacctgggggaaattagagagcgcgctttacagagccccggagtcaaccggtccttgtttctcattaccttggagcgctgtttccagatgttgaattcattggaatgtgtggagattctagggaaggtgctgagaggaagctctgggagctttctccagcctgacatcaccgagcgattgcccagagaccttagagaagatgcattcaagaacctctccgcagttttcaaggacctgtacgacaaaacctctgcccacagccaaagagcattatacagttggatgacagggatcttgcaaacgagctcaaatgcaacagatgactcagctagctgggtgagtgctgaacacttgtgggtcttaggtcgctatatggtgcacctttcatttgaggagattacaaagataagtcccatcgaaataggccttttcatatcctacgacaacgctacaaagcagctggacatggtgtatgacatcaccccagaattagcccaggccttcctggagaggatctcatcctccaacttcaatatgcggaatacaagtactattcataggttagggttgctagtttgtttctataatgacctagagctgctcgacgctactgtggctcaggtgctattataccagatgatcaaatgctcgcacctgcggggatttcaggcaggcgtgcagaagctcaaagctgaactgctagatattgctatggagaaccagacactgaatgagactctgggaagtttgtctgatgccgtggtgggcctaacatacagtcaactggagagccttagtcccgaggctgtgcatggcgctattagtaccctgaatcaggtgtccggatgggccaagagccaggtgatcattttgagtgccaagtacctggcacatgagaaagtcctctcattttacaacgtgagccagatgggggcattgctggctggggtgagcacacaggccttctgctccatgaagaggaaggacatctcccaggtcctgaggtccgcagtaagccaatacgtgtcagatctgagtcccgctcagcagcaaggaatcctgagtaaaatggttcaggcggaagacaccgcgcctgggatagtggaaattcagggagcgttttttaaagaggtctctctgttcgatctgagacggcagcctggatttaattccaccgtcctaaaagacaaagaattggggcgatctcaggcgctgttcctctatgagctcttgctgaaaacgacccgacgcccagaagagttgctttcggcgggtcagctagttaaaggtgttacttgctcccacatagacgccatgagtacagacttcttccttgcccacttccaggatttccaaaacaatttcgccctgctgagcccttatcaggtgaactgcctggcgtggaagtactgggaggtctcccggcttagtatgccacctttcctgctcgccgctcttcccgctagatacttggcctccgtgcctgctagccagtgcgttccgtttctgatctcattgggtaaatcatggctagatagtctcgttcttgatagccacaaaaagacttccgtgttaaggaaggtgcaacagtgcctggatgactcaatcgccgacgaatacacagtagatatcatgggaaatctactgtgtcatctccccgctgctatcatcgatcggggtatatctcctcgggcatgggctactgcattgcacggcctgcgggactgcccagatctgaacccagagcagaaggcagcagtgcgcttaaagctcctgggacaatacggattgccacagcattggacagccgagacgactaaggaccttggcccattcctcgtactgttctccggcgatgaacttagctccatcgccaccaagttccctgagatccttcttcaagcagcgtcaaaaatggctagaactctcccaacaaaggagttcctgtgggccgtttttcagagtgtgaggaattctagcgataagatcccctcttatgatcccatgcccggatgccacggggtggtggcgccttcatccgacgacatctttaaactggcagaagctaatgcttgctgggcactcgaggatcttcggtgcatggaggaggacaccttcatccggaccgtggagctcttgggagcagtccaggggttctcccgaccgcagctaatgactctcaaggagaaagctatccaggtctgggatatgccgagctactggcgcgaacatcacatcgtctcattagggaggatagccctagccctaaacgaatcagagctagagcagctggacctcagttcaattgataccgtggcaagtctgtcctggcagacagaatggacacccggtcaggccgagagtatcctacagggctacctggatgatagcggctacagtatccaggacctgaagtcctttcatctggttggcctgggcgcaactctgtgtgccatcaacataacagagattcccctcatcaaaattagcgagttccgggtggtagtggcgagaatcgggacgcttctgtgcagtacgcacgtccttgcagagttcaaacgtaaggcggaggtcgtgttcggggaccccactgagtggacttcttccgtactccaggaattgggaactatagctgccggactaacaaaggccgaactcaggatgctcgacaaggatctgatgccatacttccagccttccgctattaagtgtttgcctgatgaaatctttaaggagctttctgccgaacagatcgcctctctcggcccagagaacgccgcagccgtaactcacgcccagcgcagaaggctgtcccctttgcagctccagtctttgcaacaggccctcgatggagctaagactcattcttggcaagatgccccagcctcagcagggcctacaagaacgtcctctagcaggagccctgcaggcgctctgcagtcttggggcctttggcttgggtgccctctgctggtgttgatggccaagctactgtggtag

SEQ ID NO: 233670 - DNA, 1434 bp, synthetic construct
  misc_feature 1..1434: note = Description of Artificial Sequence: Synthetic coding sequence
  source 1..1434: mol_type = other DNA
atgatcgctttcctcctgactagcgtacttatgatcccccatgcaggagggcacccgctggacacgccacatttaccccaggaattgcccccaggtctgcctaataatatcaacatcacatttttttccggaatgttcaagaacgtagagagtgtagcagaaattttcgattgccttggccctcacttcacttggctgcaggctgtgttcacgaacttccccgtcctgattcagtttgtgaacggaatgaagtgcgttgcgggactttgtcccagggactttgaggactatgggtgtacgtgtcgttttgagatggagggcctccccgtagatgaatcagatagttgttgtttccagcatcgcagatgttacgaggaggccgctgagatggattgcctgcaggaccccgcaaagctcagcaccgaagtgaactgtgtaagcaaaaaaattatctgcgaatctaaggacaactgtgaacacctgttatgcacttgtgataaggcggctatcgagtgcctggccagaagttctctgaattctagcctgaatttgttagatacgagtttttgcctcgcgcagacccccgaaactacaatcaaagaggacctgaccacccttctgccacgcgtggttcccgtggaacccaccgacacctccctgacagccttgtcgggcgaagaggctggccatgatcaggagggcgttggcgcagccagggctacatccccccctggttctgctgaaatcgtggcaaccagggtgacagctaaaatcgtgacactggtgcctgctgggataaaatctctcggactggctgtgtcttctgtggagaacgacccagaagagaccaccgaaaaggcctgcgaccgttttactttcttgcatctgggctccggagacaatatgcaagtcatgccccagttgggcgagatgctgttttgccttacttctcgctgcccagaagaattcgagagctacggatgctactgtgggcaagaaggcagaggagagcccagagacgacttagaccgctgctgcctctctcaccactgttgccttgagcaggtgcggcgtctgggatgtcttctggagagactgccgtggtctcctgtagtgtgcgtcgaccataccccaaaatgtggcggacaaagcctttgcgagaagctgctctgcgcttgtgatcagacagcagccgagtgcatgacaagcgctagtttcaaccaatctctgaaaagtccttcgcgtctgggttgcccagggcagccggctgcttgcgaggatagcctccacccagtccccgcagcccctacactagggtcttcgagtgaggaagattctgaagaagacccccctcaggaggatttggggcgtgcaaagcgctttctcaggaaatctttgggcccattgggtatcggtccattgcatgggaggtag

SEQ ID NO: 233671 - DNA, 1482 bp, synthetic construct
  misc_feature 1..1482: note = Description of Artificial Sequence: Synthetic coding sequence
  source 1..1482: mol_type = other DNA
atgatcgcattcctcctgacctccgtgctaatgatcccacacgccggaggtcaccccctcgacactcctcacttgcctcaggaattgccccctgggctccctaacaacatcaacatcacatttttttcagggatgttcaaaaacgtagaaagtgttgccgaaatcttcgactgcctgggcccacatttcacatggctacaggccgtgtttacaaattttccagttctcatccagttcgtcaatgggatgaaatgcgttgccggactctgccctcgcgacttcgaggattacgggtgcacctgtcgcttcgagatggagggcctgcccgtggacgagagtgactcatgctgcttccagcacagacgatgttacgaggaggccgcagagatggattgcctgcaagatcctgcgaagctttccacggaagtgaattgtgtctcaaagaaaattatatgtgaaagcaaggacaattgtgaacacctgctgtgcacctgtgataaagctgctattgaatgtttggcccgatctagccttaactctagtctgaaccttctcgatacatcattctgcctcgcacagactcctgagaccacaattaaggaggacttgaccacgctgctgccacgtgtggtccctgtcgaacctactgacacctcactcaccgcactctctggggaggtcgctgccgagaccgaagcagaccgcctgatcaccctgtctaaaaagaaagctgggcacgatcaagagggtgtgggcgcagctcgagccactagccctcctgggtctgcagagatcgttgcaacaagggtgacagccaagattgtgaccttagtcccagcgggaatcaagagtctcggcctcgctgtgtcatctgtggagaacgaccctgaggagacaacagagaaagcatgtgaccggtttactttcctccacctaggctccggagacaatatgcaggtgatgcctcagttgggggaaatgctgttttgcctcacatctaggtgcccagaggaatttgaaagctatggctgctactgcggacaagaggggaggggcgagcccagagatgatttggacagatgctgcctgtcacaccactgctgtcttgagcaggtgaggaggctcggctgcctgctcgaaagactcccatggagccccgtggtgtgcgttgatcacactccaaagtgcggtgggcagtctctctgcgaaaagctcctgtgtgcctgcgaccaaacggcagcggagtgtatgacatcggcctcctttaaccagtctctcaaatcgccatcacgtctgggctgcccagggcagcctgctgcctgtgaagactctctgcatcctgtgcccgctgctccaaccctcggatcatcctccgaggaggactctgaagaagacccaccacaggaagacctgggccgagccaaaagattccttcgcaagagcctgggccctctcggtattggtcctctacatggaagatag

SEQ ID NO: 233672 - DNA, 5994 bp, synthetic construct
  misc_feature 1..5994: note = Description of Artificial Sequence: Synthetic coding sequence
  source 1..5994: mol_type = other DNA
atggctttactaatacacctgaaaaccgtttctgagctgcgcggtcggggagaccgcatagcaaaggtgacgttccgtggccagagcttctattcacgggtgttggaaaattgcgaagacgtcgccgattttgatgagaccttccgttggcctgtggcaagctcaatcgaccgaaacgaaatgctcgagattcaagtttttaactacagtaaagtcttctctaacaagcttattggaaccttcaggatggtgttgcaaaaagtggtggaggaatcccacgtcgaggtgacagacacattaatcgacgacaacaatgccattattaagaccagtctatgcgtggaggtgcgctatcaggctacggacggcacagttggaagttgggatgatggcgattttctcggcgacgaatctctgcaagaagaagagaaagattctcaggagactgacgggctgctacccggttcaaggccaagctcccggccacccggtgagaagtccttcaggcgcgcagggagaagcgtgtttagtgctatgaaattgggtaaaaacagatctcacaaagaggagccccagcgccctgatgagcctgctgtgctggagatggaggaccttgaccatctagcgattcgcttgggagacggactggacccagacagcgtgtccctggcatccgtcactgcccttacgaccaatgtaagcaataagcggtccaagcccgacatcaaaatggagcctagcgccggaaggcctatggattaccaggtgtcaattactgtcatcgaggctaggcagttagtgggcctgaacatggaccctgtcgtctgcgtagaggtgggggacgacaaaaagtatacctctatgaaagaaagcacaaattgcccgtactacaatgagtacttcgtcttcgattttcacgtctcccccgacgtgatgttcgacaaaatcatcaagattagcgttatacacagcaagaatctcttgcggtccgggacattggtggggtctttcaaaatggacgtgggaactgtctactcgcaacccgagcaccagttccatcacaagtgggccatcctgtccgatccggatgatatcagtagtggcctgaaggggtacgtcaagtgcgatgtcgcggtggttggcaagggggacaatatcaaaacaccccacaaggcaaacgagacggatgaggacgacatcgaggggaatctgctcctccctgaaggggttccacccgaacgtcagtgggcaaggttctatgtcaagatttaccgggcagagggcttacccaggatgaataccagtttgatggccaacgtcaagaaagcctttattggcgaaaacaaagatctcgtcgacccatacgtccaggttttctttgctggccagaaaggaaagacctccgtccaaaagagctcgtacgagcccctgtggaatgaacaagtggtcttcacagacctgtttcctccattatgcaaaaggatgaaagttcagattagagactctgacaaggtgaacgatgtggcgatcggtacacatttcatcgacctgcgaaagatctctaacgatggagataaaggcttcttacctacactggggccagcctgggtcaatatgtacggatctacccggaattacactcttctggatgagcatcaggatctaaacgaaggcctgggggaaggagtgtcattcagagcacggctcctcctgggcctcgctgtcgaaatcgttgacacctctaaccccgaactcacatcatctacagaagttcaggtcgagcaggccacacctatcagcgagagttgcgccggaaagatggaagagttttttctgtttggcgctttcttggaagctagcatgattgaccgacgcaatggcgataagcccatcaccttcgaggtcaccatcggcaactacgggaatgaagtggacggactaagcagaccgcagcgtccaaggccacgcaaggagcctggcgatgaggaggaggtggacctcatccagaacgccagtgacgacgaggcgggagacgctggtgaccttgcgagcgtgtcgagtactccgccaatgaggcctcaggtgaccgatagaaactatttccaccttccctacctggagcgtaaaccatgtatctacatcaaaagctggtggcctgatcaacgaagacgcctctataatgctaacataatggaccacatcgccgacaagttagaggaaggccttaacgacattcaggaaatgataaagacggagaagtcatatccggaacgtcggctgaggggagtgctggaagaactaagctgcggttgctgccgctttctgagtctagcagataaggaccaggggcactcatcaaggactcgcctggatcgtgaacggctgaagagttgcatgcgggaactggagaatatgggtcagcaggctcggatgttgagggcccaggtgaaaaggcatacagtcagagataaattacggctgtgtcagaatttccttcagaaactgcgcttcctggccgacgagccacagcatagcatacccgatattttcatctggatgatgtctaacaacaagcgggtagcctatgccagggtaccgtcgaaggatctgttattttccatcgtggaggaagagactgggaaagactgtgccaaagtgaagacgttgttcttaaagctacctgggaaaagaggattcggctccgccggatggacagtgcaggcgaaggttgagctctacctttggctcggactctctaaacaacgcaaggagtttctctgtggcctgccttgcggattccaggaggtcaaagctgcccaaggactggggctacacgcttttccacctgtctccctggtttacaccaaaaaacaggcgttccagctgcgcgctcatatgtatcaggctcgttcacttttcgctgccgactcctcgggcttgtctgatcctttcgccagagtgttcttcatcaatcagtctcagtgtactgaagtgctgaacgaaaccctttgcccaacctgggaccagatgctcgtattcgataacctcgaactgtacggcgaagcccacgaactcagagacgaccccccaatcattgtcatagagatatacgaccaggacagcatgggcaaggcggactttatggggagaacatttgcgaagccactggtcaaaatggctgatgaagcctactgtcctcccaggttccctcctcaactggagtactaccagatataccgcggtaacgcaacagccggtgaccttctcgccgctttcgagctcttgcagattggaccagccggaaaggcagacctcccaccgatcaatggtccagtcgacgtggataggggaccaatcatgcccgtgcccatgggaatccgacccgtgctgtccaaatacagagtggaagttctgttttgggggctcagagacctgaagagagtcaacctagcccaggtcgatcgtccacgcgtagatattgaatgcgccggaaaaggagtccagagctccttaatccacaactacaagaaaaaccccaactttaatactttggtcaaatggttcgaagtggatctgcctgagaatgagctgctgcatcctccactgaatatcagagtcgtagactgcagagctttcgggagatatactctggtaggaagccacgcagtttccagcctgcggagatttatctatagacccccagataggtcagctccctcttggaatacgaccgtccgattactgcgacggtgtagagtcctctgcaatggaggaagtagctcccactcaactggtgaggtcgtggtgactatggagcccgaagtccccattaagaagttggagactatggtgaagctcgacgctacctcagaagctgttgttaaggttgatgtagcagaggaagagaaagagaaaaaaaagaaaaaaaagggcacagctgaagagcctgaggaagaagaacccgatgagtctatgctggattggtggtctaagtatttcgcctctatcgataccatgaaagagcagcttcgacagcaagagccaagtggaattgacctcgaggaaaaggaggaagttgacaacactgagggtctgaaggggagcatgaaggggaaagagaaagcccgagcggctaaagaagaaaaaaagaaaaagactcaaagtagtggtagcggccaagggtccgaggccccagaaaagaagaagccgaaaatagacgagctgaaggtctatccaaaagaactggaatccgagttcgacaactttgaggattggctgcacacctttaatttgttacgcggtaagactggggatgatgaggacggcagcacagaggaggaaaggattgtcggacgctttaagggctcactgtgtgtatataaggtccctctaccagaagacgtgtccagggaagccggttacgattccacttacggaatgttccaggggatcccaagcaacgaccctataaacgtgctggtaagagtctacgtggtcagggccaccgatctccatccggctgacataaatgggaaagcagatccctatatcgctatcaggctggggaaaaccgacattagggataaagaaaattacatcagcaaacaattgaatccggtgtttggcaagagctttgatattgaggcaagtttcccgatggagtcaatgttgacggttgccgtatatgactgggacctcgtgggtaccgacgatcttatcggagagaccaagatcgacctggagaaccgtttctacagcaagcatcgcgctacatgcgggattgctcagacgtatagtacccacggctataacatttggcgcgacccgatgaaaccgtcacagattctcacacgtctgtgcaaagatggcaaggtggacggaccacactttggccctcccggtcgggtaaaggtggcaaatcgggtgttcactggaccttcagagatcgaagacgaaaatggacagcggaaaccaacagatgaacacgtggctttgctcgctctgcggcactgggaagacatcccacgggctggctgccgtttggtgcctgagcacgtcgaaacccggccactgctgaacccagataaacccggtatagagcaagggcgactggagctctgggttgacatgttccctatggacatgccagcccctggtacgcccctggacatttcaccaagaaagccaaagaaatatgaattgagagtcataatctggaacacagatgaagtggtgctggaagacgatgatttcttcacgggggagaagtcatcagacatattcgtgcggggatggctgaagggccaacaggaggataagcaggacactgatgtgcattaccacagtcttacgggtgaggggaattttaattggcgttacttgttcccctttgactatctcgctgctgaggaaaagatcgtaatttccaaaaaagagagtatgtttagctgggatgagacagagtataagatacccgctcggctgactcttcagatctgggatgcggatcatttctccgccgatgattttttgggtgccatagaactggacctgaacagattccccaggggagctaaaaccgctaagcagtgcacaatggaaatggccactggggaggtggacgttccattggtgagtattttcaagcagaagcgggttaaaggctggtggcccctgctggcccgaaacgaaaacgatgaattcgaactcactggtaaggtggaagcagaactgcaccttctcaccgctgaagaggctgagaagaaccctgtcggcctcgcccgaaacgagcccgacccattagaaaagcccaatcgccctgacacttcttttatctggttcttaaatccgctgaaaagtgcgagatacttcctctggcatacctatcggtggctacttctgaagctcctgctccttttgctgctcctgctgttgctggccttatttctatacagtgtgccaggttacctggtcaagaaaatcctcggcgcatag

SEQ ID NO: 233673 - DNA, 3693 bp, synthetic construct
  misc_feature 1..3693: note = Description of Artificial Sequence: Synthetic coding sequence
  source 1..3693: mol_type = other DNA
atgattaagacagagaagagttaccccgaaaggagactcaggggcgttttggaggagctcagttgtggatgctgcaggtttctcagcctcgccgacaaggatcagggccacagtagtcggacccggctggatagggaacgcctcaaatcctgtatgagagaactggaaaacatgggccagcaggcacgcatgcttagagcccaggtaaaaagacacaccgtgcgggataagctgagactctgtcagaactttctccaaaagctgaggtttctagcagacgagccgcaacatagcattccagatatctttatttggatgatgtcaaataataaaagagtggcatatgcacgagtacccagtaaagatctgctgttcagtatcgttgaagaggaaacagggaaggattgtgcaaaggttaagaccctcttcctaaagctgccaggtaagcgaggcttcggctcagccggatggaccgtgcaagcaaaagtggagctgtatctgtggctgggcctatctaagcagaggaaggaattcctgtgcgggttgccctgtggattccaggaggtcaaggcagctcaagggcttgggttacacgcctttcctcctgttagcctcgtgtacaccaaaaagcaggcttttcagctgcgggcacacatgtatcaggctaggtccttgttcgctgcggatagttccggcctctctgacccctttgctcgcgtgttttttattaatcagagtcagtgtactgaagtactgaatgagaccttgtgtcctacatgggatcaaatgctcgtatttgacaacttggaactttacggcgaagctcacgaacttagagacgacccacccatcattgtgatcgagatatacgatcaagactccatggggaaggctgattttatgggccgtaccttcgccaaacccctagtgaagatggccgacgaagcttactgcccgcctcggtttcccccacagctggagtattatcaaatttaccggggtaatgctacagctggagacctgctagccgcatttgagctgcttcagatagggccagccggtaaggcagatctgccccctatcaatggtcccgtcgatgtcgacaggggccctattatgccagtccccatgggcatccgacctgtcttatccaagtaccgggtggaggtcctgttttggggcctgagagacctaaaacgggtaaatctcgcacaggtggaccgtcccagggtggacatcgaatgtgcagggaagggggtacagagctccctgatacacaattacaagaagaaccctaactttaacactttggttaaatggtttgaggttgacttgcccgagaatgagctgcttcatcccccacttaatatcagagttgtcgactgcagagcgtttgggaggtatacactggtgggatcacatgccgtttcatcgctacgtcgcttcatttatagaccgcctgaccgtagcgcccctagctggaacaccaccggggaggtcgtcgtgaccatggaacccgaagtgcccataaaaaaactggagacaatggtgaagctggatgccacgtctgaagcagtggttaaggtcgacgtggcggaggaggagaaggaaaaaaaaaaaaagaaaaaaggcacggcagaagagcccgaggaggaagagccagacgagtcaatgctggattggtggagcaaatattttgctagtattgacaccatgaaagagcagctgagacagcaggaaccttccggaattgacctggaggagaaagaggaggttgacaacaccgagggacttaagggatccatgaaaggcaaggagaaggcaagagcagctaaggaagagaagaagaagaagacacagtcaagtggctcaggccaggggtctgaagctccagagaaaaagaagccaaaaatagatgagctcaaggtttatccaaaggaactggagtctgaattcgataattttgaggattggctccatactttcaacctccttcgaggcaaaaccggagatgacgaagatggcagcacagaagaggaacggattgtgggcagatttaaaggatctctttgcgtgtataaggtcccccttcctgaggacgtgagtcgcgaggcagggtatgattccacttacgggatgttccagggaataccgagcaatgatccgattaatgtgctggttcgggtttatgtcgtgagagccactgacctgcaccctgctgatattaatgggaaagccgacccctatatcgcaattcgcttaggaaagactgacatcagagataaggagaactatatttctaagcagctgaaccctgtgttcgggaagtctttcgatatcgaggccagctttccaatggaatcaatgcttacagtggctgtgtacgattgggatctggtaggcaccgacgacctcatcggtgagaccaagatcgacctggagaataggttctacagtaagcaccgcgctacatgtggcattgcccagacctactctactcatggatacaacatctggagagatccaatgaaaccatcacagatcctcaccagactctgcaaggatggaaaggtggacggccctcactttggccctcccggacgcgtaaaagtcgcgaatcgggtcttcacaggacccagcgagattgaggacgaaaacggacagaggaaaccaacagatgaacatgtggcactgcttgccctcagacactgggaagatattccaagggcagggtgccggctcgttcccgagcacgtggaaaccagacccttgctcaaccctgataagccagggatcgagcagggcagactggagctctgggtagacatgttcccgatggacatgcccgcacctggcacacccctggacattagtccgcgaaaacccaaaaaatacgagctgcgtgtgataatatggaacaccgacgaggtggtccttgaggatgatgacttcttcaccggagaaaaaagctctgatatcttcgtaagagggtggctgaagggccagcaggaagacaagcaggatactgacgtacactaccattcgcttacaggagagggcaacttcaattggaggtatctgtttccatttgattacttagcggctgaagaaaagattgttatttccaaaaaagaatccatgttttcttgggacgagacggagtataagatcccagccagattgacattgcagatctgggatgctgatcacttctcagccgacgattttcttggtgctatcgaattggacctgaacaggttccctcggggagctaagaccgccaaacagtgtaccatggagatggctaccggggaagttgatgtgcccctggtgtctatcttcaagcaaaagagagtgaagggctggtggcctctgcttgcgaggaatgaaaatgatgagttcgaactgactggtaaagtggaagccgagctccatctgttgacggccgaggaagccgagaaaaatcccgttgggctcgctcgcaatgaaccagatccattagagaagccaaatcggccagacactagctttatctggtttctaaaccccttaaagtcagcgagatatttcctgtggcacacctacaggtggcttctgctcaagctactccttctgctcctattgctgctgctgctggccctgttcttgtactcagtccccggttacttagtaaagaagatcttgggggcttag

SEQ ID NO: 233674 - DNA, 3693 bp, synthetic construct
  misc_feature 1..3693: note = Description of Artificial Sequence: Synthetic coding sequence
  source 1..3693: mol_type = other DNA
atgataaaaacagaaaagtcctatcccgaacgtagactgcggggagtgctcgaggagctgtcatgcggctgttgtcggtttctcagcctggctgacaaagatcaaggccacagttctcgaacaaggcttgaccgagaaaggctcaagtcctgcatgcgcgaacttgagaacatgggacaacaagccaggatgttgcgggctcaggtcaaacggcatacggtccgcgataagctgagactgtgccagaatttcctgcagaagcttcggttccttgccgatgagcctcagcactccatacctgatatattcatctggatgatgagcaacaacaagcgagtggcttacgcacgggtccctagtaaagacctgctgttctcaattgtggaggaggagacagggaaggattgtgctaaggtgaaaacgttgtttctgaaactcccagggaagcgcggattcggaagtgcaggttggacggtccaagctaaagttgaactttacttgtggttgggactgtcaaagcagagaaaagagttcctctgcggtctgccctgtgggttccaagaggttaaggcagcccagggtctcgggctgcatgcatttcctcccgtaagcctggtgtacactaaaaagcaggcctttcagctgcgagcccacatgtaccaggccaggtctctttttgccgctgattctagtggcctttcagacccattcgcgagggttttttttatcaaccagagtcagtgtaccgaagtgcttaacgaaacactgtgccctacttgggaccaaatgctggtgtttgataacctggaactgtacggggaagctcacgagcttagagatgaccctcccattatcgtgattgagatttatgaccaggattccatgggtaaagccgatttcatgggcaggactttcgccaagccgctggtgaaaatggcagacgaggcttactgccctccacgctttccccctcaactggagtattatcagatttatcgcggaaacgctaccgctggagatctacttgccgcatttgaacttttgcagatcggacctgccggtaaggcagacctccctcctataaacggacccgtggatgtcgatcggggacccatcatgcctgtgcccatgggcatcagacctgtgttgagcaaatacagagtggaggtactcttctgggggctgagggatctgaaaagggtgaatctggcccaagtcgaccgtcccagggttgacattgagtgcgcgggaaaaggcgttcagagcagcctgatccacaactacaaaaagaatcccaatttcaataccctggtaaaatggtttgaggtcgatttaccggagaatgagctccttcaccctcccctgaacataagagtggtagactgccgggcatttggtagatatactctggtcggcagccacgcagtctctagcctgagacggttcatttacagaccccctgaccggtccgccccaagctggaatactacaggtgaagtggtggtaactatggagccggaggtgccaattaagaaactggaaaccatggtcaaacttgatgctacatccgaggcggtagtgaaggtggacgtcgctgaggaggaaaaggagaaaaaaaaaaaaaaaaagggaacagctgaggagcccgaagaagaggagcctgacgagagcatgctcgactggtggtctaagtatttcgcatctattgacacaatgaaagagcaactgcgccagcaagaaccctccggcatagatctcgaggagaaagaggaggtcgataataccgaaggcctgaagggctccatgaaaggaaaggagaaagcccgtgctgcgaaggaggagaaaaagaaaaagacacagtcgtccggttccggacaaggcagtgaggccccagaaaaaaagaaacccaagatcgatgagctgaaagtctatcccaaagagctcgagtcggaatttgacaactttgaagattggctccacacattcaatctgctgcgcggtaaaacaggagacgatgaggatggaagcactgaggaagaaagaatcgtgggcagattcaaggggagcctctgcgtttacaaggttccactcccagaggatgtgagtagggaggcgggttatgattcaacctatggaatgtttcagggaatcccatctaacgacccaattaacgtcctggtgagagtctacgtggtgcgagcgaccgacctgcaccccgcagacatcaacggtaaggcagatccctatattgcaattcggttgggcaaaacagatatccgagacaaggaaaattacatcagcaagcagctgaatcccgtattcgggaagtcattcgacatcgaggcaagctttcccatggaatctatgttaaccgtggcagtatacgactgggaccttgtcgggaccgacgatttgattggcgagactaagatagatctcgagaatcgcttctactccaaacacagggctacgtgcggaatcgctcagacctattccacccacgggtataatatttggcgcgaccccatgaagcccagtcagattttgactcgtctgtgtaaagacggaaaggtggatgggccacatttcggtcctccgggtcgagttaaagttgcaaatcgtgtatttacgggaccatccgagattgaggacgagaatggccaacgtaaacccactgatgagcacgtggccttgttagcgctgagacactgggaagatatacccagagctggatgccgactcgtacccgagcacgtggagactcgcccactccttaacccagacaagcccggaatcgaacagggtcggctcgaactatgggtggatatgttccctatggacatgcccgctcctggaactccactggatatatctcctcgaaagccaaagaagtacgagctgcgcgtgataatttggaataccgacgaggtagttctggaggatgacgatttctttaccggagaaaagagcagcgacatcttcgtgaggggttggctgaaagggcagcaggaggacaaacaggacaccgatgttcactaccactccctgacaggagaaggtaatttcaattggaggtaccttttcccgtttgattatctcgcagccgaagagaagattgtcatctctaagaaggaatcaatgttttcttgggacgaaacagaatataaaatccccgcaagactaaccctgcagatctgggatgctgaccacttctcagccgatgactttctaggcgctattgagctggacttgaataggtttcctcgcggagctaaaacagctaagcaatgtacaatggagatggcaactggcgaggtggacgtgccccttgtatccattttcaagcaaaagagagtcaagggctggtggcccctactcgccaggaacgagaatgacgagtttgagctgactggaaaggttgaagccgagttacacttgctgactgccgaggaggctgaaaaaaatccggtcgggctcgctagaaacgagccagatccacttgaaaaaccaaaccgtccagacactgcgttcgtatggtttttaaatccgttgaaatccatcaagtacttgatctgcacccggtataagtggctcatcatcaaaatcgtgctagccctgttgggtctgttaatgcttggactcttcttgtatagcttgccagggtatatggttaaaaaactcttgggggcttag

SEQ ID NO: 233675 - DNA, 234 bp, synthetic construct
  misc_feature 1..234: note = Description of Artificial Sequence: Synthetic coding sequence
  source 1..234: mol_type = other DNA
gaggccgagaagaacccagttggcctcgccagaaacgagccagacccattggagaagccaaatcgaccggacactgctttcgtgtggttcctaaatccgcttaagtcaattaaatatctgatctgtaccaggtataagtggcttatcattaagatagtactagctctcggctgctcttgttggggtcctctccagcccccttggctgcacggtcaaaaggctccctgggggtag

SEQ ID NO: 233676 - DNA, 342 bp, synthetic construct
  misc_feature 1..342: note = Description of Artificial Sequence: Synthetic coding sequence
  source 1..342: mol_type = other DNA
gattttctgggcgatgagtccttacaggaggaggaaaaagactcccaagaaacagatgggctcttgccaggatcccgcccatcctctcgccctccaggcgaaaagtccttcaggtccaaaggtcgcgagaagacgaagggaggtcgggacgacgaacacaaggccggaaggtccgtcttctccgcgatgaagctcgggaaaaacaggagccacaaagaggaaccacagaggcctgatgagcccgctgtactggaaatggaagacctggaccatttagccattcggttaggcgacgggctggatcctgattcagtctctctggctagtgtgacagcattgtag

SEQ ID NO: 233677 - DNA, 3924 bp, synthetic construct
  misc_feature 1..3924: note = Description of Artificial Sequence: Synthetic coding sequence
  source 1..3924: mol_type = other DNA
atgatgacagacacacaggacggaccttccgaaagttcacagatcatgcgctcactcacccctctgataaatagagaagaagctttcggtgaagccggagaggcaggactgtggccgtccatcacccacacgcccgacagccaggaggaaggactgaacgatatccaggaaatgattaagaccgagaagtcctacccagagcgccgtctgcggggagtgctggaggagcttagttgcggctgctgtcggttcctttctttggctgataaagaccagggccacagttctcggaccaggctggatagagagaggctgaaatcttgcatgcgggaactcgagaacatgggtcagcaagccaggatgctgagggcacaggtgaaacgccataccgttagagacaaactgcgtctgtgccagaatttcttacaaaagttgagattcctagccgatgaaccccaacacagtattccagacatcttcatctggatgatgtctaacaataagcgggttgcgtatgcgagagtgccatctaaggaccttctgttttcaatcgttgaggaagaaaccggcaaggactgtgcaaaggtgaagactctattcctgaagctgcctggaaagagaggctttgggtccgctggctggacggtccaggcgaaagttgaactttatctgtggctgggcctgagcaagcagaggaaagagttcctgtgcggacttccatgtggcttccaagaggtaaaagctgcccaaggacttggccttcacgcttttcctcccgtttctttggtttatacaaaaaaacaagcctttcagctgcgcgcacatatgtatcaggctagatctttgttcgctgccgactcctctggtctctctgatccattcgcacgggtgttcttcatcaaccagtcccagtgtaccgaggttttgaacgagactctctgccctacatgggatcagatgctcgtctttgataatcttgagctctatggcgaagctcacgagttaagggatgacccccctattatcgtgattgaaatctatgaccaggattcaatgggaaaagctgattttatgggtcgcacctttgctaagcccttggtcaagatggccgacgaagcctattgccctcctaggtttcctcctcaactggagtactaccaaatctacagaggaaacgccaccgctggtgacctactcgcagcctttgagctcctccagattggaccagcaggaaaggccgacctgcccccaataaatggcccagtggatgttgacagaggtcctattatgcccgtccccatgggaatccggccagtgttgagcaagtatagagtggaagtactattttggggactccgcgatctgaagagggttaatttagctcaggtcgatagacctcgtgtggacattgaatgtgccggtaaaggagtgcagtcaagtctgatccacaattacaaaaagaatcccaatttcaatacactagtaaagtggtttgaagtagatctgcctgagaatgagctgctgcatccaccactcaacattcgggtggttgattgccgcgcattcggaaggtatactctcgtgggctcccatgcagtgagcagtctgcggaggttcatttaccggcctcccgataggtccgctccctcatggaacaccacagtgcgtttgttgaggaggtgtagagtcctctgtaatgggggatcctcttctcacagcacgggggaagttgtcgttaccatggaacctgaggtgcctattaagaagttggaaactatggtcaagctggatgcaactagcgaagccgtggtgaaagtggacgttgcggaagaggaaaaagaaaagaagaaaaagaaaaaaggtaccgctgaggagccagaggaggaggaacccgacgagtcaatgcttgactggtggtctaaatactttgcttcaatcgacacaatgaaagagcagttgagacagcaggagccgtctgggattgacctggaagaaaaggaggaagtagacaataccgaaggtctgaagggctccatgaaagggaaggagaaggcaagagcagctaaagaggagaagaagaaaaagactcaatccagcggtagcggccaggggtctgaggcacctgagaagaaaaagccgaaaatcgacgaactgaaggtctatcccaaggagctggagagcgagtttgacaattttgaagactggctgcacacgttcaatcttctgcggggaaagaccggcgatgatgaagacggctccaccgaggaagaacggatcgtcggaagattcaaggggagcctgtgcgtgtataaggttccccttccagaggacgtgtctagagaagcaggttacgacagcacgtacggaatgttccaaggcataccttctaacgatcccatcaacgtgctcgtgagagtctacgttgttagagccactgacctacaccctgccgacatcaacggcaaggcagacccctacatcgccatcagacttggaaagacagacataagggacaaagagaattatatttcgaaacagctgaaccccgtctttggtaagtcctttgacatcgaagcctcatttcccatggagtcaatgctgacagtagcagtgtacgattgggaccttgtgggcaccgacgacctgattggagagaccaagatcgatcttgaaaaccgtttttattcaaagcatcgggctacctgcggcattgcccagacctattcaactcacggatataatatctggcgcgaccccatgaagccaagccaaatcttgacacgactgtgcaaagatggaaaggtggacggaccccatttcggacccccaggacgagtgaaggttgctaatagagtcttcacaggacccagtgaaatcgaggatgagaatggacaacggaaacccaccgacgagcacgtggccctgctggccctgcgtcactgggaggatatcccaagagccggttgtcgcctggtgccagaacacgtagagacgaggcccctgcttaaccctgacaaacccggaatcgagcagggtcgtctggagctgtgggtggacatgtttcctatggacatgccagcccctgggaccccccttgacatcagccctcggaaaccgaaaaagtatgaactccgggtaatcatctggaatactgatgaggtggtcctggaggatgatgacttctttaccggcgagaaatctagcgacattttcgtgaggggctggttaaaagggcagcaggaagataaacaggatacagatgtgcattaccatagccttaccggagagggtaacttcaactggcggtacctgttccctttcgattacctggccgctgaagagaagattgtcatcagtaaaaaggagagcatgttctcatgggatgagacagaatacaagattccggcacgcctgaccctccagatctgggacgcagatcatttctccgcggacgactttctcggcgcaatcgagctcgacttaaacagatttccgagaggtgctaaaactgcaaagcagtgcacaatggagatggctacaggagaagtcgatgtaccactcgtctctatatttaaacagaaacgcgtgaagggttggtggccactactcgcgaggaacgaaaatgacgaattcgagctgaccggcaaagtggaggcagagttgcatctcctgactgccgaagaagctgaaaagaatccagtgggtctcgcaaggaatgagccagaccccctagagaagcctaacagaccagataccagttttatctggttcctgaatcccctgaaaagcgcgagatactttctatggcatacctacaggtggctcttgctgaagttactccttctcctgctgctgctcctactgctcgccctgttcctgtactctgtgccgggatacctggtaaagaaaattcttggggcatag

SEQ ID NO: 233678 - DNA, 4527 bp, synthetic construct
  misc_feature 1..4527: note = Description of Artificial Sequence: Synthetic coding sequence
  source 1..4527: mol_type = other DNA
atgttccccgctagaggggttcctctgcacttggaaggcgaaggggtgttcccctggggacccggagatgtctccctaccttatttgtccacgagcgatgtctccttttccgtcatcgtggagaatgtcaactgctatagcagcggcatgatttgccggaagttcatcagcattaatgtaggcaactcgctcatagtctttgacgacgattccggcaacccctctccagaatcattcctcgacgataagcaggaggtgcacacctggagggtaggtttttttactctagttcactttccgcaagagcacatcactttgctctgggaccagcgcacaacggtgcacgtccaggcaggtccccaatggcagggacagctcgcaggactatgcggcaatttcgatctaaaaacaatcaacgagatgagaacccctgagaacctggagctgacaaatcctcaggagttcggctcgagttgggcagctgtcgaatgtcccgatacattggatccaagggacatgtgcgttctcaaccccctaagagagcccttcgcaaaaaaggagtgctccatcttgctctccgaggtcttcgaaatctgtcatcctgtggtggatgtgacctggttctacagcaactgcttaactgatacttgcggatgcagccagggcggagactgcgagtgtttctgtgccagcgtctcagcgtacgcacaccagtgctgccaacacggcgtggcagtcgattggcgtactcccaggttgtgcctgttaggcaaggggccataccagctgagctcgctcgctgctgggggagcccttgttgggatgaaggctgtgggagacgacatcgttctcgtgcggaccgaagatgtcgccccagcagacatcgtcagtttcctgcttaccgccgcactttataaggctaaagctcatgacccagatgttgtaagcctagaggctgcggatcggccaaacttcttcctgcacgtgactgccaatggctctctagagctggcaaagtggcagggaagggacacgttccaacagcacgcgagcttcctcctgcataggggtaccagacaggccggactcgtggctctcgagtcacttgctaaaccaagttcttttctgtatgtttctggagctgtgctggcgctgcggctgtatgaacacactgaggttttccgcagggggacactgttccgtctgttggacgccaagccatcaggggctgcctaccccatctgtgagtggagatacgacgcctgtgctagcccatgttttcagacatgtcgcgaccccagggccgctagctgcagggacgtccccagggtcgaaggctgcgtgccagtgtgccccacaccacaagtactcgacgaggtgacacagcgctgcgtgtatctggaggactgtgtggaaccggcagtttgggtgcccacagaggcactaggtaatgagactctaccaccaagccaggggttgcccacaccctctgacgaggagcctcagctgtctcaggagagcccacgcactccaacccatcgtcctgccctgactcccgcagcgccactgaccacagccttgaatccaccagttactgcgacggaagaacccgtggtgtctccaggaccaactcagacaaccctgcagcagccattggaactgaccgccagtcagctcccagctgggcctaccgaaagtcccgcttcaaaaggggtcactgccagtctcctcgccattcctcatacccctgagagcagctcactgcccgttgccctgcagacaccaacacctgggatggtgtctggagccatggagaccacacgcgtcacggtgatattcgctggctctccaaatataaccgtctccagccgttcccccccagccccaagattcccgcttatgaccaaggccgtcaccgtacgtggccatggcagcttgcctgtgcgaaccacgccaccacagccgagtcttactgccagcccttcttcgcgtccggtggcttcacccggagctattagccggtcgcccaccagcagcggaagccacaaggctgtgctgaccccggctgtgacgaaagttatttcaagaactggagtcccgcagccgacacaggcacagagcgccagctcaccctcgacccctctaaccgtggccggtaccgctgccgaacaggtgccagtttctcccctagcaaccagatcgttggagatcgtgctgagtacagaaaagggggaggccggtcatagtcagcccatggggagccctgctagtccacagccacatcctctccccagcgcacctccgagacccgctcagcataccacaatggcgactcgctcacctgctctccccccagaaacgcctgccgcagcctcactgtccacagccaccgacggcctggccgctacacccttcatgagtctagaatcgactcgcccatcacagcttttgtctggcttaccacccgacaccagccttcccctggcgaaggtaggcacttccgcacccgttgccacacctggacctaaggcttccgttataactaccccactgcagccacaggccacaaccctcccagcccagaccctttcaccagttctgccattcactccggctgctatgacacaggcccaccccccaacacacattgccccacccgcagccggtacagcgcctgggctcctgttgggggcaaccttacctacgtcaggagtcttgcccgtcgcagaaggcaccgccagtatggtcagcgtggttccacgtaaatcaactaccggcaaggtggccattctgagtaagcaggtcagcctcccaacctcaatgtacggttccgctgagggcggtccaaccgaactgacgcccgctacaagtcaccccttaactccactggttgcggagccagaaggagctcaggcgggtacagctctaccggtacccaccagctatgcactatctcgggtgagtgccagaactgctcctcaagacagtatgttagttctgttgcctcagctcgccgaggcccatgggacctccgcagggccacacctggccgctgaacctgtggatgaagcaaccacagagccatctggccgaagcgctccggcattaagtatcgtggaggggttggccgaggccctggcaacaaccactgaggccaacacctcaacgacctgcgtccctattgccgaacaggactgcgtgcgccatatttgtttggaaggtcaactcataagggtcaaccaaagtcagcattgccctcagggcgctgccccacctcgctgcggcattcttggcttggcagttcgcgtaggtggagaccggtgttgcccgctctgggagtgtgcctgcagatgttcaatctttccagacctgtcatttgtcacgttcgatggtagccatgtcgccctctttaaggaggccatttatattcttagtcagtcccccgatgagatgttaactgttcacgtcctcgattgtaagtctgcgaacctagggcatctgaattggcccccattctgcttagttatgttgaacatgacccacttggctcaccaggtgaccatcgacagatttaatagaaaggtcacagtggatctacagcctgtttggccaccagtctctaggtatggatttagaattgaagataccgggcacatgtatatgatcctgaccccctccgacattcagatccagtggctgcactcctctggcctcatgattgtggaggcctcaaaaaccagtaaggcacaggggcatggcctgtgtgggatctgcgacggggacgccgcaaacgatttgactttgaaggacggttccgtggtaggtggcgctgaagatcccgcaccttttctggacagctggcaagtgccctcttccctcacatctgtgggccagacacgctttcgcccagattcctgtgcgacaactgattgctctccctgtttaaggatggtatctaatcgcactttttctgcgtgtcaccggtttgtccctcccgagagcttttgcgagctttggataagggataccaaatacgtccagcagccatgcgtggccctgaccgtctatgtggccatgtgtcataagttccatgtctgtatcgagtggcgtaggtctgactactgtccatttctgtgctcaagcgactccacctaccaagcatgcgtgactgcctgtgaacccccaaagacttgtcaggacggcatcctggggccactggatccagaacactgccaggtcctaggggaaggctgcgtctgctcagaaggcactatcctccaccgacggcacagcgctctttgtatacccgaagcgaagtgcgcttgtggcgactgtccggatagcattcctgagtgtcaagagggagaggccttaaccgtgcatcgaaatacgactgagttatgttgccctctgtaccagtgtgtgtgcgaaaactttcgctgtcctcaggtccagtgtggcctcgggacagctcttgtggaagtatggtctcctgaccgatgctgcccgtataagagttgcggctag

SEQ ID NO: 233679 - DNA, 8777 bp, synthetic construct
  misc_feature 1..8777: note = Description of Artificial Sequence: Synthetic coding sequence
  source 1..8777: mol_type = other DNA
atgggggtcttagcatctgccctctgttggttgctgtgtgtttggcttccttggggcgagcaggcagcagagagtctgcgtgtgcagcggctgggcgagagggtggtcgatagtggtaggtcaggcgctcgcggaatgcgtaatgtcaagggaatgcgcaacggccctgcccagacgcgagtcagctcttcttcctcacaccaggaggcaaccctcgctatgggcgataaagccacagtggtgggtggacagcaagcagaagctcctgactccgtggctatgtcgtcctgggagcggcgtctgcacagagcaaaatgcgcaccttcctatctgttttcctgctttaatggaggcgagtgcgtgcacccagctttctgcgattgcagaagatttaacgcgactggtccccgttgccagatggtctacaacgctggacctgaacgcgatagtatatgtcgggcatggggacagcatcacgtggagacctttgatggattgtactactacttgagcgggaaaggaagctacacgcttgtcggccgtcacgagcccgaagggcaatcattctcgattcaggtgcacaacgatccccagtgcggtagcagcccctatacgtgctctagggctgtctcacttttcttcgtaggcgaacaggagattcacttagcaaaggaggtgacacacggtggaatgagagtgcagctaccgcacgtgatgggctctgctcgccttcaacagctggccggatacgtgatcgtacgtcatcaatccgcgttcactctagcatgggacggagcatcggcagtgtatatcaagatgagccccgagctgcttggatggacccacggcctgtgcggaaacaacaatgcggacccaaaggacgacctagttacctcttcagggaagctgactgatgatgtggtcgagtttgttcatagctggcaggaacaggcgccaaatcagccgcctggcccaaccacctcatctttacccagaccaccttgcctccagcagaatcccggaactatgcagggggtgtatgaacagtgcgaagccctgttgaggccgccattcgacgcatgtcatgcgtacgtctctccattaccgttcacagctagttgtacaagtgatctctgccagtctatgggagatgtggcaacttggtgtagggccttggcagagtatgcccgtgcctgtgcccaagcgggtcggcctctgcaaggatggcgcacgcagcttcgacagtgtactgttcactgcaaagagaaagccttcacctataacgagtgcattgcctgttgtccagcctcatgccaccctagggcatcctgcgttgactctgagattgcctgcgtcgatggatgttactgtcctaatggactgatattcgaggatggcggatgcgtcgcaccagctgagtgtccatgcgagtttcacggcaccctttacccgccaggatccgtggtgaaagaagattgcaacacatgcacatgtaccagcgggaagtgggaatgcagcaccgctgtctgcccggctgagtgctctgtcactggcgatattcacttcaccaccttcgatggacgacggtacacttttccagccacctgccagtatattcttgctaaatcaagatctagtggaacctttactgtgacgcttcagaatgcaccctgtggtctcaaccaagatggagcatgtgtgcagagtgtctcggtcatcctccatcaggatccaagaaggcaggtaacgcttacacaagccggagacgttctcttgttcgaccagtataagattattccgccttacactgatgatgcattcgagatacggaggttaagttcagttttcctgcgggtgaggacaaacgtcggcgtgagagtcctctacgacagggagggtctcagactgtacctgcaggtggatcaacggtgggtggaggacacagtgggcctctgtgggacatttaatggcaatacacaggacgacttcctgtcaccggttggcgtgcccgaatccactccgcagttatttggtaacagctggaaaactctttccgcatgttctccattggtgagcggatctcctctggatccgtgcgatgtgcacctccaggccgcatcctactctgtgcaggcctgttcagtgctgacaggggagatgttcgccccttgtagcgcgttcctgtctccggtaccatactttgagcaatgtaggagagatgcttgtcggtgcggacaaccctgcttgtgtgctaccctggcgcactatgctcacctgtgtcgtagacacgggttgcctgtggatttcagggcacgcctcccagcatgcgctttatcttgtgaggctagcaaggaatatagcccgtgcgtggcgccttgtggtcgaacatgtcaggacttggcaagtccagaagcatgtggagtggatggaggggatgacctgtcaagggatgagtgtgtggagggatgcgcatgcccccctgatacttatttggatacccaggccgacctttgtgtccccagaaaccaatgctcttgtcacttccaaggagttgactacccgcctggagatagtgatatacccagtctggggcactgccactgcaaagacggcgttatgtcatgcgactctagggccccagcggctgcctgtcctgctggccaggtgtttgtaaactgcagtgacctgcatacggatctcgaactgtcgcgggaacgcacctgcgagcaacaattactgaatttgtctgtgtccgctagagggccttgtctgagcggatgtgcgtgtcctcagggcctcctgcgtcatggcgacgcctgttttctcccggaggaatgtccgtgcacctggaaaggaaaagagtacttcccaggcgaccaggtgatgagcccatgtcacacatgtgtctgccagcgcggatcctttcagtgtactctgcatccttgcgcctccacttgcacagcttatggggacagacactataggacattcgatggcttaccattcgactttgtgggggcttgtaaggtgcatctcgtcaagtcaacctccgatgtatcgtttagcgtaatcgtggagaacgtgaactgctattcgagcgggatgatctgcagaaaattcatctctataaacgtgggcaattccctcattgtgttcgacgacgacagtggaaatcccagcccagagtcctttctggacgataagcaagaagtacacacatggcgagtgggttttttcacgctggtgcacttcccccaggagcatatcaccttgctgtgggaccagaggacaacggtgcatgtgcaagccggacctcagtggcagggacagctagcaggtctctgcggaaattttgatctgaaaactatcaatgaaatgcgaaccccagagaatctggagctcacaaatccccaggagttcgggtcatcttgggccgctgtggagtgtccggatacacttgaccccagagatatgtgcgtactcaaccctctccgggaaccttttgcgaagaaggaatgctctattctcctgtcagaggtatttgagatctgtcatcccgtggtggacgttacttggttttactcgaattgcctcacggatacctgtggctgctcgcaaggaggggattgtgagtgtttttgcgccagcgtgtcagcctacgcccatcagtgctgccaacacggagtcgccgtcgattggagaactccacgactgtgtccttacgactgcgacttcttcaataaagtgttaggaaaaggcccttatcagctctccagcctggccgctggcggagcacttgttggcatgaaagctgtaggcgacgacatcgttttggtgagaaccgaggacgtggcgcctgcagatattgtgagcttcctactgacagccgctctctataaggctaaggcccatgatcctgacgtagtcagcctcgaggctgctgaccgacccaattttttcctgcacgtaaccgctaatggctccctcgagttagcaaaatggcagggccgtgacacattccagcagcacgccagctttctgctacacaggggaaccagacaggcaggtctcgtggcattagagagtcttgccaagccgagttccttcctgtacgtttcaggagccgtgttggcgttgcgcctctatgagcacacggaagtcttccgtcgcggtaccctgttcagattgctcgacgcaaaaccgtcgggagccgcttatcctatttgtgagtggcggtacgacgcgtgcgcttcgccatgttttcagacctgtcgcgatcccagggcggctagctgccgagatgtgcctcgcgtcgaagggtgcgtccccgtctgccctacgccgcaagtcttagatgaggttacccagcgctgtgtgtacctagaggactgcgtcgaacctgccgtttgggttccaactgaagcgctgggaaacgagaccctcccaccgtctcagggactgcctacacccagcgacgaggaaccacagctgagtcaagagtcccctcggacgcccacccataggcccgcactgactccggctgcgcctctcacgaccgcactgaacccaccggtgactgcgaccgaagagccggtggttagcccagggccaacgcagaccaccctccagcagcccctcgaactgacggccagccagttgccagctgggcctactgagtctccagcctcaaagggggtgacagctagcctgctcgccatcccccatacaccagaatcttccagcctgcctgtggccttacagacacccaccccaggcatggtgagcggtgcgatggaaactaccagggttaccgttatcttcgctggatcccccaacatcactgtttctagcagatctccccctgctccaaggttccccctgatgactaaggcggtgactgtcagagggcatggctcacttcctgtaaggactacccctcctcagccttcgttgactgcctccccatcttcaaggcctgtcgcatcgcctggcgcaatttcccggtcacctacctccagcggcagccacaaagccgtgctaactcccgcagttaccaaggttattagcagaactggagtgcctcagcctacccaagcacagagtgcttccagcccttctaccccgctgactgtagccggaaccgctgccgaacaggtgcctgttagccccctcgccacccgctctctcgagatcgtgctcagcactgaaaagggcgaagccggtcacagccagccaatgggctccccagccagcccccagccacaccctctcccgtccgcccctccacggcctgctcagcacacgaccatggccactagatctccggcactccctccagagacccctgctgctgcctccttatctaccgccacagatgggctggcggctactccattcatgtccctggaatcaaccaggccctcacagctgctctcgggattgcccccagacacttccctccccttggctaaagttggcacgtccgcacctgtagccacccccggacccaaggcgtccgtgatcactacgccgctgcagccccaggccacgacccttccagcccagaccctctcacctgtgctgccattcacccctgctgctatgacgcaggcacaccctcctacacatatcgcaccgcctgcagccggaactgcccctggcctgctcctgggcgcaactttacctaccagcggtgtcttgcctgttgccgaggggacagcttccatggtgtcagtcgtccccagaaagtcaacaactggaaaagtagccatcttgagcaagcaggtaagtctaccaacctccatgtacggatccgccgagggcggacctaccgaactgactcccgcaacatcacatcctctaacacctctggtggccgaacccgaaggggctcaggcaggcaccgccttaccagtgccaacttcctatgcattaagcagagtgagcgcacgcaccgcccctcaggactccatgctagtgctgctccctcagctcgccgaagcacacggaacgtccgcagggcctcacctggccgcagagccggttgatgaggccacgaccgagccaagtggccgatccgcaccggcactctccattgttgaaggtctggcggaggcgcttgctaccacaaccgaggctaacaccagcacaacttgtgtgcccatcgctgaacaggattgtgtccgacatatttgtcttgaaggacagctaatcagagtgaaccagtcccagcattgtcctcagggggctgcccctcccagatgtgggatcctgggcctggctgtccgggtcgggggagaccggtgttgtcccctgtgggagtgcgcttgcagatgcagtattttccccgatctgtccttcgttaccttcgacggcagtcacgtggcgttgtttaaggaggcgatctacattctgagccagtctccagatgaaatgttaacagttcacgtcctggattgcaaatcagcgaatcttgggcatctgaattggcctccgttttgcctcgtgatgctgaatatgacccatttggcccaccaggtcaccatcgaccgcttcaaccgaaaggtaacagtcgatctccaacctgtgtggccacctgtgagtagatacggtttccgcatcgaagacactggtcatatgtatatgattctaacgcctagtgacattcagattcaatggctgcactctagcggattaatgattgtggaagccagcaaaacctccaaggctcagggtcacggcctgtgcggaatttgcgacggcgacgccgcaaacgacctcacgctcaaggatggcagcgtcgtgggcggtgcagaagatcctgctcccttcctggacagctggcaggtgccatcttcacttacctcagttggacagaccaggtttcgtcctgattcttgcgcaaccacagattgcagtccctgccttcgtatggtgagtaaccgtacctttagtgcctgccaccgctttgttccccctgaaagcttttgcgagctgtggattagggacactaagtacgtgcagcagccctgtgtggctttgacagtctatgtcgccatgtgccataagtttcacgtgtgtattgagtggcgcaggagtgactactgcccatttctgtgttccagtgatagtacttatcaggcgtgtgtgactgcatgtgaaccccctaagacctgtcaggatggcattctgggccctctggacccagagcactgccaggtcttaggggaggggtgcgtgtgtagcgaaggcactattcttcacagaagacattctgcactgtgcattcctgaagccaagtgcgcgtgtacagactccatgggagtccctagggccctcggggagacttggaacagctctttgtcaggctgttgtcagcaccaatgtcaggcaccagacacgatcgtgcccgtcgatctgggctgcccctcgccgaggcctgaatcttgcctccgcttcggcgaggtggcactgctgctcccaactaaagacccttgctgtctcggcactgtctgcgtttgtaaccaaacgctctgcgaaggcttggcccctacatgccggcctggtcaccggctgctgactcacttccaagaggattcctgctgtcctagctacagttgtgaatgtgatccggacctctgcgaggccgaattggttccatcgtgtcgccaggaccagatacttatcacaggacggctgggagactcttgctgtacgtcctacttctgcgcctgtggggactgtccagacagcatcccggagtgtcaggaaggcgaggcactgactgtccaccgaaataccacagagctctgctgccccctctatcagtgcgtctgcgaaaactttcgctgcccacaggtgcagtgcggactagggaccgcactggtggaagtttggtcaccagatcggtgttgtccctataaaagttgcgagtgcgactgcgacacgatccccgtgcccagatgtcacctttgggaaaagtcacagctcgatgaagagttcatgcactctgtggagaacgtgtgcggatgcgctaaatatgaatgcgtcaaggctcccgtctgtctgtcccgggaactcggtgttatgcagcccggtcagacagtcgttgagctgtcagcagatggggtgtgtcacacctctagatgtaccactgtcttagacccgctgaccaatttctaccaaattaacaccacatctgtactgtgtgatatccactgcgaggcgaatcaggagtatgaacacccacgcgatttagcggcatgttgcgggagttgcaggaatgtcagctgcttgttcacgtttcccaacggaactactagtctcttcttgccaggtgcttcgtggattgcggattgtgccagacaccactgcagtagcacgcctctaggagcagtgctcgtgcgttcacccatcagctgtcccccattgaacgagactgagtgtgccaaggttgggggttctgtcgttcccagcctggaaggctgttgcagaacttgcaaagaggatggtcgatcttgtaagaaggtaacaatacgaatgacaatccgcaagaatgagtgcaggagctctacaccagtcaatctcgtctcctgtgacggaagatgcccctccgcatctatctataattacaacatcaacacctacgcccgtttctgcaaatgttgtcgggaggttgggctgcagagacggtctgttcagctgttctgcgccacgaatgccacatgggtaccctacacggtgcaggaacccacagattgtgcctgccagtggagcta

SEQ ID NO: 233680 - DNA, 387 bp, synthetic construct
  misc_feature 1..387: note = Description of Artificial Sequence: Synthetic coding sequence
  source 1..387: mol_type = other DNA
atggccaggatactgctgttatttttgccgggtctggtggccgtgtgtgctgtgcatggtatttttatggaccgattagcctcaaagaagctttgtgcagatgacgagtgtgtatataccattagcctggcttcggcgcaggaggattacaacgcccctgattgcagattcatcaatgtgaaaaaaggtcagcagatctacgtttattcaaaactggtcaaagaaaacggcgcaggggagttctgggccggtagcgtctacggcgatggacaggatgagatgggagtagtgggctatttcccgagaaatctggtgaaagaacagagggtctatcaggaggccacaaaggaagtgccaacgactgatatcgattttttctgtgagtag

SEQ ID NO: 233681 - DNA, 1446 bp, synthetic construct
  misc_feature 1..1446: note = Description of Artificial Sequence: Synthetic coding sequence
  source 1..1446: mol_type = other DNA
atgcagctgtatagcagcgtttgcacgcactaccctgcaggagctccagggccaaccgccgcagcacccgcacctccggctgccgctactccgtttaaagtttcattgcagcctccaggcgctgccggagcggctcccgagcccgagaccggagaatgccagcccgcagccgcagccgaacatcgtgaagccgctgctgtgcctgctgctaaaatgcccgcattttctagctgtttcgaagtcgtctcaggagccgcagcaccggcaagtgctgctgctgggcctcctggggcatcgtgtaaaccaccgcttcccccacactacacctctaccgctcagattacagttcgagccctcggagcggaccggcttctgctccacggtcccgatcctgtgcctggagctgctggctctgcagcggcaccaagaggcaggtgcctgctcctggcccctgctcccgcagctccagtgccccctcgtagaggctctagcgcctggctgctggaggaacttcttcgacctgattgtcccgaacccgcaggcttggacgccacacgcgaaggaccggatagaaacttccgcttgagcgaacaccggcaggcccttgcagccgcaaaacaccgaggcccagccgcaaccccaggatcccctgaccccggacctggtccatggggcgaggaacatttggcagagcgcggacctcggggatgggaaagggggggagaccgatgcgatgctcccggtggggacgcagcaagacgaccagacccagaggcagaggccccacccgcaggatcaattgaagccgctccatcgtctgctgccgagccagtcattgtgtcccgaagcgatccacgcgatgaaaagctggcactttacctcgccgaagtggagaaacaggacaaatacctgaggcagaggaataaatacagattccacatcatacccgacggcaactgtctttatagagccgtctcaaagaccgtgtacggcgaccagagcctccatcgggagctgcgagaacaaaccgtccattatatcgccgaccatctggaccacttcagtcccctcatagagggtgatgtcggggaatttattatcgccgctgcccaagatggagcctgggcaggataccccgaactgctggctatgggtcaaatgctgaatgtaaacattcatctcaccactggaggcaggctggaatctccaactgtcagtaccatgatccattatttggggcctgaagactcccttcgccctagcatctggctcagttggctgagcaacggacactatgacgccgtgtttgatcacagctatcccaaccccgaatacgataattggtgtaagcagacacaggtccaacgcaaaagagatgaggagctcgctaaatcgatggctatctcattgagtaaaatgtacattgaacagaacgcctgttcctag

SEQ ID NO: 233682 - DNA, 1197 bp, synthetic construct
  misc_feature 1..1197: note = Description of Artificial Sequence: Synthetic coding sequence
  source 1..1197: mol_type = other DNA
atgtctagaaagcaggccgcaaagagtagaccaggcagcgggagccgcaaggctgaggcggagagaaaaagagatgagcgtgccgcaaggcgagccctggcaaaggagaggaggaatcgcccagaatctggcggagggggaggatgcgaagaggaatttgtttcattcgccaatcagctgcaggcccttgggctgaaactgcgagaagtcccaggggatggcaactgtctgttcagggcgctaggtgaccaactggaggggcattcccgaaaccatttgaagcacaggcaggagaccgtagattacatgatcaaacagcgcgaggatttcgagccctttgttgaagacgacattccctttgaaaagcacgtcgcctccctcgcaaaaccaggtacattcgctggtaacgatgccatcgtggcatttgcccgaaatcaccagttgaatgtggtgattcaccagttaaacgcgcctctttggcaaatacggggaaccgagaaatccagcgtccgagaactccatattgcttatcggtatggagaacactatgatagcgtgcggcgaattaacgataattctgaggcacctgcccacctgcaaaccgatttccagatgcttcatcaggacgaatccaacaagagggaaaagattaaaaccaagggaatggactccgaagatgacctccgggatgaagtggaagatgccgtgcagaaggtgtgcaacgctactggctgcagcgatttcaacctgatagtacagaacctcgaagccgagaattacaatattgaaagtgctataatcgctgtgctcaggatgaatcagggtaagaggaataacgctgaggaaaacctggaaccttctggcagagtgttgaaacaatgcgggcctctgtgggaggaagggggaagtggcgctaggattttcggcaaccaagggctaaatgaaggccgaactgagaacaataaggctcaggcaagcccctccgaagagaataaggctaacaagaatcagcttgccaaggttaccaataaacagcggagggaacagcagtggatggaaaaaaagaagaggcaagaagagaggcaccgccacaaagctctggaaagccggggttcacacagagacaacaacagatcagaagctgaagccaatactcaggtgacgctagttaagaccttcgcggctctgaacatctag

SEQ ID NO: 233683 - DNA, 438 bp, synthetic construct
  misc_feature 1..438: note = Description of Artificial Sequence: Synthetic coding sequence
  source 1..438: mol_type = other DNA
atggcctgtattcactacttaagggaaaaccgtgagaagttcgaggccttcatcgaaggatccttcgaagagtacctgaagaggctggagaatcctcaagaatgggtgggacaggtagaaatctctgctctctctctgatgtatcggaaagactttattatctaccgagagccgaacgtgagtccatcccaggtgaccgagaataatttcccggagaaggtgcttctgtgcttcagcaacggaaaccattatgatattgtctacccgatcaaatataaggagtcatccgccatgtgccagtccctcctatacgaattgttgtacgaaaaggtgttcaaaacagacgtctccaagatcgtaatggaactggacaccttggaggtggcagatgaggacaactccgagatttcagactctgaagatgattcttgcaaatag

SEQ ID NO: 233684 - DNA, 3345 bp, synthetic construct
  misc_feature 1..3345: note = Description of Artificial Sequence: Synthetic coding sequence
  source 1..3345: mol_type = other DNA
atggaagctgccgtcggggttcccgatgggggagatcagggaggggcagggccacgggaggatgccactcctatggacgcctacttaaggaaactggggctttatcggaaactcgtcgccaaagatggcagttgcctgtttagggccgtggccgaacaggtcctgcattcacagagcagacacgtcgaagtgcgcatggcctgcatacattacttgcgggaaaatcgggagaagtttgaagcatttatcgaaggaagttttgaggagtatttaaaacggttagagaacccccaggagtgggtaggtcaagtggagatcagcgctttgtcgctgatgtatcgcaaagactttattatatatagagaaccgaacgtttcaccatctcaggtaacagagaacaatttccccgagaaggtcttgctctgtttcagcaatggtaatcactatgatatcgtgtaccctatcaagtacaaggagtcctctgccatgtgccaatctttgctgtacgaactgctgtacgaaaaagtgttcaaaaccgacgtctccaaaatcgtcatggagttagacactctcgaggtggcagacgaggataattccgagatttcagactctgaggacgactcctgtaaatctaagaccgctgctgctgccgcagatgtaaatggcttcaaacctcttagtgggaacgaacagcttaagaacaatggcaattccaccagtctcccccttagcaggaaagtgctgaaatcgctgaacccggcagtctaccggaatgtggagtatgagatctggctgaagagcaagcaggcccagcagaagagagattattcaatcgccgcaggactgcagtacgaggttggagataaatgtcaagtgcgcttggaccacaatgggaagttcctgaacgctgatgtacaggggatccattccgagaacggacctgtcctggtagaagagctgggcaaaaagcatacctctaagaatcttaaggcaccgcctcctgaatcgtggaataccgtatccggaaagaaaatgaaaaagccaagcacctccggccagaacttccacagtgacgtggactaccgtggtccaaagaacccctcaaaaccaatcaaggccccttcagcactgccaccaaggctccaacatccaagcggggtcaggcagcacgccttttcatcccacagcagtggcagtcagtcccagaaattcagctcggagcacaaaaacctgagcagaacccccagccagattatccgcaagcctgaccgggagcgggttgaggactttgatcatacctcccgagagtctaattatttcggtctgagcccggaagaaagacgcgagaaacaggcaattgaggaatcgagattattatacgaaatccaaaatcgcgatgagcaggcatttcctgccctgagtagtagcagcgtgaatcagagcgcttcccagtccagcaacccttgcgtgcaacgaaaatcatcccacgttggggaccgcaagggctctagaaggcgcatggataccgaagaacggaaggacaaagactctatccacggacattcgcagctggataaacgacccgagccttctaccctcgaaaatataaccgacgacaagtatgcaacagtttccagtcctagcaagtccaaaaaattagagtgcccaagccctgcagagcaaaagcctgctgaacacgtgtctcttagtaatccggctcctctactggttagcccggaggtccacctcacccctgcagtccccagcctccccgctaccgtgcccgcatggccaagcgagcccaccacatttggccctaccggagtgcccgctcccatccccgtgctctccgtgacccagacacttaccaccggccctgactctgcggtgtcgcaagcgcacctgacaccgtcaccggtgccagtgagcatccaagcagtaaaccaacccttaatgcctctcccccagaccctgtcattataccaggaccccctgtaccctggattcccctgtaacgagaagggtgaccgcgctattgtcccaccttatagcttatgccagactggagaggatctcccgaaagataaaaacatcctgcgctttttctttaatctgggagttaaggcctattcttgccccatgtgggcccctcatagttacctgtatcccttgcaccaagcatatttggccgcttgccgtatgtacccaaaggtccccgtaccagtgtatccccataacccatggtttcaggaagcccctgcagcccagaatgagtcagactgcacttgtacggacgctcacttccctatgcagactgaagcctcagtaaatggacaaatgccacagcctgagatcggaccaccgactttctcctctccactggtgatccctccatctcaagtgtctgagtcccacggtcaactcagctatcaggctgatctagagtccgaaacgcctggtcagctactgcatgccgactatgaagaatcactgtcaggaaaaaatatgttcccacagccatctttcgggccaaacccattcttgggcccagtccccatcgctcctccatttttccctcacgtgtggtatggctacccgtttcagggattcatcgagaaccccgttatgcgccaaaatattgtgttgccgtctgacgagaagggggagttagacctgagcctggagaatttggacctttccaaggattgcggatcagtgagtactgttgatgagtttcccgaggcacgcggagaacacgtgcactctctgcctgaagcttccgtatccagtaagccggacgaaggtaggaccgaacaatcaagccaaactcgcaaggcagataccgctctcgcgtcaatccctcctgtagcggaaggcaaggctcacccacctacgcagatcttgaaccgcgaacgcgagactgtacccgtggagctggaacccaaaagaacgatccaatctctcaaggagaagacggaaaaagtaaaggatccgaagaccgcagcagacgtcgtgtcgcctggggctaatagtgtcgattctcgggtccagaggccaaaggaggaatcctcggaagatgaaaatgaagtctccaacatactgcggagcggcaggagcaagcagttctacaatcaaacctatggctctcgaaaatataaaagcgattgggggtactccggcagaggcggatatcaacacgtgaggtcggaggagtcttggaaagggcagccctctagaagcagagatgagggctatcagtaccacagaaatgtcaggggtcgtccatttcgcggagacagaaggcgttcggggatgggggacggtcaccgtggacaacacacctag

SEQ ID NO: 233685 - DNA, 3150 bp, synthetic construct
  misc_feature 1..3150: note = Description of Artificial Sequence: Synthetic coding sequence
  source 1..3150: mol_type = other DNA
atggcttgcatccattatcttcgtgagaaccgcgagaagtttgaggcctttattgagggatcctttgaggaatatttgaaacggctggagaacccccaggaatgggtaggacaggtcgagattagtgccttgtccttgatgtacagaaaggatttcattatataccgagagcctaacgtaagtccctctcaggtcaccgaaaacaactttcccgaaaaggtgctgctctgcttcagcaatggcaatcactacgatatcgtctacccaataaaatacaaagaatcttctgcaatgtgccagtctcttttgtacgagcttctatacgaaaaagttttcaagaccgatgtttcaaagatagtgatggagttggataccctcgaggtggctgatgaagacaattctgagatctccgactctgaagacgacagttgcaagagtaagactgctgcagctgcagctgacgtgaacggattcaaaccgttgtcagggaatgagcagctcaagaacaacggcaatagcacttctctgccgctgtcgcggaaagtcctcaagtcactaaacccagccgtctaccgaaatgtggaatacgagatatggctcaaaagcaagcaggctcagcaaaagcgagactattctattgccgctgggctccagtacgaagtcggtgataagtgccaggttcgtctggatcacaacggaaagttcctgaacgccgacgttcagggtatccatagtgagaacgggccagttctcgtagaggaactggggaagaagcatacctctaaaaatctgaaggcccctccccctgaatcttggaacacagtgtccgggaagaagatgaaaaagccttctacgtcgggacagaattttcattccgatgtcgactatcgaggcccaaagaacccaagtaagcctatcaaagcacctagcgcactccccccacgactccagcatcctagcggggtcagacaacacgcatttagcagccacagcagtgggagccaaagccagaagttctcatctgaacacaagaatctgagtcgaacgcccagccagatcattaggaaaccagacagggagcgcgttgaagattttgatcatacctctcgggagagtaactactttggcctgagtcccgaagaacgcagggagaaacaagcaatcgaggaatctcgcttactgtacgagattcagaaccgggatgagcaagcctttcctgcattgagctcctctagcgtgaaccagagtgccagtcaaagtagtaacccctgcgtccagcggaaatcatctcacgtgggtgaccggaagggaagcaggcgtcggatggatactgaggagcgaaaggacaaggatagcattcacggtcattctcagctggataaaagaccagagccatcgactttggaaaatattacagacgacaagtacgccacagttagcagcccgagtaaatcaaagaaactggagtgcccttcgcccgcagagcagaaacccgctgaacatgtttccctgagcaaccccgctcctctgctcgtgagcccagaagtgcacctgactcccgctgtcccttcactgccagcaacagtgcccgcatggcccagcgagccgaccacattcggcccaactggggtgccagctccgatccccgtgctgtcggtcactcagactctgacgacgggccctgattccgctgtgtcccaggcacatttgacccccagcccagttcctgtgagtatccaggccgtgaatcagccgcttatgccccttccacagacactttctctgtatcaggatccgctttatcctggtttcccatgcaacgagaagggcgaccgcgctatcgtcccaccatatagcttatgtcagacaggtgaagacctgccaaaggacaagaatatcctgagattcttcttcaatctcggcgtcaaggcttatagttgcccgatgtgggcccctcactcatatctgtaccctctgcaccaggcctatctggctgcttgtagaatgtatccaaaagtgccagtgccagtgtacccacacaacccatggtttcaggaggctcctgccgctcagaatgagtctgactgtacctgtaccgatgcgcatttccccatgcaaacagaagcatccgtaaatgggcaaatgccgcaacccgaaataggaccaccaacatttagtagcccattggtgatccccccttcccaggtcagcgaatcacacggtcaactgagttatcaggctgatctggagtctgagacccccggacaactgctccacgccgattatgaagagtccctctctgggaagaatatgttccctcagccctcattcggacctaaccctttcttagggccagtgcctatagcaccccctttcttccctcatgtctggtacgggtacccttttcagggctttattgagaatcccgtgatgcgacagaatatagtcctgccctccgatgagaagggggaattggacctatctctcgagaacctggatctgtcaaaggactgtggcagtgtgtcaactgtagacgagttccccgaggccagaggcgagcacgtccatagcctgccagaggcttccgtgtccagtaagcccgacgagggcaggacagagcagagtagtcagacccggaaagccgacacagcacttgcttcaataccacccgtggccgaaggaaaggcccacccgccaacacagatcttaaacagggagcgcgagaccgtgccagtcgagctcgagcccaaaaggacaatccagtccctgaaagagaaaaccgagaaggtcaaggaccccaagactgcagccgatgtggttagtcctggggcaaacagtgtcgactctagggttcagagaccaaaggaggagtcatctgaagatgaaaacgaagtgtctaatattcttaggtccggccgtagcaagcagttttataaccagacttatggctctaggaagtataaaagtgattgggggtacagtggccgtgggggataccagcacgttaggtcagaggagagctggaaggggcagccttcccgcagccgcgatgagggctatcagtaccaccgtaacgttcgcggtcgacctttcaggggtgaccggcgacggtctggcatgggggacggccaccggggtcaacatacatag

SEQ ID NO: 233686 - DNA, 420 bp, synthetic construct
  misc_feature 1..420: note = Description of Artificial Sequence: Synthetic coding sequence
  source 1..420: mol_type = other DNA
atggcgtgtatccattatctgagggaaaatcgagagaagtttgaggcctttattgagggctcatttgaagaataccttaagaggctcgagaacccccaggaatgggttggccaggtggagatcagcgccctatcattgatgtatcgtaaggatttcattatctatcgagaacctaacgtttccccatcgcaggtcaccgagaataacttccctgagaaagtcctgttgtgtttcagcaatgggaaccactatgatattgtgtacccaattaaatataaagaatcctctgctatgtgccagtctctgctctacgagcttctctatgagaaggtgtttaaaacggatgtctcaaaaattgtgatggagctcgacactctggaggtggcagacgaagataattcagagatcagcgattcttag

SEQ ID NO: 233687 - DNA, 438 bp, synthetic construct
  misc_feature 1..438: note = Description of Artificial Sequence: Synthetic coding sequence
  source 1..438: mol_type = other DNA
atggcgtgcatacattacctgagagaaaaccgcgagaagttcgaggcatttatagaaggaagcttcgaagaataccttaagcgccttgagaatccccaggagtgggttggtcaggtggagatctccgccctttccctcatgtatcgcaaggactttattatttaccgagagcctaacgtgagccccagtcaggtgaccgagaacaactttccagagaaagtgctgctttgtttctcgaatggaaatcactacgacattgtttacccaatcaagtataaggaaagcagcgcaatgtgccagtccctcctttacgaactgctgtatgaaaaggtgtttaagacggacgtgtctaaaatcgtgatggagctggacaccctggaagtcgccgacgaggataacagtgagatttctgactcagaggacgacagctgcaaatag

SEQ ID NO: 233688 - DNA, 1716 bp, synthetic construct
  misc_feature 1..1716: note = Description of Artificial Sequence: Synthetic coding sequence
  source 1..1716: mol_type = other DNA
atgacaattttgccaaaaaagaaaccaccacctccggatgcagatccagctaatgaaccacccccacccggacccatgccgcctgcccctagacgaggaggaggggtcggggtgggcggtggtggcaccggagtgggtggtggcgatcgggaccgggattcaggcgtggtaggagccaggccccgtgccagccccccaccacaagggccactgccgggtcccccaggcgcactgcaccggtgggccttggccgttcctcccggagccgttgctggtcccagacctcagcaggcctcgccacctccttgtggcggacccggagggccaggcggtggcccaggagacgctcttggtgccgcagccgcaggcgtgggcgcagccggagtggtggtcggcgtggggggagccgtcggcgtcggagggtgctgttcagggccaggacatagtaagaggaggaggcaggcgcctggcgtgggcgcagtgggcggaggttcgcctgaaagggaagaggtcggggctggatataatagcgaggacgagtacgaggccgctgctgctcgcatcgaagccatggatccagctacagtcgaacaacaagaacattggttcgaaaaagcactgcgcgacaaaaaagggtttatcatcaaacagatgaaagaggacggagcctgtctgtttcgcgctgttgcagatcaagtgtatggcgaccaggatatgcacgaggtggtccgcaaacactgtatggactacctcatgaaaaatgcagactattttagcaactacgtgactgaggatttcactacttatatcaatcgtaagcggaaaaataattgccatgggaaccatatcgagatgcaagctatggcagagatgtacaaccggccagtggaggtctatcagtatagcaccggtacgagtgccgtcgagcctattaacactttccatgggattcaccagaatgaggatgaaccaatcagagtctcctatcacagaaatatccactacaacagcgtcgtgaaccccaacaaagcgacaattggagttggattgggtttgccatccttcaagcctgggtttgctgagcaaagtttgatgaagaacgccattaagacctccgaggaaagttggattgagcagcagatgcttgaggataagaaaagagctaccgattgggaggcaacaaacgaagcaatcgaggagcaggtggcacgcgagtcttatttgcagtggctcagagatcaggagaagcaggccagacaggtaagaggaccctcacagcctcgcaaagcctctgccacttgttccagcgcaacagccgcagcgtccagcggactagaggaatggacctctagaagccccagacaacgctcctccgcatcttcccccgagcatcccgagctgcacgccgagcttggcatgaaaccccctagtcccggaactgtgctggctctggctaaaccacccagcccttgcgctccagggacaagcagccagttcagcgcgggagcagacagagccacatcgcccctggtctctctgtacccagccctggagtgccgtgccctgatacagcagatgagtccatcagcatttggactcaacgactgggatgatgacgagattttagcgtccgtgttggctgtgtcccagcaggaatacctagacagtatgaaaaagaacaaagtccacagagaccctcccccagataagagttag

SEQ ID NO: 233689 - DNA, 1701 bp, synthetic construct
  misc_feature 1..1701: note = Description of Artificial Sequence: Synthetic coding sequence
  source 1..1701: mol_type = other DNA
atgactattctgccgaaaaaaaaaccacctccacctgacgcagatcccgctaacgagcccccaccccctggaccaatgcccccagctccacggagagggggtggtgtgggggtaggcggaggcggtaccggagtgggcggaggagatcgggacagggattcaggtgtagtaggcgctcgccctagggcctcacccccaccacagggcccactaccaggccctcctggggctcttcatcggtgggccctggccgtaccccctggcgctgttgccggaccaaggccgcagcaggcatctccccctccctgcggcggaccagggggtccgggtggtgggcctggtgacgcactcggagcagcagctgccggtgtaggcgcagctggagtcgtcgtgggcgttgggggagcagtgggggtgggaggatgctgtagcggccctggtcattcaaaaaggaggcgccaggctcccggagtcggtgcggtcggcggagggagtccagagcgcgaggaggtgggcgcaggctacaacagtgaggacgaatacgaggcagcagccgctcgcattgaggccatggatccagcgacagtagagcagcaggagcactggttcgagaaagccctcagagacaaaaagggtttcattattaagcagatgaaggaagacggggcttgcttatttcgcgctgtggcagatcaggtttatggcgatcaggatatgcatgaggtagtgcgaaaacattgcatggactacttgatgaagaacgcggactactttagtaattatgtgactgaagatttcacaacctacattaacagaaagaggaagaacaattgccatggaaatcatattgagatgcaggccatggcggagatgtacaatagacccgtggaagtctaccagtattcaactgagccaatcaacaccttccatggaattcatcagaatgaagacgagcccatccgcgtgtcctaccaccgaaacatccactataattcagtcgtaaaccctaataaggctaccatcggcgtgggcttggggctgccttcctttaaacccggatttgcagagcagtctctgatgaagaacgcaataaaaacctctgaggagagctggatagagcagcagatgcttgaggacaagaaacgtgcgactgactgggaggcgaccaacgaggccattgaggagcaagtggcccgagaaagctatctgcagtggctgcgggaccaagagaaacaggcccgacaggtgaggggaccttcgcagccacgcaaggcctccgccacttgctcatcagccacagcggctgcctcttccggcttagaggagtggactagccggtcgccgaggcagcggtcctctgcaagttctcccgaacatcccgaattacatgccgagctaggcatgaagccaccctcacccggaactgtgcttgcactagctaaaccccctagtccctgtgcacctggcacctcctcacagtttagcgctggcgcagatagggctacgagtccgctggtgagcctgtatcctgccctcgaatgccgcgcactcatccagcaaatgagcccaagcgcgttcggattaaacgactgggatgacgatgagatcctcgccagcgtgctcgctgtatctcagcaggaatatctcgatagcatgaagaagaataaggtccatcgagaccctccgccagataaatcctag

SEQ ID NO: 233690 - DNA, 1701 bp, synthetic construct
  misc_feature 1..1701: note = Description of Artificial Sequence: Synthetic coding sequence
  source 1..1701: mol_type = other DNA
atgactattctcccaaaaaagaagccacccccaccggacgccgatcctgcaaatgaacctcccccaccaggacctatgccccctgcacccagaagaggagggggagtgggggtcggcggaggagggaccggagtcggcggaggagaccgtgatagggacagcggtgtggtgggggctaggcccagggcctcacccccaccccaagggccactgcccggacctccaggagcgctacaccggtgggctcttgcggtgccacccggtgcagtggcagggcctagacctcagcaagcctccccgccaccttgtggagggcctggaggtccaggcggtggcccaggggatgcgctcggcgctgcagcagctggggtgggcgcagccggtgtcgtagttggggttggaggcgctgtcggcgtggggggatgctgttctggccctggtcactccaagaggaggagacaggcacccggagtgggggctgtgggcggtggatcccctgagcgcgaggaagtaggagccggatacaattctgaggacgaatacgaggctgctgcagccagaatcgaggcaatggaccctgctaccgtggagcagcaggaacactggtttgaaaaggctttgcgagataaaaagggctttattatcaagcagatgaaggaggacggcgcttgtttgttcagagctgtggcggaccaggtgtatggggatcaggatatgcatgaggtggtccgaaagcattgtatggattatctgatgaagaacgcagactacttctctaactatgtgacagaggattttactacctacatcaatcggaagcggaagaacaactgtcacggaaatcacatcgaaatgcaggccatggctgagatgtacaaccgccctgtggaggtctatcaatatagcactgagcccattaacactttccacggcatccatcagaatgaggatgagcctatcagggtgagctaccaccgaaacattcactataattctgtggtgaatcccaacaaggctaccattggggtgggcttagggcttccttcattcaaacccggtttcgctgagcagagcctgatgaagaacgcaatcaagacctctgaggaatcatggatagaacagcagatgctagaggacaaaaagagggccaccgactgggaagccacaaacgaagccatcgaggagcaggtcgctagggaaagctacctgcaatggcttcgggaccaggagaagcaagcccgacaagtacgcggtccttcccagccaagaaaggcctctgcaacctgttcttccgccacggcagccgctagctcgggtcttgaagaatggacaagtaggtctccccgtcaaaggtcctctgctagctcacctgagcaccctgaattgcacgcagaattgggcatgaaaccaccgtcccccggaacagtcctggccctcgccaagcccccatcgccctgcgctcctggtacttcttctcagttctcagcaggcgcagatcgcgcaaccagtccgttggtgtcactatacccagcactggaatgcagagctctgatccagcagatgtccccttccgcgttcggtcttaatgactgggacgacgatgagattttggcaagtgtattggccgtgtcccagcaggaatacttagacagcatgaagaagaacaaagtacacagagatcccccaccagacaagagctag

SEQ ID NO: 233691 - DNA, 1050 bp, synthetic construct
  misc_feature 1..1050: note = Description of Artificial Sequence: Synthetic coding sequence
  source 1..1050: mol_type = other DNA
atgaaggaggacggagcctgcctgttccgggcagttgccgaccaggtgtatggggaccaggacatgcatgaagttgtaagaaaacattgcatggactacctcatgaagaatgccgactatttcagtaactatgtgacggaggatttcaccacatacatcaacaggaaacggaagaacaattgtcacggaaaccacattgagatgcaggctatggctgagatgtacaacaggccagtggaagtataccagtacagtacggagcctatcaacactttccacggcattcaccagaacgaagacgagccgataagggtatcgtaccatcgtaacatacattataactctgtggtcaacccaaataaagctactatcggcgtgggtctgggtttgccttctttcaagcctggattcgccgagcagtctcttatgaagaatgccattaagacttcagaagaaagctggatcgagcagcaaatgctggaggacaaaaagcgcgctacagattgggaggccacgaatgaggctattgaggagcaagttgctagagagagttacctgcagtggctgagagatcaggagaagcaggccaggcaggttcgcggaccctcccagccaagaaaagcaagcgccacatgttcctccgccactgccgctgcctcttcaggcctggaagaatggaccagcaggtctcccaggcagagaagctcagcctcttccccagagcaccccgagctccacgcagagctggggatgaagccccctagccctgggactgtcctggcccttgccaaacccccttccccctgcgcacctggcactagcagtcagtttagtgctggcgcagacagagctactagtcccttggttagcctgtatccagctcttgagtgccgcgctctgatccagcagatgtctcccagcgccttcggcctcaacgactgggatgacgacgaaatccttgcaagcgtgctggctgtgagccagcaggagtatttggacagcatgaaaaagaataaagtgcaccgggatccgcctccagataagtcctag

SEQ ID NO: 233692 - DNA, 1629 bp, synthetic construct
  misc_feature 1..1629: note = Description of Artificial Sequence: Synthetic coding sequence
  source 1..1629: mol_type = other DNA
atgaccattctgcctaagaagaagcccccacccccagacgccgacccaggaggaaccggcgtcggaggaggggaccgtgatcgcgatagtggggtcgtgggagcccgacctcgcgctagccccccaccccaagggcctctccccggtccaccaggcgctcttcaccggtgggctctggcagtgccacccggtgctgtggctggccctcggccacagcaggccagcccacctccttgcgggggtcctggcggaccaggagggggaccaggtgacgcccttggagcagctgctgccggagttggtgctgccggagttgttgtcggcgttggaggcgctgtgggggtggggggttgctgttccgggcctggtcatagcaaaagaagacgccaggccccaggggttggagctgtgggcggtgggtcccctgaacgcgaggaggttggtgccggatataattcagaggatgaatacgaggccgcagccgctaggattgaggctatggatcccgcaactgtggagcaacaggagcactggtttgagaaggccctgcgggacaagaagggttttattattaagcaaatgaaggaggatggagcctgtcttttcagggccgtggctgaccaggtatacggtgaccaggacatgcacgaagtggtgaggaaacactgtatggattacctgatgaaaaatgccgactatttcagtaattacgtgaccgaagatttcacaacgtatatcaaccgtaaaaggaaaaataattgccatgggaatcacatagaaatgcaggctatggcggaaatgtacaatcgaccagtcgaagtgtaccagtattccacagagccaatcaataccttccacgggatccatcaaaatgaagacgaacccataagagtgtcttatcacagaaacatccattataactccgtggtaaaccccaacaaagcaacgattggagtggggttggggctgccctcctttaaaccaggatttgctgaacagtcccttatgaagaatgctatcaaaaccagtgaagaaagttggatcgaacagcaaatgctcgaggataagaagagggccactgattgggaagcaaccaatgaagctatcgaagaacaagtggctcgcgagtcttacttgcagtggcttagggaccaggaaaagcaggccaggcaggttcgcggaccgtctcaaccccgtaaggcctcagccacctgttcttcggcaacggcggcagctagtagcggcttggaagagtggacctctaggagtccaagacaacgttcttcagccagcagccccgaacatccagaactccacgctgagctgggaatgaaacctccgagtccgggaacagtactcgccctggccaagcctccttccccctgcgctccagggacatcctcccagttcagcgccggagcagacagagccacctcaccactggtgagcttgtaccccgctcttgagtgccgggctcttattcagcagatgtctccctcagctttcgggcttaacgattgggacgacgatgagatcctggcgagcgtgctagcagtgagccaacaggagtacctagattccatgaagaaaaataaggtccatcgagaccccccacctgataagagctag

SEQ ID NO: 233693 - DNA, 1335 bp, synthetic construct
  misc_feature 1..1335: note = Description of Artificial Sequence: Synthetic coding sequence
  source 1..1335: mol_type = other DNA
ggggtggtggttggagttggcggagcggtcggcgtggggggatgctgttctgggccaggtcattcaaagcggcgaaggcaggccccaggagttggcgctgtcggaggcggtagcccagagagggaagaagttggagctggctataacagcgaggacgaatacgaggctgccgcagctagaatcgaagctatggatcccgctacagtagagcagcaggagcactggttcgagaaggctctgagggacaaaaaaggcttcatcatcaagcaaatgaaggaggacggcgcttgtcttttccgcgctgtggccgaccaggtgtatggggaccaggatatgcacgaagtggtgagaaagcactgcatggactacctaatgaaaaacgctgattatttctctaattacgtaacagaagattttaccacttatatcaatcgtaagcgaaaaaacaactgccatggcaaccacatcgagatgcaagccatggcagagatgtacaacaggcccgtggaggtgtaccagtattctacaggaactagcgccgtagaacctataaacacttttcatgggattcatcagaatgaggatgagcccatccgggtgagctatcataggaacattcactacaatagcgttgtgaaccccaataaagctactattggggtggggctaggactgccctctttcaagccaggcttcgcggagcagagcctgatgaaaaatgccatcaaaacatctgaagaatcctggatagagcagcaaatgctggaggacaagaagagggccaccgactgggaagccacaaacgaagctatcgaggaacaggtcgccagggaatcctacctgcagtggcttcgtgatcaagagaaacaggctcggcaggtaagagggccttcccagcctcggaaagcgagcgcaacctgctcctccgctaccgctgcggctagcagcggtctggaagagtggacgtctcgctctccaaggcagaggtcctccgcttctagccccgagcatcccgaattacacgctgaattaggcatgaagcctccttcccctggcactgtcctggcacttgccaaacctccctcgccatgtgccccaggaactagctcccagttttccgcaggggcagaccgggcaacttcacccctggtgtccctgtatccagcgctcgagtgccgtgccctgattcaacagatgtcaccttccgcatttgggcttaacgactgggatgatgacgaaatactggcctccgtactcgcagtgagccagcaagaatacctcgacagtatgaagaaaaacaaagtacaccgagacccccctccggataagtcttag

SEQ ID NO: 233694 - DNA, 867 bp, synthetic construct
  misc_feature 1..867: note = Description of Artificial Sequence: Synthetic coding sequence
  source 1..867: mol_type = other DNA
atggatgatcctaagtcagagcagcagagaatacttcggaggcatcagagggaacgccaggaattgcaggcccaaatacgatctctgaaaaactcggtccccaaaaccgataaaacaaaacgaaagcagttactgcaggatgttgcaaggatggaggccgaaatggctcagaagcacagacaggaactagaaaaattccaagacgattcatctattgaatctgttgttgaagacctggctaaaatgaacctcgaaaaccgacctccacggtctagcaaggcccatcggaaaagggaaagaatggaatcagaggaacgtgagcggcaggagagtattttccaggcggaaatgagtgaacatctggcgggatttaagagggaggaagaggagaaactggctgcaattcttggagcgcgtggtcttgaaatgaaggccattcccgcagatggccactgtatgtatcgcgctatccaggatcagctggtgttctccgtaagcgtcgagatgctacgctgtagaactgcctcctacatgaagaaacacgtggatgagttcctccccttttttagtaatcccgagacttctgactcattcggttacgatgacttcatgatatattgtgacaatatcgttcgaactaccgcctgggggggacagctcgagctgcgcgcactttcccacgttctgaaaacacccattgaagtgatccaggccgactccccgactctgattattggtgaagaatatgtcaaaaagccgattatcctggtgtatctgaggtacgcatacagtctgggcgaacactacaactctgtaactcctcttgaagcaggagctgcaggcggagtactgcccagactgctgtag

SEQ ID NO: 233695 - DNA, 972 bp, synthetic construct
  misc_feature 1..972: note = Description of Artificial Sequence: Synthetic coding sequence
  source 1..972: mol_type = other DNA
atggaaccccgtgtgagagtagaaggttggaaggtccccacaagccgctgccggttcctgctcgccagagtgctgggatacctcgtggtgatggaagccgttctgacagaggagctggatgaagaggagcaacttcttcgccgtcaccggaaggaaaaaaaggaattacaggctaagatacaaggtatgaaaaacgctgtgccaaagaatgataaaaagaggcgcaagcagctgacagaggatgtcgcaaaactggaaaaagagatggaacagaaacaccgcgaagagctggaacagcttaaactgaccacaaaagaaaacaagattgactctgtggcagtaaatatatccaatctggtgctggagaaccagcccccacgcatttcgaaagcacagaagcgtagagagaaaaaagccgcactcgagaaggagcgggaggagcgtattgcagaagctgaaattgaaaatctgaccggagcacgacacatggaatccgagaaacttgcacagattttggccgctaggcagctggagattaagcagattccttccgacggtcattgcatgtataaggccattgaggatcagcttaaggaaaaggattgtgcgctgactgtagtggccctgaggtctcagactgccgagtacatgcagtcacatgtcgaggatttcctccccttccttacaaatccgaacacgggagacatgtacactcctgaggagtttcaaaaatattgcgaggatatcgtcaacaccgctgcatgggggggacaattagaacttcgcgcactcagtcacattcttcagacccctatcgaaattatccaggcagactcccctcctattatcgtcggagaggagtattctaagaagcccttaatcttagtttacatgcgccatgcttatggactgggcgaacattataatagcgtcactagactcgttaacatcgttactgaaaactgctcttag

SEQ ID NO: 233696 - DNA, 579 bp, synthetic construct
  misc_feature 1..579: note = Description of Artificial Sequence: Synthetic coding sequence
  source 1..579: mol_type = other DNA
atgatctccaaagagaaaaaggctgcactggagaaggagcgagaggagcggatcgctgaggccgaaatcgagaatctcacaggcgctcgccacatggaaagcgagaagctcgcgcagatcctggccgctcgacagctggagattaagcagataccctcagacggtcattgtatgtacaaggctatcgaggatcagctgaaggaaaaggactgcgccttgactgtcgttgcgctgcggtcacagacggcggagtatatgcagagccacgtggaggattttcttccctttttgactaaccctaacacaggcgacatgtatacacccgaagagttccagaagtattgtgaggacattgttaacacagctgcctggggcggtcagctcgaactccgcgcattgagccatatcctgcaaacaccaatcgaaataattcaggcagattcaccaccaattatagtaggtgaagaatacagcaaaaagccattaatccttgtgtacatgaggcatgcctatggcttgggagaacactacaacagcgttacccgtctcgtgaatattgtgactgagaattgcagctag

SEQ ID NO: 233697 - DNA, 2781 bp, synthetic construct
  misc_feature 1..2781: note = Description of Artificial Sequence: Synthetic coding sequence
  source 1..2781: mol_type = other DNA
atggtctcaagcgtccttccgaatccaaccagtgcagagtgctgggccgctctgctgcacgatccaatgaccttggatatggacgctgtgcttagcgatttcgtgagatcaacaggtgctgagccagggcttgcacgggacctcctagaagggaagaattgggacttaacggccgctctgtcagattacgaacagttgcggcaggtgcacacagctaatcttccgcacgtgtttaatgagggacggggacctaagcagcccgagagggagccccagccgggacataaggtggagcggccatgcctacagcgacaagacgacattgcccaggagaaacgcctatcacgcggaatttctcatgcctcttctgccatcgtgtctttagcaagaagtcacgtcgcatccgagtgcaataacgaacagttccctcttgaaatgccaatttacacgttccagctgccagatctcagtgtatattcagaagacttcagatcgttcatcgaacgggatttaattgaacaggcaacaatggtcgccctggaacaagccggaagacttaactggtggagcacagtctgcacatcctgcaaaagactgttacctctcgctactaccggggatggcaactgcctgctccatgctgcttctcttggcatgtggggctttcatgatagagatctggtgctccgcaaggccctctacacaatgatgagaacaggcgcagagcgagaggccctaaaaagaaggtggcggtggcaacagacgcaacagaataaagaggaagaatgggagcgtgaatggactgagttgctcaaactggcctcgtctgagcctcgtacccactttagtaagaatggagggacgggaggaggagtggataatagcgaggatccagtttatgagtcactcgaggaattccacgttttcgtccttgctcatatcctgcggagacccatcgtcgtcgtggctgatacaatgctcagggatagcggaggagaggccttcgcacccataccgttcgggggaatctatctgccccttgaagtgcctcctaatcgatgtcactgttcccctctggtgcttgcttacgatcaggctcattttagcgcgctggtgtctatggaacagcgggaccaacagagggagcaggctgtgattccactgacagactctgaacataaactgctgccactccactttgcagtcgaccctgggaaggattgggagtgggggaaagacgataatgacaatgcaagactggcccatctcatcctgagtctggaggctaaactgaacctgcttcatagctacatgaacgtgacctggatcagaattccctcagagacgcgcgctccactcgctcagcccgaatccccaacggcttctgcgggagaggacgtacagtctctggccgattcactggacagcgatagagactcagtgtgctctaacagcaactctaacaacgggaaaaacggcaaagataaagagaaggaaaaacagagaaaggagaaagacaaaacacgcgcagattccgtcgcgaacaaactcgggtccttctccaaaactttaggcattaaactcaaaaagaacatgggtggtctcgggggtctagtccatggcaaaatggggcgagctaatagcgccaatggaaagaacggcgatagcgctgagagaggcaaggagaagaaagcgaagtcaaggaaggggtctaaggaagagtccggtgcctctgccagcacctccccgagcgagaagaccacccccagccctacggataaagccgcaggagcctcaccagctgaaaagggaggcggtcctcggggtgacgcctggaaatattccacagacgtcaaactgtccctcaacattctgagggccgctatgcagggcgagagaaaattcatatttgctggattgctcctaacgtcacatcggcaccagttccacgaggagatgataggctattatctgacatcagctcaggagagatttagcgcagaacaggaacagcgacgaagggatgcggcaaccgcagcagccgctgcagcagccgcagccgcagccacagctaagcgaccaccacggagacccgagaccgaaggcgtacctgtgcccgagagagcctcccccggacctcctacacagctggtcctgaagctcaaagagcggccttcacccggacccgctgcaggacgcgcagctagagcggcagcaggaggcacagcatctcccggtggaggggctcgaagggcaagcgcatcaggaccggtgcctggccgatccccacctgcacccgctcggcagtccgtgatccacgtgcaggcctccggcgcaagggatgaagcctgcgccccagctgtcggggcactgcggccatgcgcaacctacccccaacaaaatcgcagcctttcttctcagtcatactctccagctcgcgctgctgccctccggaccgtgaacaccgtggaaagcctggcacgggctgtccctggggcactgccaggtgcagccggaactgctggtgccgcagagcataaatcccagacttacaccaacggatttggagccttgcgggatggtctggagtttgctgatgctgatgccccaaccgctagatccaacggagagtgcggcaggggcggaccgggtcccgtacaacggagatgccaaagggagaactgtgccttctacggcagggcagagaccgaacactattgttcctactgctaccgggaagaactgcggaggcggagagaggcccgtggggcacgcccttag

SEQ ID NO: 233698 - DNA, 2802 bp, synthetic construct
  misc_feature 1..2802: note = Description of Artificial Sequence: Synthetic coding sequence
  source 1..2802: mol_type = other DNA
atggtgtcttcagttctgcccaacccgacatctgcggagtgttgggcagccctcctccatgacccgatgacactcgatatggacgctgtactatccgactttgtcagaagtaccggagccgaaccgggtttagcccgagatctgctagagggtaaaaattgggacctgacagccgcactttccgactacgagcagctgcgccaggtgcacaccgcgaacttgcctcacgtcttcaacgaagggagaggccctaagcaaccggaacgtgaacctcagccaggacacaaggtggaacggccttgtttacagagacaagacgatattgcacaggaaaaaaggctgtctcgaggaattagtcatgccagctccgctatcgtcagtcttgcccgttcccacgtggccagtgaatgcaacaatgaacagtttcccctggaaatgcctatctacacattccaactgccggatttgagcgtgtactcagaggacttcaggtcttttatcgaaagagacttgattgagcaagccacaatggtagccttagagcaggccggaaggctgaactggtggtctacagtgtgcaccagctgcaaacggctgctgccgctggctaccaccggggacgggaattgcctactccatgcagcgtcactggggatgtggggttttcacgacagagatttagtgctgaggaaagccctgtataccatgatgcgaaccggtgcagagcgcgaggctctgaaaaggcgctggcggtggcagcaaacccaacagaacaaagagagcggtctggtatatactgaagaggagtgggaacgcgagtggaccgagttactaaaactggcatcttccgagcccaggacgcacttcagcaagaacgggggaaccggagggggagttgacaactccgaggatccagtttatgagtcactggaggagtttcatgtattcgtgctggctcacatcctgcgcaggccaattgtcgtggtggccgacaccatgctgagagactcaggcggtgaggctttcgcgccaatcccctttgggggtatctatctgcctttggaagtgccccctaatcggtgccactgctctcctctggtgttggcctatgatcaggctcatttctccgcactcgtctcaatggagcagagagatcagcaacgggaacaggccgtcattcccctgaccgactccgagcataagctgttgcccctccattttgcggttgatcccggaaaagactgggagtggggcaaggatgataatgacaatgcacggttggcacatctgatcctttccctcgaagccaaattaaacctcctgcacagctacatgaatgtaacctggatcagaatcccttctgaaacccgagcaccgcttgcccagccagaatcccccaccgcatctgcgggtgaagatgttcagtcactggccgactccctggactcagaccgggactctgtgtgttcaaacagtaattccaataatggcaaaaatgggaaggataaggaaaaagagaagcagagaaaagagaaggacaagactcgcgcagattctgtggcaaacaagctgggatcctttagcaagaccctgggcataaagctgaaaaaaaacatgggcggtctgggcggacttgtgcacggcaaaatgggaagagccaactcggcaaacggaaaaaacggcgattccgcggagagaggcaaggagaaaaaagctaagtcaaggaagggatcgaaggaagagtcaggagcaagcgcatcgaccagcccaagtgagaaaactaccccttcacctaccgataaggctgccggtgcctcaccagcggaaaaagggggaggcccacgcggagacgcttggaagtattccacagacgttaaactgtccctgaacatccttcgcgcagccatgcaaggcgagagaaagtttatctttgctggcttactcctcacctcacaccgacatcaatttcacgaagagatgatcgggtattacttaaccagcgcacaggagcgcttcagtgcggagcaagaacagcgcagacgggatgctgccactgcggctgcggctgccgcagctgcagcggctgcaacagctaaacgccctcctcgtcggccagagacggagggcgttccagtaccagagcgggctagcccgggacctcctacgcagctcgttctgaagctgaaggaacgccctagtcccggaccagcagcaggcagagccgcacgagccgcagctggcggaaccgcatcaccaggcggaggtgcgcgacgtgcctcagcaagtggacccgttccaggccgttctcctccagcccctgctcggcagagtgtgatccatgtccaagcaagcggagccagggacgaggcctgtgcaccagccgtcggggcattgcggccttgcgcaacatatccccagcagaatcggagcctctcttcccagagctacagccctgccagagcagcagccttgagaacggtcaacacagttgagagccttgctcgcgctgtgcctggggctctgcctggcgctgccggaacagccggagctgcggaacacaagtcacagacgtacactaatgggttcggtgctctgcgggatggtctggaatttgcagacgccgacgcgccaacggcacgctctaacggagagtgcggcaggggcggacccggtcctgtgcaaagacgctgccaaagagagaactgcgctttttatggtagggcagagaccgagcactattgtagttactgctacagagaggagctccggcgtagaagggaagccagaggtgctcggccatag

SEQ ID NO: 233699 - DNA, 333 bp, synthetic construct
  misc_feature 1..333: note = Description of Artificial Sequence: Synthetic coding sequence
  source 1..333: mol_type = other DNA
atggtgagttccgttttgccgaacccaacctcagctgagtgttgggctgccctgctacatgatccgatgacattagacatggacgctgttctgagtgattttgtccggagcacaggtgccgaacccggactggccagggacctgctggaagggaaaaattgggacttaactgcagcactatccgattatgaacagcttcggcaggtgcatactgcaaaccttcctcacgttttcaacgaagggagaggccctaagcagcccgaacgggaaccacagcccggtcacaaggttgaacggccttgtctccagcggcaagacgatatcgcacagtag

SEQ ID NO: 233700 - DNA, 2532 bp, synthetic construct
  misc_feature 1..2532: note = Description of Artificial Sequence: Synthetic coding sequence
  source 1..2532: mol_type = other DNA
atgacccttgacatggatgctgtcctctcagattttgtgcgaagcacaggagctgaacctgggttggccagagatcttctcgaggggaaaaactgggacgtcaacgccgcacttagcgattttgagcagttgcgtcaggtccatgccggtaatttgcccccaagcttttccgaaggcagtggcggtagtcggaccccagaaaaaggattcagcgaccgagaaccaacccggccacctagacctatcctacagagacaggacgatatcgttcaggagaaacggttgagcagagggatatcgcatgcttcttcgtctattgtgtccctagctaggagccatgtttcatcaaacgggggtggaggaggaagcaatgaacaccctttggaaatgccaatatgcgccttccaactgccagacctgacagtgtataatgaggactttagatcgttcatcgaaagagacctgattgagcaatctatgctcgtggctctggagcaagcgggacgcctcaactggtgggtgtccgtggatcctacgtctcagagattgctgcctctggccacgactggggatggaaattgccttttgcacgcagcaagcctcggcatgtggggattccatgatcgagacctaatgttgagaaaggccctctacgccttgatggaaaagggcgtcgagaaggaggctttaaagagacgatggaggtggcaacagacacagcaaaataaggagtctggccttgtgtacactgaagacgaatggcagaaagaatggaatgaactcattaagctcgcctcaagtgagccaagaatgcaccttggaacgaatggagcgaattgtggaggagtggagtcttctgaggagcccgtatatgagtctctagaagaattccatgtgtttgttctagcccatgtgctgagaagacctatagtggtcgtggccgacacaatgctgagagatagcggtggtgaggccttcgctcccatcccatttgggggaatttacctgcctcttgaggtgccagccagccagtgtcacagatcaccactggtcctggcgtatgatcaggcccatttctcggcactggtgagcatggaacagaaagagaacaccaaggagcaggcagtcatccccctgaccgactctgaatataaactgctcccactgcattttgccgtggacccaggcaaagggtgggaatggggaaaggacgactcagataatgtgagactcgcctctgttattctttctctcgaggtcaaactccatttgttgcactcctatatgaacgtcaagtggattccgctctcaagcgacgcacaggctcccttggctcaacccgagtcgcccacagcatccgccggagacgagcctaggtccacccccgagagtggcgactctgataaggagtcagtcgggtcttcatctacaagcaacgaaggaggacggaggaaggaaaaatcgaagcgggacagagagaaagataaaaaacgggctgattccgtggctaataaactcggtagcttcggtaagaccttaggctccaaactgaagaaaaacatggggggactgatgcattccaaaggctcaaaacctggtggcgtaggcacagggttgggtgggagctcgggcaccgagacattggaaaaaaaaaagaaaaacagtctcaagagctggaaaggaggcaaggaggaggccgctggcgatggacccgtatcagaaaagccccctgcagagagcgtgggaaacggtggatcgaagtacagccaagaagtgatgcagagtttgtccattctgcgaacagccatgcagggcgaagggaaattcatctttgtagggactctcaagatgggccatcggcatcagtaccaagaggagatgatccagagatacctgtctgacgccgaagaacgctttttagctgaacaaaaacagaaggaggcagagaggaagattatgaacggcggtataggcggtggacctcccccagcaaaaaaacccgaaccggatgccagagaagaacagccaacgggtccccctgccgagtcccgggcaatggcttttagcacgggctatcccggagactttacaattccccgtccatctgggggaggagtgcattgtcaggagccgaggaggcaactcgctgggggaccctgcgtcggcggtctacccccttatgccacctttcccagacaatgtcccccaggccgtccctacccgcatcaggattccatcccgtccctggaaccaggcagccacagcaaggacggcctgcataggggggcactcctcccacccccatacagggtggccgacagttactccaatgggtatcgtgagcctcccgaacccgacggctgggccggtggcctgaggggactgcctcctacacagaccaagtgcaaacagccaaattgctcattctacgggcaccccgaaacgaataatttttgcagttgctgttacagagaagaactgagacgacgcgagcgagagccggacggggaattactcgtgcaccgcttttag

SEQ ID NO: 233701 - DNA, 1284 bp, synthetic construct
  misc_feature 1..1284: note = Description of Artificial Sequence: Synthetic coding sequence
  source 1..1284: mol_type = other DNA
atgacccttgacatggatgccgtgttaagcgactttgtgagatcgacaggagctgaaccaggcttggcccgtgatctgctggagggcaaaaactgggacgttaatgccgctctgtcggatttcgagcagctgaggcaggttcacgcaggcaatctccccccttcttttagtgagggcagcgggggaagtcgcacacctgagaagggcttcagcgatcgggaaccaacccgacctccacggcctatcctccaaagacaggatgatattgtgcaagagaagcggctgtctagaggaattagccatgcctcttcgtccatcgttagcctggccaggtcccacgtgtcctcaaacggcggtggaggcggatccaatgaacatccactggaaatgcctatttgtgcattccagctgccagatttaactgtgtacaacgaggattttagaagttttatcgagcgtgacttgatcgagcagagtatgctggtggccctggagcaagccggaagactaaattggtgggtgtccgtcgaccctacgtcgcagcgcttgctgcccctagctacaacgggcgatggcaattgcttgcttcatgcagcgtcactcgggatgtggggctttcatgatcgcgacctgatgctgcgcaaggctctttatgctctcatggaaaagggagtggaaaaggaggcgctcaagcggaggtggagatggcagcagacacagcagaacaaagagtctggtctggtttatacagaagatgaatggcaaaaggagtggaatgagctgattaagctcgctagcagcgaaccaaggatgcatctggggactaatggggcaaactgtggaggtgtggagagctctgaggaaccagtgtatgaatctctggaagaattccatgtcttcgtacttgcccacgtgctgcgtaggccaatcgtcgtggtggctgatacaatgctcagggatagtgggggagaggccttcgccccaatacccttcggcggaatctaccttccactcgaagtacctgcctctcagtgccatcggagccctttggttttggcctatgatcaggctcatttctccgccctggtctcgatggagcaaaaggaaaatacaaaggagcaggctgtgatccctctgaccgacagcgaatacaagctcctcccactgcacttcgccgttgaccccggtaagggctgggaatggggaaaagatgattctgacaatgtgcggctggcaagtgtcattttatcccttgaggttaagttgcatcttctccatagttag

SEQ ID NO: 233702 - DNA, 2445 bp, synthetic construct
  misc_feature 1..2445: note = Description of Artificial Sequence: Synthetic coding sequence
  source 1..2445: mol_type = other DNA
atgactctggacatggacgcagtactttccgactttgtcaggagtacgggagcagaacctggactagcccgtgacttgctggaggggaaaaactgggacgttaatgccgcactctcagactttgagcagctccggcaagtgcatgccggaaatctgcccccatcttttagcgaaggttctggaggttctagaacacctgaaaagggcttttccgatagagagcccacccgaccaccacgccctattctgcagaggcaggacgatatcgtgcaggagaagcggttgtctaggggaatatcacacgcttcctcttctattgtaagtctcgctagatctcatgtctcttctaacggaggcggtgggggatctaacgagcatcccctggagatgcccatttgtgctttccaacttccggatctgaccgtatataatgaagatttccgtagctttatcgaaagagatcttattgagcaaagcatgcttgtcgccctggaacaggctgggcgactgaattggtgggttagcgtggacccaacctcacaaaggcttctcccactggccaccacgggagatggtaattgtctgctgcatgctgccagcctggggatgtggggatttcatgatcgtgacttaatgttgcgaaaagccctgtatgcactgatggagaagggagtggagaaggaggcactgaagagacggtggagatggcagcaaactcaacagaacaaggagagcggcctggtatacactgaggacgaatggcagaaagagtggaatgaactgatcaagttggcttcatcagaaccccgtatgcacttagggacgaatggagcaaactgtggaggagtcgagagttccgaagaacctgtatatgagagcctggaagaattccacgtgttcgtcctggctcacgttctgaggaggcctatagtcgtcgtcgcggatactatgctgcgtgacagcggaggggaagcatttgctcctatcccttttgggggaatttaccttcctctggaggtgccagcgagccaatgtcacagatcccctctggtgctcgcctatgatcaggcccactttagcgccctggtgagcatggagcagaaggaaaatacgaaggaacaggccgttattccactgactgattcggagtacaagctcctccccctgcacttcgccgttgatcccggaaagggttgggagtgggggaaagacgattcagataatgtcaggctggccagcgttatattatcactggaggtgaagctgcatcttctgcatagctatatgaacgtcaaatggatccccctgtcatccgatgctcaggcgcctttggcacagccggaaagcccgaccgcttcagcaggagacgaacccaggtccactcccgaaagcggggacagtgacaaggagtcggtcgggagcagttctacctccaacgagggaggcaggcggaaagaaaaaagtaagagagaccgagaaaaggataagaagagagcagacagtgtggcgaacaaacttggttcttttggtaagacactcggtagcaaactcaagaagaacatgggtgggttgatgcatagcaaggggagtaagcctgggggagttgggacaggacttggtggctcatctggcactgaaacccttgaaaaaaaaaaaaagaatagtcttaaaagctggaaaggcggaaaggaagaagctgccggagacggacctgtgtcagaaaagcctcctgctgaaagtgtgggcaatggcggttcaaagtattcacaggaagtcatgcagtctctcagcattctgcggacggcaatgcagggcgaagggaagttcatctttgttggcactctcaagatgggccatcgccaccagtatcaggaggaaatgatccagcggtatctgtccgatgccgaggagaggtttctggctgaacaaaagcagaaagaagccgagcgaaagataatgaatggcggtatcgggggagggccacccccagccaagaaaccagagcccgacgcgagagaggagcaaccgaccggccctcccgctgaaagcagagccatggcatttagcacaggttaccccggtgatttcacgattcctcgtccaagcggcggaggggtccattgtcaggagccacggcgacagcttgccggaggcccatgcgttgggggactgcctccatatgctacctttccaagacaatgccctcctggccgaccttaccctcatcaggattctataccttcgctggaacctggcagtcatagtaaggatggactacatcggggagcccttctgcctccaccgtaccgcgttgctgactcctatagcaacggttatcgcgaaccgcctgagccggacgggtgggctggaggcctgcgtggtttacccccaactcaaactaagtgtaagcagcctgacggcgagctccttgtgcatcggttctag

SEQ ID NO: 233703 - DNA, 927 bp, synthetic construct
  misc_feature 1..927: note = Description of Artificial Sequence: Synthetic coding sequence
  source 1..927: mol_type = other DNA
atgtgtggcgtggaggggtgttgccagggcggagctacccgaaggggaagcctgccagggggacggcaacttgctactcggaagcggagcgtggtgagacgctgcctcaagatggccgcagaagaaccccaacaacaaaaacaggaacctttaggatccgattctgagggcgtcaactgtctggcctatgacgaagcgattatggcacagcaggataggatccagcaggagatagccgtccagaaccccttggtgtcagagcggctggagttgtctgtgctctacaaggagtacgccgaggatgacaacatctaccagcagaaaattaaagacctccacaagaagtactcttatatccgaaagacccggcctgatggaaactgtttctaccgagcctttggtttttcacatctcgaggccctcctggacgattctaaggaactccagagattcaaggcagtcagtgcaaaatcaaaagaggatcttgtgtcccaaggattcaccgagttcactatcgaggactttcacaacactttcatggatctcattgagcaagtcgagaaacagacttctgtggccgaccttctggcatcctttaacgatcaatctacttccgactacctggttgtatacttgaggctcctcacttcagggtacctgcagagggagtcgaaattttttgagcactttatcgaaggagggagaactgtgaaggagttttgccaacaggaggttgaaccaatgtgtaaggagtccgatcatatccacattatcgccctcgctcaggccctctctgtctctattcaggtcgagtacatggaccgcggagaaggagggacaaccaacccccacatcttccccgaggggagtgagcctaaagtgtacttgttgtatcggccaggacactacgatattctgtacaaatag

SEQ ID NO: 233704 - DNA, 816 bp, synthetic construct
  misc_feature 1..816: note = Description of Artificial Sequence: Synthetic coding sequence
  source 1..816: mol_type = other DNA
atggcagcagaagaaccgcagcagcagaagcaggaaccactcggcagcgactcggagggggtgaattgcctggcatacgatgaagccattatggcccaacaggacagaatccagcaggagattgccgtacagaatcccctggtgagcgaacgtctggagctatccgtgctgtataaggaatacgcggaagatgataatatctatcagcagaaaatcaaggatctgcacaagaaatactcctatattcgtaagaccaggcccgatgggaactgcttttaccgggctttcggatttagccacctagaagctctcctggatgattcaaaggagcttcagcgcttcaaggcggtcagtgctaaatcaaaagaagacttggtgtctcagggctttacggaatttacgatagaagatttccacaacacttttatggatctcatagaacaggtggaaaaacagactagtgtagcagatctcctcgcatcattcaacgaccagagtacctcagactatcttgtggtgtatttgcgactgttgacaagcggataccttcagagagagtcaaaatttttcgaacatttcatagaaggcggtaggaccgtcaaagagttttgtcaacaggaggtcgaacctatgtgcaaggagagcgatcatattcatatcattgctctggcccaggccctctctgtgtctattcaggtcgagtatatggatcgcggagaggggggaactactaatcctcatatcttcccggaaggctccgaacccaaagtgtatctgctctaccgccctggacactatgacattctctataaatag

SEQ ID NO: 233705 - DNA, 816 bp, synthetic construct
  misc_feature 1..816: note = Description of Artificial Sequence: Synthetic coding sequence
  source 1..816: mol_type = other DNA
atggctgctgaggaaccgcaacagcagaaacaagagcccctgggcagcgactccgagggagtcaactgcctggcttatgacgaagccatcatggcgcaacaggaccgaattcagcaagagatagccgtgcagaatcccttggtgtccgagcggctggaattgtctgttctgtataaggagtacgccgaggacgacaacatctaccagcagaagatcaaggatctgcacaaaaaatatagttatatccggaaaactcgacctgatgggaattgtttttacagggcttttggattcagccacctcgaggcactgctggatgatagcaaggagctgcagcgttttaaggcagtctcggccaagtctaaagaagaccttgtgagccagggatttacagagttcacgatagaagatttccacaacactttcatggatctgatcgagcaagtggagaagcaaacaagcgtggccgacttgctggcctcctttaacgaccagagcacttcagactacctagtggtttatttgagattacttaccagcggatatctgcagcgggaatccaagttcttcgagcatttcatagaggggggtaggacagtaaaggagttctgtcagcaggaagtagagcctatgtgcaaggaatcagatcatattcatatcatcgcgctcgctcaggcgctgtctgttagcatacaggtagagtacatggatcgcggagagggcggtaccactaacccgcacatcttccccgagggtagtgagcccaaggtttacttgttgtatagacccggacactatgatattctctataaatag

SEQ ID NO: 233706 - DNA, 843 bp, synthetic construct
  misc_feature 1..843: note = Description of Artificial Sequence: Synthetic coding sequence
  source 1..843: mol_type = other DNA
atggcggctgaggagccgcagcagcaaaagcaggaacctctgggctcagattctgaaggggtcaactgccttgcatacgacgaagctatcatggctcaacaggacaggattcagcaggaagacatgaccgatccctgtctgcttcagattgccgttcaaaaccccctagtgtctgaaaggctggaactctctgtgttatacaaagagtatgctgaggatgacaatatttaccaacaaaaaattaaggacttacataaaaagtattcttacataagaaaaacacggccagatggaaattgtttctatcgggcatttggttttagtcatctcgaagcactactggatgatagtaaagaactccaacgttttaaggccgtatccgctaaaagcaaagaggatctcgtctctcaaggctttactgagtttacaatcgaagacttccacaacacattcatggatctgatcgagcaggttgagaaacagacttcagtggcagacctgctggcaagctttaatgaccagtccacttccgactaccttgtggtgtacttacgcctcctcacctctggctacctccagcgggaaagtaagttcttcgaacacttcattgaggggggacgcacagtgaaggaattttgccagcaggaggtggagccgatgtgcaaggaatccgatcatatccacattattgccctggcacaggccctgtcggtaagcattcaggtcgaatacatggatagaggggagggcggtacgaccaacccacatattttccctgagggttccgaacccaaggtgtatctcttgtacaggccaggacactacgatatactgtacaaatag

SEQ ID NO: 233707 - DNA, 705 bp, synthetic construct
  misc_feature 1..705: note = Description of Artificial Sequence: Synthetic coding sequence
  source 1..705: mol_type = other DNA
atgagcgagacttccttcaacctcatttccgagaaatgtgacattctctccatcctgcgtgaccacccagagaaccggatctatcgccgtaagattgaagagctgtccaagcggtttacagccattcgcaaaacaaaaggagatggtaattgtttctatagggccctcggctatagttatctcgaatcgctgttgggtaaatccagggagatatttaaatttaaggagcgggttctccagactccgaacgacctgcttgcagctgggtttgaagagcataaatttcggaattttttcaacgctttctacagcgtggtggagttggtcgagaaggacggctcagtgagctctttattgaaggtcttcaatgatcagtccgcttctgatcacatcgtccagttcctgcgcttgcttacatccgctttcatacgcaaccgcgcagacttcttccgccatttcatcgatgaggagatggacatcaaagatttctgtacccatgaggtcgaacccatggccacagaatgcgaccacatccagattactgccttgagccaagccctgtcaattgccctgcaggtcgaatatgttgacgagatggatactgcactgaatcaccacgtttttcccgaagccgctacacctagtgtgtacctgctttataagacatcacactataacatactgtacgctgctgataagcattag

SEQ ID NO: 233708 - DNA, 222 bp, synthetic construct
  misc_feature 1..222: note = Description of Artificial Sequence: Synthetic coding sequence
  source 1..222: mol_type = other DNA
atgtccgagacgtcctttaacctgatttcagagaaatgcgatattctcagcatcctgcgagaccaccccgagaacagaatctacaggcgtaaaattgaggagctgtcaaaaagatttacggccatccgaaagactaagggcgatggtaactgtttctatcgagctctggggtacagctacctcgaatctctactcggaaaaagtcgagaaatcttcaagtag

SEQ ID NO: 233709 - DNA, 753 bp, synthetic construct
  misc_feature 1..753: note = Description of Artificial Sequence: Synthetic coding sequence
  source 1..753: mol_type = other DNA
atggcagctttgtcatgtctgctcgatagtgtgcgccgagatatcaagaaggtcgaccgagagctgagacagctgcgttgcatcgatgaattttccacccggtgcctctgcgacttgtacatgcacccgtattgctgttgtgatctccatccatatccctattgcctgtgttactctaaaagatctcggtcttgcggactttgcgatctgtatccctgctgcctatgcgattacaagttgtattgcctccgtccctcattacgatcactagagcgcaaagctatccgcgctatcgaagacgagaagcgggaattagccaaactcaggcggactacgaacaggattctggccagttcatgttgcagtagtaacatcctgggatctgtaaatgtatgcggctttgagcccgatcaagtcaaagtgcgcgtgaaggacggaaaggtgtgcgtgtccgctgaacgggagaaccggtacgactgcctggggagtaaaaaatacagttatatgaatatatgcaaagagttttccctgccaccatgtgtggatgagaaggacgtcacgtacagctacggcctcggcagctgcgtgaaaatcgaatccccctgctacccatgtacttccccatgcagcccttgtagcccctgctccccgtgcaatccctgctcaccctgcaatccttgctcgccatacgacccgtgcaatccctgctatccgtgcggctcacggttcagctgcagaaaaatgatactgtag

SEQ ID NO: 233710 - DNA, 2418 bp, synthetic construct
  misc_feature 1..2418: note = Description of Artificial Sequence: Synthetic coding sequence
  source 1..2418: mol_type = other DNA
atgaaggataggagtagcaccccaccattacacgtacatgtggacgagaacactcccgtacacgttcacattaaaaagctccctaaaccatctgcaacatcaagtcagaagagccataaaagggggatgaaaggcgacacggtaaatgtgcggcgaagtgtgcgtgtaaagaccaagaacccaccccactgtctggagatcacccctccctcctccgaaaaactggtgagcgtaatgaggctctcagacctatcaacagaagatgacgactctggacactgcaagatgaaccgttacgataagaagatagattccctgatgaatgccgtaggatgtttgaagagcgaggttaagatgcagaagggtgaacgccagatggctaagaggtttctggaggaaagaaaggaagagctggaagaggtggctcacgaactcgctgaaaccgagcatgagaataccgtgctccgacataacattgaaaggatgaaggaggagaaggacttcacgattctccaaaaaaagcacctgcagcaggagaaggaatgcttaatgtccaagctggtcgaagccgaaatggacggcgctgctgccgcaaagcaggtgatggccctcaaggacacgattggcaaactcaagaccgagaagcagatgacttgcacagatattaacacgttgaccagacagaaggaactcctgctacaaaaactgtctacgtttgaggagaccaatagaaccctccgcgaccttttgcgagagcaacactgcaaggaggatagcgagcggctgatggaacagcagggggcactgctgaagcggctggctgaggccgatagcgagaaagctagattgttactgctactccaagacaaggataaggaagttgaagagctcctgcaggaaattcagtgcgagaaggcacaggccaaaacagcgagcgaactgagcaagagcatggagagtatgcggggacacctacaggcccagttgcgctcaaaagaggccgagaattccagattatgcatgcagattaagaacctggaacggagcgggaaccaacataaagcagaagtcgaagccattatggagcaacttaaggaactgaagcagaaaggggatagagataaggagtcactgaaaaaggccatccgcgctcagaaggagcgggcagaaaagtctgaggaatatgccgagcagcttcacgtgcaactggctgacaaggatctctacgttgctgaagcactgtctactctggagtcctggcgatctcgatataaccaggttgtgaaagaaaaaggcgatcttgaattggaaatcattgttctaaacgacagagtaactgacctggtcaaccaacagcagaccctggaggagaagatgagagaggatcgggattccttggtggaacgtcttcaccgtcaaacagccgagtacagcgcttttaagctggagaacgaacggctgaaagccagttttgccccaatggaagacaagcttaatcaggcgcacttggaagtgcagcagttgaaggccagcgtcaaaaattatgaagggatgattgataactataagtcccaagtcatgaagacacgcctggaagcagacgaagtggccgctcagctggagaggtgcgataaggaaaataaaattctcaaagatgaaatgaataaagaaatcgaggcagcgaggaggcagtttcagtcacagctggctgatcttcagcagctccctgatatcttaaagatcaccgaagccaaactggccgaatgtcaggaccagttacaggggtatgaacgtaagaatatcgaccttactgccatcataagcgatctgaggtctaggattgaacaccagggtgataaactggaaatggccagggagaagcatcaggcctcacagaaagagaataagcaactaagtcttaaagtggacgagcttgaacgcaaactagaggctacaagcgctcaaaacatcgaattcctgcaggtgatcgccaagagggaagaagcgattcaccagtcccagcttcgcttagaagagaaaaccagggaatgcggcacattggccagacagcttgagtccgctatcgaggatgccagacggcaggttgagcagaccaaagaacacgcactgagcaaagaacgggctgcccagaacaagattctcgatctggagacacagctgtcccggacaaaaacagagctttctcagctgagacggtccagagacgacgctgaccggaggtaccagagcaggctgcaggatcttaaggatagactggaacaaagcgaaagcaccaataggtctatgcagaattacgtgcagttcctcaagtcttcctatgctaacgtttttggagacggaccttactcaacttttctaacttcttcccctattcgctcgcgttctcctcccgcttag

SEQ ID NO: 233711 - DNA, 2475 bp, synthetic construct
  misc_feature 1..2475: note = Description of Artificial Sequence: Synthetic coding sequence
  source 1..2475: mol_type = other DNA
atgaaggaccggtcgtcaacccccccattacacgtgcatgtggatgagaacactcccgtccatgtccatattaaaaaactgccgaagccaagcgcaaccagctctcagaaaagtcataaacgcggaatgaaaggcgacacagtaaatgtcaggcgctctgtccgcgtgaagaccaaggtgccttggatgccaccagggaagtcaagtgccaggcccgtaggctgcaagtgggaaaacccgccacattgccttgaaatcactcccccttcctcagagaagctggtctctgtgatgcgactaagcgacctgtcaaccgaggatgacgactccggacactgtaagatgaatagatacgataagaagatcgactccctgatgaatgccgtgggctgtctcaagtctgaggtcaaaatgcaaaaaggagagcgccagatggccaagcgctttttggaggaacgtaaggaggaactcgaggaggtagcacacgagctggcggagaccgaacatgagaataccgtgcttcgtcataatatcgagagaatgaaggaggaaaaggactttaccatccttcagaaaaagcatcttcagcaagagaaagaatgccttatgtcaaaactcgtggaggcagagatggatggtgccgcagccgctaagcaggttatggccctgaaggacaccatcggtaagctgaaaacagaaaagcagatgacctgtaccgacatcaacacgctaactcggcagaaggaattgctactgcagaagctgtctacctttgaggaaacgaaccgaaccttgcgggacctgttgcgcgaacagcactgtaaggaggacagtgaacgcctgatggaacaacagggcgctctgctgaagcgtctggcagaggccgactccgagaaagccaggctgctgctcctgttacaagacaaggataaagaagtggaggagctgctgcaggaaattcaatgcgaaaaggctcaggccaaaaccgcatctgaattgagtaagtcaatggaaagcatgaggggccacctgcaggcccagctgcgtagtaaagaggccgagaactcaagactgtgtatgcaaatcaagaacttggaacgttcaggtaaccaacacaaagccgaggtggaggctattatggagcagctgaaagagttaaagcaaaaaggcgacagggataaggaaagtcttaagaaggccattagagctcagaaagagcgagctgaaaagagtgaagagtatgcagagcagctccatgtccagctggccgacaaggacctatatgtggctgaagctttatccactttggaaagctggcgatcaagatacaatcaggtggtgaaggaaaagggcgacttggagcttgagatcatcgtgctgaacgaccgagttactgatctggtcaaccaacagcaaaccctggaagagaaaatgcgtgaggacagagacagcctggtggagagacttcatagacaaacagcagaatacagcgcgttcaagctggagaatgagcggttaaaggcttccttcgcccctatggaggacaaattgaaccaggcgcatctggaagtgcaacagctcaaggccagcgtcaagaattatgaaggaatgatagacaattacaaatcacaggtaatgaagacaagacttgaagcagatgaagtcgccgcacagctggagcggtgcgacaaggaaaacaaaatcctgaaggatgaaatgaacaaggaaatcgaagccgcacggaggcagttccaaagtcaactggccgatctgcagcaactaccagacattttgaagataactgaggctaagcttgcggagtgtcaggaccaattacaggggtacgagcgcaagaatatcgatctcaccgctattataagtgatctgaggagccggatagagcatcagggcgacaagctggaaatggccagggaaaagcatcaggcttcccagaaggaaaacaaacagctctctctgaaggttgacgagctggaacgaaagctggaggccaccagtgcccagaacatcgaatttcttcaggtcattgcaaaaagggaggaggctattcaccagtctcagctcagactggaagaaaagacaagggaatgcggaacgttagcacgtcaattggagtctgctattgaagacgcacggaggcaagtcgaacagacaaaggaacatgcgttgtctaaagaacgggctgcacagaataaaattttggacctggaaacccaattgtcccggacaaagactgagttatcgcagctgcgcagatcccgtgacgacgcagacaggagatatcagagcaggcttcaggatttaaaagatagactggagcaaagtgaatccacgaatcgctccatgcagaattacgtgcagttcttaaagagcagctacgcaaatgtcttcggagacggcccatatagtacgttcctgactagttcccccattcgctctcggtccccaccggcttag

SEQ ID NO: 233712 - DNA, 1917 bp, synthetic construct
  misc_feature 1..1917: note = Description of Artificial Sequence: Synthetic coding sequence
  source 1..1917: mol_type = other DNA
atgtccgccagttcttcgggagggagtcctaggttccccagttgcggaaagaatggagtgacaagcctgacccagaaaaaggtcctgcgagcgccatgcggagcaccctctgttactgtcaccaaatcacataagcgaggcatgaagggagataccgtaaatgtgcggaggtctgtgagggtcaagactaaaaacccgccacactgcctggagataacacctccttcctcagaaaaattggtcagcgtaatgcgattatccgatctaagcaccgaagatgacgattcggggcattgcaagatgaataggtacgataaaaagattgacagcctgatgaacgccgtcggttgtcttaagagcgaagtaaagatgcaaaagggggaacggcagatggcaaaacggttcttggaagagcggaaggaagagctcgaggaggttgcccacgagctcgcggagaccgagcacgagaatactgttctgcgccataatatcgagcgcatgaaggaagagaaggactttacaatcctacagaagaagcacctccagcaggagaaagagtgcttaatgtctaagttggtggaagctgaaatggacggcgctgcggctgccaagcaggtcatggccctgaaagacaccatcggaaaactgaagactgaaaagcagatgacttgcactgacatcaataccttgacgagacaaaaggaactcctcctgcagaaactgagcacattcgaagaaacaaatagaactctccgggacttactgcgagagcagcattgcaaagaggacagcgaacggcttatggaacagcagggcgcactgttgaaacggctcgcggaagctgacagtgagaaagcccgtctgctgctactgctgcaagacaaagataaggaagtggaagagctgttgcaagagatccagtgtgaaaaagcccaggcgaagactgccagcgagctctccaagagcatggaatcaatgcggggtcacctgcaagcccaactgcgatccaaggaggccgagaactctcgtctttgcatgcagatcaagaatctggaacgcagcggcaatcagcacaaggcagaagtagaggcaatcatggagcaattgaaggagcttaaacaaaagggcgatcgagacaaagaatctctgaagaaggcaattcgggctcagaaggaaagggctgagaagagcgaggagtatgcagagcagttacacgtgcagttggcggacaaagacttatacgttgcggaggctctgagtacacttgagagttggagatcccggtataatcaagtcgtgaaagaaaagggcgatctggagctggaaataatcgtgctgaacgaccgggtgaccgatctggttaaccagcagcaaacccttgaggaaaagatgagggaggatagggattcactggtcgagcggcttcacaggcagactgctgagtatagcgctttcaaactggaaaacgagcgactaaaggcctccttcgcccctatggaggataagctgaaccaagcacatttggaggtgcagcaacttaaagcttcagtgaagaattacgaagggatgatcgacaactacaagtctcaggttatgaaaacaaggcttgaggccgacgaggtcgccgcacagctggaaagatgcgacaaagagaacaagatccttaaggatgagatgaacaaagagattgaagcagccagacgacagttccagagtcagcttgccgacctccaacagttaccggatattttgaaaatcactgaagccaaactggctgagtgtcaggaccagcttcaggggtatgagcgtaagaatattgacttgacagcgataataagcgatctacggagtcgagtccgagactggcagaaagggagccacgagctcacgagggctggagcacgaattccacggtag

SEQ ID NO: 233713 - DNA, 2490 bp, synthetic construct
  misc_feature 1..2490: note = Description of Artificial Sequence: Synthetic coding sequence
  source 1..2490: mol_type = other DNA
atgtccgcttcctcttctggaggcagtcctagattccctagctgtggcaaaaatggcgtgacctcactcacacaaaagaaggttctcagagctccttgtggagcccctagtgttactgtcacaaaaagccacaagcggggaatgaaaggagatacagtaaacgttcggcgaagtgtcagggtgaagaccaaggtgccctggatgccccctggtaaatcgagcgcacgaccagtcggctgtaagtgggaaaatcctcctcattgcctggagatcacccctcccagttccgaaaagctggtttccgtgatgcgactcagcgatctgtcaacggaggacgatgacagcggtcactgtaaaatgaaccggtacgacaagaagatcgactctcttatgaatgctgtggggtgtctcaagagcgaggtcaagatgcagaagggcgagaggcagatggccaaacggtttctcgaggagcgaaaggaagagctcgaagaggtcgcccatgagctggcggaaacagaacatgaaaataccgtccttcggcacaacatcgagcggatgaaggaggagaaagattttacaatcctccagaagaagcatctccaacaggagaaggagtgccttatgagtaaactggttgaggcggagatggacggcgctgccgctgcgaagcaggtcatggctctcaaggacacaatcggaaagttgaagaccgaaaagcaaatgacgtgcactgacatcaacacattaacaagacagaaggaattactactgcagaagctgtcaaccttcgaggagactaaccggacactccgcgatctgctgagggagcagcactgtaaggaagactccgaacggctcatggagcagcagggcgcactgttgaaacgactggctgaggccgatagcgagaaggcgcgtcttctgttactcctccaagacaaggacaaggaggtggaagaactgctccaggagattcaatgtgagaaagcccaagccaaaactgcaagcgagctctcgaaatcaatggagagtatgaggggacatctacaggctcagttgaggtctaaagaggctgagaattcaagactctgtatgcagatcaaaaatctcgagaggagtggaaaccagcacaaagccgaagtggaggcgatcatggagcagctgaaggaactaaagcagaagggtgacagagacaaggagagtctcaagaaagccatacgggctcaaaaagagagggccgaaaaaagcgaagaatacgccgagcagctccacgtgcagctcgctgacaaggatctttacgtcgccgaagcactgagcacgcttgagtcctggaggtcacgctataaccaggtcgtgaaagaaaaaggcgatttggagcttgaaattattgtgcttaatgacagggtgacagatttagtgaatcagcagcagacacttgaggaaaaaatgcgcgaggacagagacagcctggtagagagactccacaggcagacggcagagtattccgctttcaaactcgagaacgaacgcctgaaggctagctttgctccaatggaagataagctcaaccaagctcatttagaggtccaacaacttaaggcctcagtcaagaactatgaggggatgatagataattataaatcccaagtgatgaagactcggctggaagcggacgaggtcgctgcccagctcgaacgatgtgataaagagaataagatcctgaaggacgaaatgaataaggagattgaggctgccagacgacaattccagagccagttggcagacctacaacaactcccggacattctcaaaataacggaagccaagctcgcagaatgtcaggaccagttacagggctatgaaagaaagaacatagacctgaccgcaatcatctccgatcttcggtccagaatagaacatcagggtgacaagctggaaatggcacgagaaaagcaccaagccagtcaaaaagagaataagcaactaagcctcaaggtggacgagttggaacggaaactcgaagccacatcagctcagaacatcgaatttctgcaagttatcgcaaagcgggaggaggctattcaccaatctcagttacgtctggaggaaaagacacgagagtgcggaacattagccagacagctggagagcgccatagaggacgctaggagacaggtggaacaaacaaaagagcacgccctgtcaaaggagcgcgcagcgcagaacaaaatccttgatctcgaaacccaactttctaggaccaagacagagcttagccaattgcgtaggagcagagacgatgcagataggagataccagtccagactgcaagatcttaaagaccgtctggagcagagcgaatccaccaacagaagcatgcaaaattatgtccagtttctaaagagttcctacgccaatgtctttggcgacggcccttactctacctttcttacctcatcgcctattcgcagtagaagtccaccggcatag

SEQ ID NO: 233714 - DNA, 2106 bp, synthetic construct
  misc_feature 1..2106: note = Description of Artificial Sequence: Synthetic coding sequence
  source 1..2106: mol_type = other DNA
atgggcgagcttccgaccggatgccgaaaaagaagacgcaaaagaggcggagccgctgcccgtgcccgtttgcaccctccacgcagactgcatgggacaactttagcctccgatttcaacgactttattaggagacgtttttgggcacaaccatgcaggtcttggttcccttcttgcgggaagaacggagtgaccagtctcacgcaaaagaaagttctgcgagccccttgcggagctccctctgtgactgtgaccaaatctcataagcggggaatgaaaggggacaccgttaacgtgcgaagatcagtgagggtaaagaccaaggttccgtggatgccgcctgggaagagctctgcccgtccagtgggttgcaagtgggagaatcctccccattgtctggaaatcactcccccttccagcgagaaacttgtgtccgtaatgcgcctgagtgacctgtcaactgaggacgacgactccggtcactgcaagatgaatcgttatgacaagaagatcgattcactgatgaatgctgtggggtgtttgaagtccgaagttaagatgcagaaaggagagcgccagatggcaaagcggtttctggaggagcggaaagaggaattagaagaagtggcccacgagctggcggagacggagcacgaaaataccgtgctccgtcataacattgagagaatgaaggaggagaaagacttcaccatcttgcagaagaaacacctgcagcaggagaaggagtgtctgatgagtaagctggttgaagccgaaatggacggagccgcagctgccaagcaggttatggccttgaaagacacgattggtaaactcaagaccgaaaaacagatgacgtgtaccgatattaacaccttgacgagacaaaaagagctgctcctgcagaagctatctacatttgaggaaactaatcgtaccctcagggacctgctcagggagcagcactgcaaggaagactctgaaaggctgatggagcaacagggagccctgttaaagcgcttggctgaggccgattccgaaaaggcacgccttttgctccttttacaggacaaggataaggaggtggaagagttgctgcaggagattcaatgtgaaaaggcacaagcgaaaaccgcctccgaactcagcaagtctatggagagcatgcggggtcatctgcaggcacaattgagaagcaaagaggccgaaaattcacgactttgtatgcagatcaaaaacttggagagatccgggaatcaacataaagcagaagtggaggcaatcatggagcagctcaaagagctgaaacagaagggggaccgcgacaaagagagtttgaaaaaagccatcagagctcaaaaagagcgggcagaaaaaagcgaggagtatgcggaacagctccatgtgcagctggcagataaagacctttatgtggcagaagctctttcaaccctggagtcctggcgatctagatacaatcaggttgtgaaggagaaaggagacctggagctggaaatcatcgttcttaacgacagagtgacagatttagtgaaccaacagcaaacgcttgaggagaaaatgcgggaggaccgggattccctagtcgaaagactgcaccgccagaccgcagagtattccgctttcaagctagagaatgagagactcaaagcatcatttgccccaatggaagacaagctcaatcaggcccacttggaggtacagcagcttaaagcatcagtgaagaattacgaaggcatgatcgataattacaagtctcaggtgatgaagacccggctggaggctgacgaggtcgccgcacaactggaaagatgtgacaaggaaaacaagatcctgaaagatgagatgaacaaggaaattgaggccgcacgtagacaattccagtcgcagctggctgatcttcaacagcttcccgatatcctgaaaatcaccgaggctaagctggcggagtgccaggatcagctccagggctatgaacgtaagaatattgacctcacagccatcatttccgatttgcgttctagggtgagggattggcagaaaggtagtcatgaactcacacgggcaggagctcggattccacgttag

SEQ ID NO: 233715 - DNA, 1974 bp, synthetic construct
  misc_feature 1..1974: note = Description of Artificial Sequence: Synthetic coding sequence
  source 1..1974: mol_type = other DNA
atggccgaccaacagggccctcaccagaacaggtttccctcttgcggaaaaaatggtgtcaccagcctgacccagaaaaaagttttgcgggctccctgcggcgcacctagcgtgaccgttactaagtcacacaagagaggtatgaagggcgatacagtgaatgtgcgcagatccgtcagggtgaaaacaaaggtcccgtggatgccaccagggaagagctctgccagaccagtaggttgcaaatgggagaaccctcctcactgcctcgaaattacccctcctagctcagagaaactggttagcgtgatgaggctgtcagatctaagcacagaagacgatgacagtgggcactgtaagatgaaccgatatgataagaaaatcgacagtctaatgaatgccgtgggctgtctgaaatcggaggtgaagatgcagaaaggagaacgccagatggcaaagaggtttctcgaagaacgtaaggaggagctcgaggaagtggctcatgagctcgccgagacagagcacgagaataccgtcctgcgacataatatcgagcgcatgaaagaggagaaggatttcactattctgcagaagaaacatctgcaacaagagaaggagtgtttgatgtcaaagctggtggaagctgaaatggatggggctgcagccgcaaagcaagtcatggccttgaaggacaccattggcaaattaaaaaccgagaagcagatgacgtgcacagatataaacactttgacccgccaaaaagagcttttgctccagaaacttagtacatttgaggagacgaatcgaaccctacgggatctactgcgggagcagcattgtaaggaggatagtgaacgactgatggaacagcagggcgcactgttgaagagactggcagaggccgactccgaaaaagcacgcctattactgctcctgcaggacaaagacaaggaagtggaggaacttctgcaggagatccagtgtgaaaaagctcaggctaaaacagcatccgagttgagcaagtcgatggagtccatgcgtggacacctgcaagcacagctgaggtccaaggaggctgagaatagtcggctctgtatgcagattaaaaacttggagcggtctggaaaccagcacaaggcggaagtagaagccatcatggaacagcttaaagaactgaaacaaaaaggcgacagggataaagagtctctgaaaaaggctataagagctcagaaggaacgagcagaaaagtcagaagagtacgcagagcagctgcacgtccagcttgctgacaaggacctttacgtggcagaagcgttgagcactctggaaagttggcggagccggtacaaccaagtagttaaggagaaaggcgacttagaattagagattatagtcctgaacgacagagtgacagatctggtgaaccagcagcagaccctggaagaaaagatgcgggaggatagggactctctcgtcgagcggctgcatcgtcagacggccgaatattctgcatttaaactggaaaacgaacggctgaaggcatcgtttgcccctatggaggacaaactgaaccaagcacacttggaggtacaacagctaaaggcttcagtcaaaaactacgagggaatgatcgacaattacaagagccaagttatgaagacaagactggaagctgatgaggtggcagcccagctggagagatgtgacaaggagaacaagatcctgaaggacgagatgaacaaggagatcgaagccgcaaggagacagtttcagagtcagctcgctgacctccagcagctgccagatatcctcaaaatcacggaggctaagctggctgagtgccaggaccagctccagggttatgagcgcaaaaacatagatttgaccgccataatttccgatctgcggagtcgcgtgagagactggcagaagggttcccatgagttgaccagggccggagccagaattcccaggtag

SEQ ID NO: 233716 - DNA, 570 bp, synthetic construct
  misc_feature 1..570: note = Description of Artificial Sequence: Synthetic coding sequence
  source 1..570: mol_type = other DNA
atgaaggacaggtcatccacaccacctctgcacgttcatgtggatgagaacactccagtccatgtgcacatcaaaaaactcccaaaaccgagcgctacttcttcacaaaagtcccataaaagaggcatgaaaggagataccgtcaacgtgcgtcgaagtgtgcgggtgaagacaaaggttaagatgcaaaaaggggaacggcaaatggctaagaggttccttgaagagagaaaagaggagctagaagaagtggctcacgaactagccgagacagagcacgaaaacactgtgctaaggcacaacatcgaacgaatgaaggaggagaaggacttcactatactccagaaaaaacacctgcagcaggagaaagagtgcttaatgtccaagctggtggaggcagagatggacggcgctgccgcagcaaaacaagtcatggctctcaaagatacaattggaaaactcaaaacagagaagcagatgacttgcactgatattaacactctgactagacagaaagaactccttctgcagaaactgtccacattcgaagagacaaaccggacactatag

SEQ ID NO: 233717 - DNA, 618 bp, synthetic construct
  misc_feature 1..618: note = Description of Artificial Sequence: Synthetic coding sequence
  source 1..618: mol_type = other DNA
atgtctgcctcttccagcggaggatccccaagattcccatcctgcgggaagaacggcgttacttccctgactcagaagaaggtgcttcgcgcaccatgtggggctccatcagttactgtcaccaagtcgcacaaaaggggtatgaagggagatacagttaatgttcgacggtccgtcagggtgaaaactaaggtgaaaatgcaaaaaggagaacgtcaaatggcaaaaaggtttctcgaagaacgtaaggaagagttggaagaggtggcccacgaattagcagagaccgaacatgagaacaccgttctccgccataatatcgagcgcatgaaagaggagaaagactttactatcctgcagaagaaacacctgcagcaggagaaggaatgtctcatgtccaagctcgtcgaggccgagatggacggtgcggcagctgctaaacaggtaatggccctgaaggatacaatcggaaagctcaagaccgaaaagcaaatgacttgtaccgacataaacaccctcacaaggcagaaagaattactcctacagaagctttcaacatttgaggaaacgaaccgtactcttagagacctgctccgggagcaacattgtaaagaatag

SEQ ID NO: 233718 - DNA, 543 bp, synthetic construct
  misc_feature 1..543: note = Description of Artificial Sequence: Synthetic coding sequence
  source 1..543: mol_type = other DNA
atgagcgcatcatcttcaggaggcagccctagatttcctagttgcggaaaaaacggcgttacaagcctgacacagaagaaggttctacgtgccccatgcggcgcacctagcgtgaccgtgacaaagtcccacaagcgcggaatgaagggagataccgtcaatgtgagacgcagtgtgcgagttaaaactaaggtcccatggatgccacctgggaaatccagcgccagaccagtgggttgcaagtgggagaacccgcctcattgtctagaaatcacccccccatcctccgagaagttggtgtctgtaatgagattgagtgatctctccactgaagatgatgattctgggcattgcaaaatgaatagatacgacaaaaagattgactctttgatgaatgccgtaggctgtctgaagtctgaagtcaaaatgcagaaaggggaacgtcaaatggctaagcgcttcttagaggaaagaaaagaagagcttgaagaggtggctcatgagcttgcggaaaccgaacacgaaaacaccgttctccgctag

SEQ ID NO: 233719 - DNA, 648 bp, synthetic construct
  misc_feature 1..648: note = Description of Artificial Sequence: Synthetic coding sequence
  source 1..648: mol_type = other DNA
atgaaagatagatccagcaccccccctctccacgtccatgttgacgagaatactccggtccatgtgcacatcaagaaactgccgaagccctccgcgacctcatctcagaagtcgcataaacggggtatgaagggcgatacagtgaatgttcgccgatctgtgcgtgtcaagaccaagaatccccctcattgtctggagatcaccccaccttcgagcgagaagctggttagcgtgatgcgtctttctgacttatctacagaggatgatgacagcggccactgtaaaatgaataggtacgataaaaaaattgacagtctgatgaatgccgtggggtgcttgaagagcgaggtgaaaatgcagaaaggggagagacagatggccaaaagatttctcgaagagagaaaggaggaactcgaagaagttgcacacgaactagccgagacagaacacgagaataccgtgttacggcacaatatcgaaaggatgaaagaagaaaaggacttcactattctgcagaaaaaacacttgcagcaggagaaagaatgcctgatgagtaaactggtagaggccgagatggatggcgctgcggctgctaagcaggtgatggcccttaaagacacaataggcaagctgaagactgtcggctag

SEQ ID NO: 233720 - DNA, 471 bp, synthetic construct
  misc_feature 1..471: note = Description of Artificial Sequence: Synthetic coding sequence
  source 1..471: mol_type = other DNA
atgtcagctagctcaagcgggggatctcccaggttcccatcttgtggaaaaaatggcgtgacttccttaacgcagaagaaggtgttgcgggcaccttgtggcgctccatctgtgaccgtgactaaatcacacaagcgcggaatgaagggcgatacagtaaatgtcagaagatctgttagggtgaagaccaagaacccccctcattgcctggaaattacgcccccttcatctgagaaattggtgtctgtcatgcggttgtctgatctgtcaacggaagacgatgatagcggccactgtaaaatgaaccggtatgataaaaagattgattccctgatgaatgctgttggttgcctgaaaagcgaagttaagatgcagaagggagagcgccagatggccaaacggttcttggaggagcggaaagaagagctggaagaggtggcgcacgagctcgcagagacggagcatgagtag

SEQ ID NO: 233721 - DNA, 1731 bp, synthetic construct
  misc_feature 1..1731: note = Description of Artificial Sequence: Synthetic coding sequence
  source 1..1731: mol_type = other DNA
atgaaggaccgctctagcacacctcctctccatgtacacgtggacgagaacaccccagtgcacgttcatattaaaaagttgccaaagcccagcgccaccagcagccagaagtcgcacaagagaggcatgaagggcgacacagttaacgttaggcgctccgtgcgtgtaaagaccaaggtgaaaatgcaaaagggagagcgtcaaatggcaaagcgctttttggaagagcgcaaggaagaactggaggaggtggcccacgagttagcagaaaccgagcacgaaaatactgtcctgcggcataacatcgagcgcatgaaagaggaaaaagactttaccatactccagaagaagcatctgcagcaggagaaggagtgcctaatgagtaaattagtcgaagctgagatggatggagcagcagctgcaaagcaagtgatggctctgaaagacacgataggcaagttgaagactgagaagcaaatgacatgtacggacatcaatactctgacacggcagaaggaattactcctccaaaagctatccacctttgaggaaacaaatcgaaccctgagagatttgctccgtgagcagcattgcaaagaggatagcgagaggctcatggagcaacagggcgcacttctaaagcggctggccgaggccgattctgaaaaggcaaggctgttgcttctgctgcaggataaggacaaagaagtggaggaactgctgcaggaaatccagtgcgaaaaggctcaagctaagactgctagcgagctgagcaaatctatggagagtatgcggggacaccttcaagcccagctgaggtctaaagaggccgagaactcgcggctttgcatgcagatcaagaatctggagcgttcggggaaccagcataaagcagaagtcgaggccatcatggaacagcttaaagaactgaaacagaagggagaccgcgacaaggagagcctgaaaaaagctatacgcgcacagaaggagcgggctgaaaaaagcgaggagtacgccgagcaactgcacgtccagctggccgataaggacctatacgtggctgaagcgttatcgacactcgagagttggcgctctcgctataatcaggtggtcaaagaaaaaggtgacctcgaacttgaaatcatcgtcctaaacgatcgagtcaccgacttggtgaaccagcagcagactctagaggagaaaatgcgagaggatcgagatagcctagttgagcgtttacaccgccagaccgcagaatacagtgccttcaagctcgagaacgagaggttgaaggcatcttttgccccaatggaggataagcttaaccaggcacatctggaggtgcagcagctgaaggcttctgtcaagaactatgaaggaatgatcgacaattacaagagtcaagtgatgaaaacacggctagaggctgatgaggttgcggcacagctggagaggtgcgacaaggagaacaagatcctcaaggatgaaatgaacaaggaaatagaagcagcaaggagacagtttcagtcccagctcgccgatctccagcaacttcctgatattcttaaaattacggaggctaagctggcggaatgtcaggatcagctccaaggatacgagcgaaagaatattgatctgacggccattatctctgacttgaggagcagagtgcgggattggcagaagggctcacacgaattaacaagagctggggcacggatcccacgctag

SEQ ID NO: 233722 - DNA, 444 bp, synthetic construct
  misc_feature 1..444: note = Description of Artificial Sequence: Synthetic coding sequence
  source 1..444: mol_type = other DNA
atgaaagatcgaagcagcactccccctcttcatgttcacgtggacgagaacacacctgtccacgtgcacatcaaaaagctgcccaagcctagcgcgacgtcctctcagaaatctcacaaacggggaatgaaaggagatacagtgaatgttagaaggagcgtgagggtgaagactaaagtcccttggatgcccccagggaagagttccgcacggcctgtgggctgcaagtgggaaacatctgaagagacgcccaccaccggcgaaggcgtgccgcacgtgcaggcgggagggggtgggaatggctggggctgcgggtgtcaagcaggacacggcctggagggctaccacagagaggccgagaatcgcgagactaatgacctgcatggacaccagcacccagacaaggctgagggcacgagcccggcagaggcggaacacatttag

SEQ ID NO: 233723 - DNA, 1917 bp, synthetic construct
  misc_feature 1..1917: note = Description of Artificial Sequence: Synthetic coding sequence
  source 1..1917: mol_type = other DNA
atgggacgcaatagatatccccctgcctgctggtttccaagttgtggcaaaaatggagtgacctctctgacgcaaaagaaagtcctccgggctccttgtggagccccaagcgtaaccgtgactaagagtcataaacggggtatgaaaggagatacagtcaatgtacgtagaagtgtaagggttaaaactaagaacccgccacattgccttgagataactccgccaagtagtgaaaagctcgtgagcgtgatgcgcttatccgacctctctacggaggacgatgattctggacactgtaagatgaaccggtatgacaaaaaaatcgactctctaatgaacgctgtaggctgtctgaagtcagaagtaaaaatgcagaaaggggaacgccagatggctaaacgtttcctggaagagcgaaaagaagagcttgaagaagtggctcacgagctggccgaaaccgagcatgaaaacactgtgctccgccacaatatcgagcggatgaaggaagaaaaagattttactattctgcagaaaaagcacctacaacaggagaaagaatgtctgatgtcaaagctggtcgaagccgagatggatggcgctgccgcagccaagcaggtgatggcactgaaggatacgatcggaaagctgaagaccgagaagcagatgacttgtactgatataaacacgctaactagacagaaggagctcttgcttcagaagctctccacgttcgaggagacaaatcggacccttcgcgacttgctccgcgagcaacattgcaaggaagacagtgagcggttgatggaacagcagggggcactcctgaaacgtcttgctgaagcggactccgagaaagccagactgcttttgttactgcaggacaaggataaggaagtggaagaactgttacaggagatacagtgtgaaaaggcccaggccaagaccgccagcgagctgagtaaatctatggaatccatgcgaggccacttacaggcccagctcaggtccaaggaagcggagaattcccgcctctgcatgcagattaaaaatctggagcgctccggtaaccaacacaaggctgaggtggaggctatcatggagcagctgaaggagctaaaacaaaaaggagatcgagataaagaaagcctgaagaaagccatcagggctcagaaggagagagcagagaagagtgaggagtacgctgagcagttacacgtgcaactagccgataaggatctttatgtcgctgaggctctctcaaccctcgagtcctggagaagtcggtacaaccaggtagtgaaagaaaagggggacctcgagcttgaaatcatcgttctaaacgaccgcgtgactgacctggtcaaccaacagcagaccctcgaggagaaaatgcgggaggaccgcgatagcctggtcgagaggctccaccgacagaccgccgagtatagtgcgttcaagctggagaacgagcgccttaaagcttcttttgcccctatggaggataagcttaaccaggcgcatttggaagtccagcagcttaaagcctccgtgaagaactacgagggaatgatcgacaattataagtctcaggtgatgaagacccgcttggaggccgatgaggtcgcagcccagctggagagatgtgacaaggagaataagattctgaaggacgaaatgaataaggagattgaagccgctcgcaggcagttccagagccaattagctgatctgcagcagctccccgacatcttaaagatcacggaggccaagcttgctgagtgccaggatcagcttcaggggtacgaaaggaaaaacatcgatctcacggcgatcattagcgatctccgctctcgggtacgtgattggcagaaagggtctcacgaattgacacgcgcaggcgcacgcatcccacggtag

SEQ ID NO: 233724 - DNA, 765 bp, synthetic construct
  misc_feature 1..765: note = Description of Artificial Sequence: Synthetic coding sequence
  source 1..765: mol_type = other DNA
atgacggaggaggtgtggatggggacatggaggcctcaccggccaagaggaccaattatggctctgtactcttcccctggacctaagtatctgatcccccctactactggctttatgaaacacaccccaacaaagcttcgagctcccgcttacagttttcgaggcgctcctatgttacttgccgaaaactgtagtccgggacccaggtataacgtaaaccctaagattctgagaacgggaaaagatctggggccagcatactccattctggggagatatcagaccaagacgatgctaactccaggacccggtgattattttccggagaaaagcactaagtacgtgtttgactctgctcctagccactcaatcagtgccaggacaaaggcgttcagagtcgactccactccaggcccagctgcctatatgctccctatggttatgggcccaaacacagtgggcaaggctagccaaccgtcattcagcattaaagggcgttctaaacttggcggattctccgacgatcttcataaaaccccgggaccagccgcttaccgacaaaccgacgtgagagtgactaagttcaaggcaccccagtacacaatggccgctcgagtcgagccacccggtgacaaaacgctgaagcccggacctggagcccacagtcctgagaaagtaaccctgaccaaaccttgcgctccagtcgtgacatttggaatcaaacactcagactatatgacaccacttctcgtggacgttgagtag

SEQ ID NO: 233725 - DNA, 417 bp, synthetic construct
  misc_feature 1..417: note = Description of Artificial Sequence: Synthetic coding sequence
  source 1..417: mol_type = other DNA
atgacagaggaggtctggatgggtacatggagaccccaccgcccaaggggacctatcatggcgctgtattcttctccaggtcctaaatatctgattcctcccacaacgggcttcatgaagcacactccgacgaaattgcgtgcacctgcctatagtttcaggggggcacccatgctgcttgccgagaactgttctcccggacccaggtataatgtcaatcccaaaatactgagaaccggtaaagacctcggtccagcatacagcattctagggcgataccagaccaagacaatgctcacaccaggaccagctctgaagtcggcgtttccttcatggacacccccagatcccacttggtctcccccagtgctggagccccgtggccctacaccacgcatgctcggatctcccccatag

SEQ ID NO: 233726 - DNA, 375 bp, synthetic construct
  misc_feature 1..375: note = Description of Artificial Sequence: Synthetic coding sequence
  source 1..375: mol_type = other DNA
atgaccgaggaagtatggatgggaacctggcgccctcacaggcctcgcggacctatcatggcgttatactcatcaccaggacctaaatacctgatcccaccaaccacggggttcatgaaacataccccaacaaaattgcgcgctcctgcttatagcttcagaggcgcacccatgctcctggcagaaaattgttcccccccaaatactgtcgggaaggctagtcagccttcttttagcattaaaggtaggagtaagctaggcggatttagcgatgacctccacaaggtcacgctgaccaagccctgcgcccctgtggtgacttttggtatcaagcatagcgactacatgacgcctcttctggtcgacgtggaatag

SEQ ID NO: 233727 - DNA, 774 bp, synthetic construct
  misc_feature 1..774: note = Description of Artificial Sequence: Synthetic coding sequence
  source 1..774: mol_type = other DNA
atggacgccgaatacagtggcaacgagtttccaaggtctgagggagagcgagaccagcatcagcgccctggcaaggaaaggaaatccggcgaagcaggatggggaacaggggagctaggacaggacggcaggctgttgagcagtacgctgtccctgagttccaaccggtctctgggtcagaggcagaatagccccttaccctttcagtggcgcattacacacagttttaggtggatggctcaggtcctggcgtcagagctgtctttagtggcattcatcctgttactagtcgtagctttcagcaaaaaatggctggacctgagccgatccctcttttaccagaggtggcctgtggacgtgagtaataggatccacacctccgcacacgtgatgtctatgggtttgctgcatttttataaaagccgaagttgttctgacttggagaacggcaaagtgacatttatttttagcactctgatgctgtttcccatcaatatttggatctttgagcttgaaagaaacgtgagtataccgattggctggagctacttcatcggatggctcgtcttgatcctgtattttacttgcgccatcctctgttatttcaatcacaagtcgttttggagccttatcctgtctcatccttccggcgctgtaagctgctcttcatcctttgggtctgtcgaggagagtccacgagcccagacaatcaccgacacacctattacgcaggaaggtgtgctggaccccgagcagaaggacactcacgtctag

SEQ ID NO: 233728 - DNA, 1488 bp, synthetic construct
  misc_feature 1..1488: note = Description of Artificial Sequence: Synthetic coding sequence
  source 1..1488: mol_type = other DNA
atggtaacctggttgtatagatttctgcctacgtctaatatggccgcaaaacttagatctctgttgcctccggacttgaggcttcagttttggctgcacgcccgactacagaaatgtttcctctctaggggatgcggtagttattgcgccggtgctaaggcgagccctctgccaggcaagatggcgatgggcctcatgtgtggcaggagagagcttctgagactgctacagagtgggcgtcgagtgcattccgtcgcgggaccctcccaatggttgggaaaacccctaacaactagactgctttttcctgctgccccatgctgttgccggccacactacctgttcctcgccgcttctggtcccaggagcctctctacctccgcaatatcttttgccgaggttcaggtacaggcccctcccgttgtggcagccacccccagtccaaccgctgttcctgaagtggcttccggagaaacggccgacgtggtccagaccgctgccgagcagtcctttgctgagctcggcctcggaagctacactcctgtaggtttgatccagaatctcctagagttcatgcatgttgatcttggcttaccgtggtggggagccatcgctgcgtgtaccgtgttcgcgaggtgcctaatcttccccctgatcgtcactggccagagggaggcggcacgcattcacaatcatctccccgagatacaaaagttcagctcacgcattcgggaagccaagctcgcaggcgatcacatcgaatactacaaggcaagctcagagatggccctgtaccagaaaaaacatggtattaaattatataagcccctgatcctgccagtcacccaggcgccaatttttatcagcttcttcattgcgcttcgagagatggccaacctccctgtgccgagcctgcagactgggggtctgtggtggtttcaggacctcacagtgtctgatccgatatatattctgccactggcagtgacagccacaatgtgggctgttttggaactcggcgcagaaactggcgtgcaatcttctgatcttcagtggatgcgaaacgttatcaggatgatgccgcttatcacattaccaatcacgatgcactttcccacggccgtgttcatgtactggctgtcatcaaatctgttcagtctggtgcaggtctcttgcctgagaattcctgccgtcaggacagtgcttaagatcccacaacgggtcgtgcacgacttagacaagttgccgccacgtgagggctttctggaaagcttcaagaagggatggaagaatgccgagatgaccagacagctcagggagagggaacagcggatgagaaatcagcttgagcttgcggctcgcggacctctgcgccagacatttacgcataatcctctgctccagccaggaaaggataatcctccaaacatacccagcagctcatcaaaaccaaaatctaagtacccatggcacgatacactcgggtag

SEQ ID NO: 233729 - DNA, 1260 bp, synthetic construct
  misc_feature 1..1260: note = Description of Artificial Sequence: Synthetic coding sequence
  source 1..1260: mol_type = other DNA
atgcgcggtactcaggtgcattcggtggccggtccttcacagtggctcggcaagcccttgacgacaagactcttgtttcccgcagctccttgctgctgtcgaccacactacctgtttctggccgcttctgggcctagatcccttagtacaagcgccatctcattcgccgaagtgcaagtccaggctcctcctgttgtggcggctacccctagtcccactgctgtaccagaagtcgcgtcgggtgagaccgccgatgtggtgcagaccgcggctgaacaaagcttcgctgaactcggacttggaagctatactccagtgggcctaatacagaacctgctcgaattcatgcatgtggacctcggcctaccctggtggggggcaatagccgcatgcaccgtgtttgccagatgtttaatctttccccttatcgtgacaggacagagggaggccgcacgtatccataatcatttacctgaaatccagaagttctcttcacggatccgcgaggccaagttagccggagatcatatagagtactacaaagcttcttccgaaatggctctttaccagaagaagcacggaatcaagctgtacaaaccgctgatccttccggtaactcaggctccaatttttataagcttcttcatagcactacgagagatggctaacctgcccgtgccctctttacaaaccggcggtctgtggtggtttcaggatctgactgtaagcgacccaatttatattctgcccctcgcagtcactgccaccatgtgggccgtattagagctgggcgcagagaccggggtgcaatcttctgatctgcaatggatgaggaacgtcattcgcatgatgccccttatcacacttcccattactatgcatttccctacagcagtctttatgtattggctgtcatcaaatttgttcagccttgtgcaggtctcatgcctgcggatccctgccgtgaggaccgtgcttaaaatacctcaaagggtagtgcatgatctagacaagttgccaccacgagaaggattcctggaatccttcaagaagggatggaagaacgctgaaatgactaggcaattgcgggagagggagcagagaatgaggaatcagctggagctggcggcaagagggcctttgcgccagacgttcacacacaatcccctgctgcaacccggaaaggacaatcctcccaatattccatcctccagttcaaagcccaaatctaagtacccatggcacgacactctcggatag

SEQ ID NO: 233730 - DNA, 732 bp, synthetic construct
  misc_feature 1..732: note = Description of Artificial Sequence: Synthetic coding sequence
  source 1..732: mol_type = other DNA
atgtcgcgactgtggtacgggaagaaaggcaggcgccaccagcctatcaatcataagtacaccctggtagtctcagtggctgagtatcaccgaagaattgatgctcttaacaccgaagagctcagaaccctgtgtcgacgtcttcagataaccacccgagaagacatcaacagcaagcaggtagcaactgtgaaggctgatcttgaatctgaatcctttaggccaaatctgtctgacccttctgagctcctactcccagaccagatcgagaagctcaccaagcatctaccaccgaggacgattgggtatccttggaccctcgtctacgggacgggcaaacacggaacgtctctcaagacgctgtataggactatgacaggcctggatacccccgtgctgatggtgatcaaggactcagacggccaggtgtttggcgcactggcttcagaacctctgaaagtctctgacggattttacggtactggtgaaacattcgtgttcaccttttgtcctgaatttgaggtgttcaaatggacaggggacaacatgtttttcatcaagggggatatggattccctcgccttcggagggggtgggggtgagtttgcgctttggctggacggagacctttatcacggtaggagccacagctgcaagactttcggtaatcgcactctgtcgaagaaggaagatttttttatccaggacatcgagatctgggctttcgagtag

SEQ ID NO: 233731 - DNA, 2520 bp, synthetic construct
  misc_feature 1..2520: note = Description of Artificial Sequence: Synthetic coding sequence
  source 1..2520: mol_type = other DNA
atggattacctgaccacatttacggaaaaaagtggacggctcctcagaggcacagcgaatcggctgctggggttcgggggtggaggcgaagccaggcaggtacgcttcgaagattacctgcgggagccggcacaaggagatctgggctgtggaagtcctccccatagaccacctgcaccttctagtcccgaggggccagacacagggcagaaaaagactctggacaagaaggacgggaggaggatgtcattccaaaagcccaagggcaccatcgaatatacagtcgagagcagggactcactgaactccatcgccttaaaattcgatacaactcccaacgagctggtgcagctcaataagctgttttctcgggcagtcgtgacaggtcaggtcttatacgtgcctgaccccgagtatgtgagctctgttgaaagctccccgagcctgagtcctgtatctcccttgtccccaacgtcttcggaggccgaattcgacaagacaaccaaccctgacgtgcacccaactgaggctacgccatcctcaacgtttaccggcatacgccctgctagagttgtttctagtacgtccgaagaggaagaagcttttacagagaagttcctgaaaatcaattgcaaatacatcacgtctgggaaaggaaccgtgtccggtgtgttacttgtgacgcccaataacatcatgttcgatccacataagaacgatcctttggtgcaggaaaatggctgcgaagaatatggtatcatgtgccccatggaggaggtcatgagcgccgctatgtacaaagagattctggatagcaagattaaggaatctctacctatcgatatcgaccaactgagcggtcgagatttttgtcacagcaagaagatgactggcagtaacacggaagaaatcgactcccggatccgagatgccggtaatgactccgcatctaccgccccacgttccactgaagagtctctgagcgaggacgtgtttaccgaaagtgagttgtcccccattcgagaggagctcgtgagctccgacgaattaagacaggacaagagttcaggcgctagctccgaatccgtacaaacagtaaaccaggctgaagtcgaatccctcactgtaaagtccgagtccaccggtacacctggccacctccgctcggataccgaacacagcactaatgaagtcggaacactgtgtcacaagactgatctcaataatctggagatggccattaaagaagatcagattgctgataatttccagggcatatccggcccaaaggaagactcaacatctatcaaggggaacagtgaccaagattcttttctccacgagaactcactgcatcaagaggagagccagaaagaaaacatgccctgcggagagacagccgagttcaaacaaaaacagagcgtgaataaagggaaacaaggtaaagagcagaaccaagatagccagactgaggcagaagaactgaggaagctatggaagacacacactatgcagcagaccaagcagcaaagagagaacatacagcaagtgtctcagaaggaggcgaaacacaaaatcacatctgctgatggccacatagaatcctccgccctcttgaaagagaaacagcgtcaccgtctacataagttcctctgtctccgcgtgggcaaacccatgcgaaaaacgttcgtttcacaggcctctgccactatgcagcagtacgcacaaagagacaaaaagcacgagtactggttcgcagtgcctcaggagcgcacagaccatctgtacgcgtttttcatccagtggtcccccgagatttacgcagaggacactggggaatacactagggagcccggattcatcgtggtaaaaaagatagaagaaagcgaaacaattgaggacagctcgaaccaggccgctgcacgtgagtgggaaattacaactcgcgaagacatcaatagtaagcaggtagccacagtgaaggccgatctggagagcgagtcctttcgtcctaatctttccgaccctagcgaactgctattgcccgatcagattgaaaaactgacaaaacatctgcccccaaggacaatcggctacccgtggacactagtgtacggaacgggcaaacatgggacgagtcttaaaacgttgtacagaaccatgaccgggctggatacccctgtactgatggtaataaaggactccgacggccaggtctttggggcactggcgagtgaacctctgaaagtatcggatggtttctatggcacaggtgagacatttgtcttcacattctgtcccgagtttgaggtgttcaaatggaccggggacaacatgttcttcataaagggcgacatggatagtttggcattcgggggtgggggaggagagttcgctctttggctggatggtgatctttaccatggcagatctcacagctgtaagacgtttggcaaccggacattgagcaagaaggaggatttctttatccaagatatagagatctgggccttcgagtag

SEQ ID NO: 233732 - DNA, 2625 bp, synthetic construct
  misc_feature 1..2625: note = Description of Artificial Sequence: Synthetic coding sequence
  source 1..2625: mol_type = other DNA
atgacgaaggacaagaatagcccaggactgaaaaagaagtctcagagcgttgatataaacgccccaggcttcaacccactggctggtgcaggaaagcagaccccgcaggcctctaaaccccctgccccaaagacgccaatcattgaggaggagcagaataatgctgctaacacccagaaacatcctagccgtcgcagtgaactcaaacgcttctacacaatagacactggacaaaagaagaccctcgataaaaaggatggtcggagaatgtccttccagaaacccaagggcacgattgaatatacagtggaatcccgggacagcctcaacagtatagccctgaagtttgacacaacccccaacgagcttgtgcagctaaacaagcttttttcccgggcagtggttactgggcaagtgctatatgtccctgatccagagtacgtgtcctccgtcgaaagctcaccttccctgtcacctgtgtcccctctttctcccacgagctcagaggcagagttcgataagactacaaatcctgatgtccaccctaccgaggcgaccccttcctccacattcactgggatcagaccggcacgagtggtgagttcaacctccgaagaggaagaagcttttaccgagaagttcctgaagatcaactgtaagtatattacttcaggtaaaggaactgtctctggagtgctcctggtgacccccaacaatatcatgttcgaccctcacaaaaacgacccactcgtccaagaaaacgggtgcgaggaatatggcatcatgtgcccaatggaggaagttatgagcgccgctatgtataaggagatcctcgactccaagataaaagagagccttccaattgatatcgaccagctttcaggcagagatttctgtcattcaaaaaagatgaccggctccaacaccgaggagatagattcccgaattcgagacgccggtaacgattcagcgtccactgctccccgaagcacggaggagtctctttccgaggacgttttcacagagtcagagcttagccccattagagaggaactggtgtcaagcgacgagttacggcaggataagtcttcaggagcatcctcagagagcgtccagacggttaaccaggccgaggtggagagtctaactgtgaaaagcgaatcgaccggaacaccaggtcatcttaggtctgacactgagcactcgacaaatgaggtaggcactctttgccataagaccgatctgaacaacctggagatggccattaaggaagaccaaatagcagataacttccagggcatcagtggcccaaaagaagattccactagcataaaggggaacagtgatcaggacagttttcttcacgaaaacagcctgcaccaggaggagtcccaaaaggaaaacatgccctgcggcgagacagccgagttcaagcagaagcagtccgtgaacaagggtaagcagggcaaggaacagaatcaggatagtcagactgaagcagaagagttgcggaagctttggaagacgcacactatgcaacagacaaaacagcagcgagagaatatacagcaggtgtcccagaaagaggccaaacataagattacttcggcagacggccacattgagtctagtgccctgctgaaggaaaagcagcgtcacagactacataaatttctgtgcctccgagtgggaaagcctatgaggaagaccttcgtatcacaggcgtccgctacgatgcaacagtatgcgcagcgagacaagaaacatgagtactggttcgccgtacctcaagagcgcacagatcatctctacgcttttttcattcagtggtctccagaaatttacgccgaggacaccggtgaatacacacgcgagccagggtttatcgttgtgaaaaaaatcgaagagtccgaaactatcgaagactctagcaaccaggccgctgcgagggagtgggaggtggttagtgtggctgagtatcaccggcgaatcgacgctctgaataccgaggagctcagaaccctctgtcgtcgcttgcagattacaaccagagaagatattaatagcaagcaggtagccacggtaaaagccgacctggaatctgaatctttcaggcccaacctgagtgatccaagcgaattgctgctgccagaccagatcgagaagctgaccaagcacttgcccccaaggaccatcggatatccttggacactggtttatggtacaggtaaacacggcactagcttgaagaccctgtacaggaccatgactgggttagacaccccagtcctgatggttataaaagactccgatggacaggtgttcggcgcactggcatcggaacctcttaaggtgtccgatggattctatggcacaggggagaccttcgtgttcacattctgcccagagttcgaggtgtttaaatggacaggggataatatgtttttcatcaagggtgatatggatagcttggccttcggcggtgggggtggcgaattcgctttatggttagatggggatctgtatcacggtcgttcacactcctgtaagaccttcgggaatagaaccctaagcaagaaagaagattttttcattcaggatattgagatctgggctttcgaatag

SEQ ID NO: 233733 - DNA, 2541 bp, synthetic construct
  misc_feature 1..2541: note = Description of Artificial Sequence: Synthetic coding sequence
  source 1..2541: mol_type = other DNA
atgtccgtcagcaacctctcgtggctgaaaaagaagtcccagtccgttgatattaacgcccctgggttcaacccattggccggagccggtaaacagacacctcaggcttccaaaccaccagcgccaaaaacacctattattgaggaggagcaaaataacgccgctaatacacagaagcacccctcacgcagatctgagctgaagaggttctataccatcgatacgggacagaaaaagacgctcgacaaaaaggatggtcgtcgcatgagttttcagaagcccaaagggaccatagagtatacggttgaatcccgagactcacttaacagcatagctcttaagttcgatactactccaaacgagttagtccagctcaataaattgttctccagagccgtggtcactgggcaggtgctgtatgtccccgatccagagtacgtcagtagtgtggaaagcagcccttccctgagccctgtctcccctcttagccctacgagttcagaggcagagtttgataaaacaaccaatcctgatgtccatcctacagaagcaacaccatccagcacattcaccggtataagaccagccagggtggtgagttctacgagcgaggaagaagaggccttcaccgagaagtttctcaaaattaattgtaaatatatcacatctggtaaagggacagtttccggggtgctgctagtgacaccaaataacatcatgttcgatccccataaaaacgaccctctggtccaggaaaatgggtgtgaagaatacggcatcatgtgccccatggaagaggtgatgtcggccgcaatgtataaagagatcttggactcaaagatcaaggagagtctgcctatcgacatcgaccagctatcaggccgtgacttttgccactcaaagaagatgaccggatctaacacagaagagatagattccagaattagagacgccggaaacgattccgcctctacagcacctcgttcgacagaggagagtctgtccgaggacgtctttactgagagcgaattatcacctatccgcgaggaactagtcagcagtgacgagctgcggcaagacaagagttccggggctagctccgaatcagttcagacagtgaaccaggctgaggtagagagtctgaccgtgaaatccgagtctacaggcacaccaggacacttaagatcagatacagagcattccacaaacgaagtcggcaccctctgtcataagactgacctgaacaatctcgaaatggccatcaaggaagatcagattgcagataacttccaagggatcagtgggccaaaggaggacagcaccagcattaaaggtaacagtgaccaagattctttcctgcacgagaactccctccatcaggaggagtcacagaaggagaatatgccatgtggcgaaacggctgagtttaagcagaaacaatcagtcaacaaaggaaagcagggtaaagaacagaatcaggattcacaaaccgaagctgaggaactgaggaaactctggaagacacacaccatgcagcagaccaaacaacaaagggaaaacatccagcaggtctctcagaaggaagccaaacacaagataacctccgcagatggccacattgaaagctcagccctgttaaaggagaaacaacgtcacagactccacaagttcctgtgccttagagtgggaaagcccatgcgcaagacgtttgtgtcgcaggcctcggctaccatgcagcagtacgcccagcgagacaagaagcatgaatattggtttgcagttccccaggagagaacagaccacctttacgcgttttttatccagtggtccccagagatatatgccgaagacacgggcgagtacacacgtgaacctggatttatcgtggtgaagaaaattgaggaaagtgagactattgaagatagctcgaaccaggctgcagcaagggagtgggagatcacaacccgggaagatataaacagtaaacaggtagcgactgttaaggctgatttggagtcagagagttttagaccaaacctaagcgaccccagcgagctgctccttcccgaccaaatcgagaagctaaccaagcacctgcctcccagaacaataggctatccatggacacttgtgtacggtacaggcaaacacggaaccagcctgaagacgctctaccgcacgatgaccggactcgacacccccgtgctcatggtcatcaaggactcagatggccaagtattcggggcactcgcctccgagcctctcaaagtctccgatggcttctacggaacaggagagacattcgtcttcaccttttgtcccgagtttgaagtgttcaaatggactggcgacaacatgttcttcatcaagggggacatggacagcctggccttcggcggaggaggaggggagttcgcgttgtggctggacggcgacctatatcacggcagaagccattcctgcaaaacattcgggaatcgaactctaagcaagaaagaggactttttcattcaggacatcgaaatttgggcctttgagtag

SEQ ID NO: 233734 - DNA, 651 bp, synthetic construct
  misc_feature 1..651: note = Description of Artificial Sequence: Synthetic coding sequence
  source 1..651: mol_type = other DNA
atgagcaggttgtggtatgggaagaaggggagaaggcatcagcctataaaccacaagtacacactgattacaacgagggaagacattaacagcaagcaagtagctaccgtgaaagccgatttagagtccgaatcgtttaggcccaacctaagcgacccaagcgaactcctgctcccggaccaaatagaaaagctcactaagcacttaccgccaagaacgatcggatacccctggacactggtgtatggcaccggtaaacacggtacctccctgaagaccctgtatcgcaccatgacgggtttggacactcccgttcttatggttattaaagactctgatggacaagtgtttggagctctggcgtctgagcccttgaaggtgtccgacggattttatggcaccggggaaacttttgtctttactttttgccccgagttcgaggtcttcaagtggaccggggataacatgttctttatcaagggtgacatggattctctggcattcggaggtgggggaggcgaattcgccctttggctggacggggatttgtaccatggcaggtcacactcttgcaagacattcgggaatcgaacattgtctaagaaagaagacttctttatccaggacatcgagatatgggcctttgaatag

SEQ ID NO: 233735 - DNA, 885 bp, synthetic construct
  misc_feature 1..885: note = Description of Artificial Sequence: Synthetic coding sequence
  source 1..885: mol_type = other DNA
atgcagcagacgaagcagcagcgggagaacatccagcaggtctcccagaaggaagctaaacataagatcacgtcagcagatggacacatagaaagtagcgcccttctcaaagaaaagcaacgccaccgcctgcacaaatttctgtgtctgcgcgtcggaaaacccatgcgcaagaccttcgtctcacaggctagcgccaccatgcagcagtatgcccagagggacaagaaacatgagtactggtttgccgtgccccaggagcgcaccgatcacctctatgcctttttcatccaatggagtccggagatctacgcagaggacactggcgaatacactagggaaccagggttcatcgttgtgaagaagattgaggagagtgagaccatcgaagactcttcgaatcaagccgctgccagagaatgggagttaacaaaacacctgccccctcgcactattgggtacccatggacattagtctatgggacgggcaagcatgggaccagtctaaagactctgtacagaaccatgactgggcttgacacgcctgtgctgatggtgattaaagactctgatggccaagtgttcggcgctttggccagcgaacccctgaaagtgagcgatggtttctacggaacgggcgagacttttgtgtttacattttgccctgagtttgaggtgtttaaatggacaggagacaatatgtttttcatcaaaggagatatggactctctcgcctttggaggaggaggcggtgagttcgcattgtggttagatggagacctataccacggccgatcacacagctgtaagacctttggaaatcggaccttgtctaagaaggaggatttcttcatacaggacattgagatatgggcgttcgagtag

SEQ ID NO: 233736 - DNA, 1512 bp, synthetic construct
  misc_feature 1..1512: note = Description of Artificial Sequence: Synthetic coding sequence
  source 1..1512: mol_type = other DNA
atgttctgccaaaggaaagataccggacagaaaaagaccctggataaaaaagatggccgacggatgtctttccagaaaccaaaaggcactattgagtataccgtcgagagcagagattctttgaatagcatagcgcttaagtttgatacgactcctaatgagctagtgcaactgaacaagctgttctctagggccgtggtcaccgggcaggtattatacgtgccagacccagagtacgtttctagcgtggaaagttccccttccctctcacccgtcagtccgctttctcctactagcagcgaggccgagtttgataaaacaactaatccagatgtgcaccccaccgaagctacaccttcttctacgtttacaggcatcagaccagcacgcgtggtatcatctacatccgaggaagaggaagcgtttaccgaaaaattcctgaagattaattgtaagtatataacttccggcaagggtacagtaagtggcgtgttattagtgacgccgaataatatcatgtttgatccgcataagaatgatcctttggtacaggagaatggctgtgaagaatatgggatcatgtgccccatggaggaggttatgtccgccgctatgtacaaagagatcttggactccaagatcaaagagtcgctgcccatcgatattgatcaactgtccggcagggacttctgccactccaaaaagatgaccggtagcaatacagaagagatagattcacgaattagagatgcgggtaatgatagcgccagtacggcccctaggtcaaccgaggagagcctctccgaggatgtttttacagagtcggagctaagtcctattagagaggagctggtgtcttctgatgagctgagacaagacaagagctccggcgctagcagcgagagcgtgcagactgtgaatcaggccgaggtcgagagcctgaccgtgaaaagcgaaagtacaggaacaccagggcacctgaggagtgatacggagcacagtactaacgaagttgggaccctttgtcacaagaccgacttaaacaatctggagatggctatcaaggaggatcagatcgctgataactttcaaggcatctcaggtcccaaggaagatagtactagcattaaaggcaacagcgatcaggactcattcctgcacgagaattctctgcaccaagaagaatcccaaaaggagaatatgccctgcggggaaacagcagagtttaagcaaaagcagtccgtcaataagggcaagcaaggcaaggaacagaaccaagactcgcagaccgaggcagaggagctgcgtaagctttggaaaacccatacaatgcagcaaaccaaacaacagcgggaaaacatccagcaggtatctcagaaagaagctaaacacaagattacatccgcagacggtcacatagagtcaaaatgctatagagtcaatgaagtgagcagctccaactgcatggtgagcccttcttttctgaccgacagcaaggccgcagtcccttag

SEQ ID NO: 233737 - DNA, 2622 bp, synthetic construct
  misc_feature 1..2622: note = Description of Artificial Sequence: Synthetic coding sequence
  source 1..2622: mol_type = other DNA
atgagtgtgtccaacctctcctggttgaagaagaagtcccagtccgtggatatcaacgctcccggatttaacccgctggctggagctggaaagcagaccccacaagcatctaagccgcctgctcctaaaacacctatcatcgaagaagagcagaataatgccgctaacacccagaagcacccatctaggcgtagtgaactgaagcgtttttatacgatcgatacgggccagaaaaagaccctcgacaagaaagacggtcgtcgcatgagcttccagaaacctaaaggtacaatcgagtacaccgtggagtctagggacagccttaatagcatcgcgttaaagttcgacactacccccaacgagcttgtccagttaaacaagcttttctccagagctgtagtcaccgggcaagtgctgtacgttccagaccccgagtatgtgagcagcgtggagtcaagcccgtccttaagcccagtttctcctttgtcgcccactagctccgaggctgaattcgacaaaacaaccaatcccgatgttcacccaaccgaggcaactccatcctcaacctttacgggaattcgaccagccagggtagtcagcagtacctccgaagaggaagaagcatttaccgaaaaattcctgaagatcaactgcaagtatatcacctccggcaagggaaccgtcagcggtgtcctgcttgtcacaccaaacaatatcatgtttgacccacacaaaaatgatcctctcgttcaggaaaacggctgcgaggagtatggaatcatgtgccctatggaagaggtcatgtctgccgcaatgtacaaggagatcttagactctaagatcaaggagtcactccccatcgacatcgatcaactcagcgggagagacttctgccactccaaaaaaatgacaggtagcaacacagaagagatagactcaagaattagagatgcagggaacgactcagcctcgaccgcaccccgatcaacggaggagtccctctccgaagacgtgtttacagagagtgagctgagtcctatacgagaagaactggtttcatcagacgaactaaggcaggataagtcttcaggtgcatccagcgagagcgtccaaacagtcaaccaggccgaagtcgaaagcctaactgtgaaaagcgagtctaccgggacaccagggcatcttaggtctgacacagaacacagcacaaacgaggtaggtactctctgccataaaacagatctcaacaacctggaaatggccattaaggaggatcagatcgccgataactttcagggcattagcggccctaaagaagatagcacatccattaaggggaactccgaccaggattcctttctccacgagaatagtctgcaccaggaggaaagccagaaagaaaacatgccctgtggcgagaccgctgagtttaagcagaagcagagcgtgaataagggcaagcaagggaaagaacaaaaccaagatagccaaacagaagcggaggaactccggaagctttggaagacccacaccatgcaacagaccaaacagcagagagaaaacatccagcaggtgtcccagaaggaagccaaacacaagattacttctgcagatggacacattgagtcttcagcgttgctaaaggaaaagcagcgtcacagactgcacaaatttttgtgcttgagggtcggaaagcccatgaggaaaacatttgtttcccaagctagtgccacaatgcagcagtatgcgcaaagagataaaaagcacgaatattggttcgcggtgccacaggagcgcacagatcacctgtacgcattcttcattcagtggagtccggagatttatgctgaagacactggcgaatacaccagggaacccggtttcatcgtggtgaagaagatcgaggaaagcgaaaccatagaggacagctctaatcaggcagccgctagagagtgggaagtcgtatccgtggctgaataccaccggaggattgacgctcttaacacagaggagcttaggactctctgtaggcggctgcagatcacaactcgagaagacattaatagcaagcaggtcgcaaccgtcaaggctgacctggagtctgagagtttccgcccaaacctgagtgatcccagcgagctcctcctgccagatcagatagagaagctgacgaaacacctcccaccacgcactatcgggtacccctggaccctggtgtacggaacaggaaagcacggtacatcactgaaaactctctatcgaactatgacgggactggacaccccagtgcttatggtgataaaggattccgacggccaggtattcggagccttggcatccgagcctttgaaagtgagcgacgggttctatggaaccggagagacgttcgtgtttacattttgtcccgaattcgaagttttcaaatggacgggagataacatgtttttcatcaaaggggatatggattctctggccttcgggggagggggaggagagttcgctttatggctggacggagacctttatcacgggagatcccactcatgtaaaacgtttggcaatcggacgctcagtaagaaggaggacttcttcattcaagacatcgaaatctgggcgttcgaatag

SEQ ID NO: 233738 - DNA, 2541 bp, synthetic construct
  misc_feature 1..2541: note = Description of Artificial Sequence: Synthetic coding sequence
  source 1..2541: mol_type = other DNA
atgtccgtctccaatctgtcgtggctcaaaaaaaaatcccagtccgttgatatcaacgctcccggatttaacccgctcgcaggagctggtaagcagactccccaggccagcaagcctcccgctcccaaaacacctattatcgaggaggagcaaaacaacgccgctaacactcaaaaacacccttctcgaagatctgaacttaagaggttttacacaatcgacacaggtcagaaaaagactctagataaaaaggacgggcgtcgcatgagctttcagaagcctaaaggaactattgagtacacagtggagagcagggatagtctgaattctatcgccctgaaattcgataccacgcccaacgaattagtccagctgaataagctcttctctcgggctgtcgtcacagggcaagtgctctacgtgcccgacccagaatacgttagctccgtggaaagcagccccagcctttctcctgtgtctccactcagccctactagctcggaagccgagttcgacaagactacaaacccggacgtacacccaaccgaggcaacgccgagtagtacttttacaggaatccgacctgcacgcgttgtttccagcacatctgaagaagaggaggcttttaccgaaaaattcctgaaaatcaactgcaagtacatcacatctggcaaaggcactgtgagcggagtgttgttagtaacacccaacaatataatgttcgacccacacaaaaatgatcccctcgtgcaggaaaacggttgtgaggagtatgggattatgtgccccatggaggaagtgatgagcgccgctatgtacaaagagatcctggacagcaagatcaaggaaagcctgccaattgatattgaccaattgtcaggaagagacttctgccatagcaagaagatgaccggttctaacaccgaagagattgatagcaggatacgggatgctggcaatgactctgcatccaccgcccctagaagcaccgaggagagtctgagcgaggacgtgtttacagagagcgaactttcccctataagagaggagttagtgagcagtgatgagcttcggcaggataaaagcagtggcgcttcctctgaaagtgtccagacagtcaaccaggctgaggtagagagccttactgtgaagagtgagagtaccgggactccgggacacctgcgcagcgacacagagcattccaccaatgaagttgggaccctgtgtcacaagactgatctcaataatttggagatggctatcaaggaggaccagatcgccgacaattttcaaggcatcagcggaccaaaagaagacagtacatcaatcaaggggaatagcgatcaagattccttcctccacgagaattctctgcaccaggaggagtcccagaaagagaacatgccatgcggcgaaacggctgagttcaaacagaagcagtccgttaataaaggaaaacagggtaaagaacagaaccaggatagccagaccgaggcagaggagctgcgaaagctgtggaaaacccacactatgcagcagaccaaacagcaaagggagaatatccagcaggttagccagaaggaggccaagcataaaataacgagtgctgacggccacatcgaatcatctgcactattaaaggaaaagcaacgtcaccgtcttcataaattcctctgcttaagagtggggaaacccatgcgaaagacattcgtgagtcaagcaagtgccaccatgcaacagtatgctcagagagacaaaaaacatgaatattggttcgcggttccccaggagaggacggaccacctgtatgcatttttcatccagtggagtcccgaaatctacgctgaggataccggagagtacacgcgcgaacctggattcatcgtcgtgaagaagatcgaagaatctgagaccatcgaggattcatccaatcaggccgcagccagggagtgggagattaccacccgagaggacataaattcaaagcaggtggcgacagtcaaggcagacctcgaatcagagagctttcgtccgaacctgagcgatcccagtgaactcctcctgcctgaccaaatcgaaaaacttacgaaacacctgccgcctaggacaataggctatccatggaccttagtctacgggaccgggaaacatggaacttcactgaaaaccctgtacagaaccatgactggcctcgatacacctgtactgatggttataaaggattcagacggccaggtctttggagccctagctagtgaacccctcaaagtatctgacggcttctatgggactggcgaaacctttgtgtttaccttttgtccagaatttgaggtgtttaagtggaccggagataatatgtttttcattaaaggagacatggactccctggccttcggtgggggtggtggggaatttgcgttgtggctggacggagacctataccacggaaggtcacactcctgtaaaacatttgggaacagaactctctctaaaaaagaggatttctttatccaggatattgagatctgggcgttcgagtag

SEQ ID NO: 233739 - DNA, 822 bp, synthetic construct
  misc_feature 1..822: note = Description of Artificial Sequence: Synthetic coding sequence
  source 1..822: mol_type = other DNA
atgaccttcgacgatcttaagattcagactgttaaagaccagccagacgaaaagtctaatggtaaaaaggcaaaaggattacagtttttatactcaccctggtggtgcctggccgctgcaacattaggagtgctctgtcttgggttagtggttactataatggtgctgggaatgcaactctcccaggtctccgacctacttactcaggaacaagctaacctgacacatcagaaaaagaaactggaaggtcagattagtgcaaggcagcaagcggaggaggcctcccaggaaagcgaaaatgaattgaaggagatgattgagaccttagccaggaagctgaacgaaaagtctaaagaacaaatggagcttcaccaccaaaatctgaacttgcaagagactctgaagcgagtggccaactgcagcgccccatgcccccaggattggatttggcatggggagaactgctacctgtttagcagcgggtccttcaattgggaaaaatctcaggagaagtgtttatctctcgacgccaagctgctcaaaatcaattccacggccgatttggactttattcagcaggcaatttcttatagttccttccccttctggatggggctctctcgtcggaatcctagctacccgtggctctgggaggatggctccccactaatgccacacctgtttcgtgtccggggagctgtaagccagacctatccctcaggcacttgtgcctacattcagcgcggtgctgtgtacgctgagaattgcattctggcggcattctccatctgccagaagaaggcaaatcttcgagcccagtag

SEQ ID NO: 233740 - DNA, 546 bp, synthetic construct
  misc_feature 1..546: note = Description of Artificial Sequence: Synthetic coding sequence
  source 1..546: mol_type = other DNA
atgacctttgatgacttgaaaatccagaccgtgaaggaccaacccgatgagaagtcaaacgggaaaaaagcaaagggcctgcagtttctatactcaccctggtggtgtctggctgctgccaccctgggggtgttgtgcctcggcttggtggtgaccatcatggtgctgggcatgcagctgagtcaggtgtctgacttgctgacgcaggagcaagccaacttgacccatcagaaaaaaaagctagaggggcagatctctgctcgacagcaggcggaagaggccagtcaggagagcgaaaatgagcttaaagagatgatcgaaaccctggcaagaaagctgaatgagaagtcaaaggaacaaatggaactccaccaccagaacctgaacctccaggagaccctcaagcgcgtggcgaattgttctggattgcatcccgcaagtaactttttgttccaattctccatcctcgacggcgcagtaagcgaggagccacagctgcccatggctctgggaggaaggttttcattcgacgctccgctaatatag

SEQ ID NO: 233741 - DNA, 570 bp, synthetic construct
  misc_feature 1..570: note = Description of Artificial Sequence: Synthetic coding sequence
  source 1..570: mol_type = other DNA
atgacattcgatgatctgaaaattcagacggttaaggatcaaccagatgagaaatccaatggcaagaaggccaaaggcttgcagttcctttacagcccctggtggtgcctggcagccgctacactgggggttctgtgtctagggttagttgtgacaataatggtcctcggaatgcagctttcacaggtctctgacctgttgacgcaggagcaggccaacctcacacaccaaaagaagaaacttgagggacagatctccgcacggcagcaggccgaggaggccagtcaggaatccgaaaacgagttgaaagaaatgatcgaaacactggcccgaaaattaaatgaaaagtccaaggaacagatggaacttcaccaccagaacctaaacttgcaagagaccctaaagcgggtcgcgaactgctctgctccttgtcctcaagactggatctggcatggtgagaactgttacctcttctcttctggctccttcaactgggagaagtctcaggagaagtgcctgagcctggacgcaaagctgttgaaaataaacagcacagctgatctgatttag

SEQ ID NO: 233742 - DNA, 1623 bp, synthetic construct
  misc_feature 1..1623: note = Description of Artificial Sequence: Synthetic coding sequence
  source 1..1623: mol_type = other DNA
atgcagcaggtgctcgagaacctcacagaactaccctcgagcaccggcgcagaagagattgacctcattttcctgaagggcatcatggaaaaccctatagtcaagtctctcgccaaggcccacgagcgtctagaggacagcaagttggaagctgtttcagataataacctcgagctggtgaatgagatattagaggatataacgcccctcattaacgtggatgagaacgtggccgaactggtcggtattcttaaggagcctcattttcagagcctgttggaggcgcacgatatagtagcctccaaatgttacgacagccctccgtcaagcccggagatgaacaatagctctataaataatcagttattacctgtggacgcaattagaattttaggcattcataagcgagccggtgagcccctgggcgttaccttccgtgtcgaaaacaacgacctggtgattgcacgaatccttcacggcggaatgattgaccggcaggggctactgcacgtgggggacatcatcaaagaagtgaacgggcacgaggtaggaaacaacccaaaggaactgcaagaactactgaagaatattagcggctccgttaccctgaaaattttgccttcttatcgggacactattactccacaacaggtcttcgtgaaatgccatttcgactacaacccttataatgataacttaattccctgtaaagaggccggattgaagtttagcaagggggaaattctgcagatcgtcaatcgcgaggaccccaactggtggcaagcttcacatgtgaaggaaggtgggagcgccggtctgattccaagccaatttttagaggagaagcgaaaggcatttgtgcgcagggattgggataattccggacccttctgcggtaccatctcctcaaagaaaaagaagaagatgatgtacctcacaactaggaatgctgagtttgaccgtcacgaaatccaaatctatgaggaggtcgccaaaatgcctccatttcagcgtaagaccctggttcttattggggcacagggagtgggcagaaggagtctgaaaaacaggtttatcgttctcaatccaacgcggttcggaaccactgtcccctttacctctcgaaagccacgagaagacgagaaagacgggcaggcttacaaatttgtcagtaggtcggaaatggaggccgacatcaaagcaggaaaatatctcgagcacggtgaatacgaaggaaatctgtacggcaccaagattgattctattttggaggtggttcagacagggaggacttgtatcctcgacgtaaaccctcaagcattaaaggtgctcaggacttccgaatttatgccttacgtggtgttcatagcagcgccagagttagagaccttaagagccatgcacaaggcggtggttgacgctggcataacaacaaagctgcttacagactctgatcttaagaagaccgttgacgaatctgctagaattcaaagagcctacaaccactatttcgatctcatcattattaacgacaatttggataaagcatttgagaagctccagaccgcgatagagaaactgagaatggaacctcagtgggtgcccatctcttgggtatactag

SEQ ID NO: 233743 - DNA, 636 bp, synthetic construct
  misc_feature 1..636: note = Description of Artificial Sequence: Synthetic coding sequence
  source 1..636: mol_type = other DNA
atgtttcacctgaggacttgcgctgctaagcttcgcccactgactgctagccagacagtgaagacctttagccagaacaggcctgccgcagcacggacatttcagcagattcggtgctactcagcaccggtcgcggctgaaccgtttttgtctggtaccagttcaaactatgtggaagagatgtattgtgcctggcttgaaaacccaaagtccgttcataaatcctgggatatcttcttccgaaatacaaacgctggagcaccccctggcactgcctaccagagtcccctacccttgagtagggggagtctggccgcagtagcccatgctcaaagtttagttgaagctcagcctaacgtggataaacttgtcgaagatcacctcgctgtccagagtctcatccgcgcatatcaaattcgcggacaccacgttgcacagcttgaccccttgggaatactcgatgcagacctcgattcgtccgtcccggcagacatcatttcctcaaccgacaagttggggttttacggtctggacgaatctgacctggacaaggtctttcatctgccaaccaccactttcatcggtggccaggagtcagccctgcccctgagggagatcatccgtcgcttagagtag

SEQ ID NO: 233744 - DNA, 1284 bp, synthetic construct
  misc_feature 1..1284: note = Description of Artificial Sequence: Synthetic coding sequence
  source 1..1284: mol_type = other DNA
atgttccacctgagaacgtgcgcggctaagctgcggccattgaccgcaagccagacagtcaagactttcagccaaaaccgccctgctgctgccagaactttccagcagattcggtgttacagtgctccggtcgccgcagaacccttcctgtccgggacatcctcgaactacgtcgaagagatgtactgtgcctggctggagaatcccaaaagcgtgcataaatcttgggatatcttctttcggaatactaatgccggagcgccaccagggaccgcctatcaatcgccattgcccctgagccgtggcagcttggcagccgtcgctcatgcacagtctctggtggaagctcaacccaacgtagataaactggtggaggaccatctggccgtccaatctctcatcagagcttatcagatccgcggtcaccacgtcgcacagctagatccactgggtatcctcgatgctgacctggactcctctgtgccagccgacataatttcctctaccgacaagctgggcttctacggcttagatgagtcagatctggataaggtgttccatctgcctaccacaacttttatcggcggacaagagagtgcactgcctctgcgcgagattatccggaggctcgagatggcatactgtcagcacatcggcgtggagtttatgtttatcaacgacctggagcaatgccaatggattcgacagaagtttgagacacccggaataatgcagttcacgaatgaggagaagcgaaccctgctggcaagactcgtgaggtctactcgcttcgaagaattcctgcagcgaaagtggagttcagaaaaaagatttggcctcgaagggtgcgaggttttgatccctgcgttgaaaactattatcgataaatccagcgagaacggggtcgactatgttattatgggtatgccgcacagaggcaggttgaacgtcctcgcgaatgttatccgaaaagagctagagcagatattttgtcagttcgattcaaaactggaagccgctgatgagggctcaggagacgtgaaatatcacctcgggatgtatcataggagaataaaccgggtaactgacaggaacatcacgttgtccctggtggctaacccaagccacctagaagccgcagaccctgtcgttatgggcaagaccaaagccgagcagttttactgtggagacactgagggcaagaaagtgcgccctagggaaaggagagccaggcagattgttaaggccccatgctcgagcatggaattccggtctcctacctag

SEQ ID NO: 233745 - DNA, 2925 bp, synthetic construct
  misc_feature 1..2925: note = Description of Artificial Sequence: Synthetic coding sequence
  source 1..2925: mol_type = other DNA
atgtactgtgcttggctcgaaaatcctaaaagtgtgcataagagctgggatatcttttttagaaacactaacgccggtgcgccacctggcaccgcatatcaatcccccctgcctctgagcaggggttctcttgcagcagtggcacacgcccagagtttggtggaggctcagccaaatgtggacaaattagtcgaagatcacctcgccgttcagtcactgattcgcgcataccaggtacgaggccaccacattgcaaagttggaccctctgggcatctcctgcgtgaattttgacgacgcccctgtgacagtgagcagcaacgtagatctggcagtctttaaagagcggttacgtatgttgaccgtcggaggcttttatggtcttgatgagtctgacctggacaaagtgttccaccttccgacaaccacttttatcggcggacaggagtcggctttaccgctccgcgagattattagacggctggagatggcatattgccagcatatcggcgtggaattcatgtttatcaatgacctggagcagtgtcagtggatccgccagaagttcgaaactccgggtattatgcagttcacaaatgaagagaagagaactctgctggccaggctcgtgaggtcgacgcgctttgaggagtttttgcagcggaaatggtcatccgaaaagcgctttggccttgaaggatgtgaggtcctgatcccagcccttaaaacaatcatagataagtcatccgagaatggtgtggactatgtgattatgggtatgccccatcggggtcgtctcaacgtccttgccaacgtcattcggaaggagctggaacagatcttctgccaattcgactccaaactggaagcagccgacgaaggttccggggatgtcaaataccacctggggatgtaccaccgcagaatcaatagggtgacggataggaacatcactttaagtctggtggccaatccgtcccacctcgaggccgctgatccagttgtgatgggaaaaacaaaagccgagcagttttattgcggggataccgaagggaaaaaagtgatgtctatcctgttgcacggggatgccgcattcgccggtcagggcatcgtctacgagacttttcatttgtctgatttaccatcatatacaacacatggcactgtacacgtcgttgtgaataatcagattggattcaccacagacccgagaatggccaggtcctcaccctaccccactgatgtcgccagggtggtgaacgcgcctatattccacgtaaactcggacgatcctgaggccgtgatgtatgtgtgtaaagttgccgctgagtggagatcaaccttccataaggacgtcgtcgtcgacctggtgtgctacaggcggaacggccacaacgagatggacgagcccatgtttacccagcccttgatgtacaaacaaatccgtaagcagaagcctgttctacagaagtacgcagaacttctggtctcccagggggtggtgaatcagcctgagtacgaagaggaaattagcaagtatgataaaatctgtgaagaggcctttgcccgtagcaaggacgaaaaaattctccacattaaacactggctggacagcccctggccgggtttcttcacactcgacggccaacccaggtccatgagttgtccctccacagggctgacagaggacattttgacccatattgggaatgtggcttctagcgtgcctgtggagaactttaccattcatggcggactcagcagaattcttaagacacgaggcgagatggtaaagaataggacagttgactgggctctcgcggaatacatggcttttggatcgttgcttaaggagggcattcatatccggctgtctggacaggatgtggagagggggacattttcacaccgacatcacgtgctgcatgaccagaatgtagacaagcgtacatgtatacccatgaaccacctgtggccaaatcaggctccttacaccgtgtgcaatagttcactcagcgagtatggagtcctaggcttcgaactcgggttcgcaatggcaagccctaacgcactggtcctttgggaggcacagttcggtgacttccacaatacagcccaatgtataatagaccagtttatctgccccggacaagctaagtgggtaagacagaacgggatcgtgttactgttgccacacggaatggaggggatgggcccagagcatagctcagcacggcctgagcgttttctccagatgtgcaacgacgatccagacgtgttgcctgacttgaaggaggccaatttcgatatcaatcagttgtacgactgcaactgggtcgttgtcaattgcagcacccctggtaacttcttccacgttctccggcgacagatcctgctccctttcagaaaacccctgatcatctttacccctaaatctcttttaagacatccggaggctcgctcttccttcgatgaaatgctgcccggaacccatttccagcgcgtgattccagaagacggcccagccgctcagaaccccgaaaatgttaagcgcctactgttttgcaccgggaaggtgtattacgacctgactagggaacgtaaggcaagggacatggtgggacaagtggcaataacaaggatcgagcaactgagcccgttccctttcgatctgctcctgaaggaggtacagaagtatcctaacgccgagctcgcttggtgtcaggaggaacataaaaaccaagggtactacgattacgtgaagcctcgcctgagaaccactatctcacgcgctaaacctgtgtggtacgcgggtagagaccctgccgcagcccctgctaccgggaacaagaagactcacctgaccgaattgcagcgtctcctcgacactgcttttgatctggatgtattcaaaaacttttcttag

SEQ ID NO: 233746 - DNA, 3060 bp, synthetic construct
  misc_feature 1..3060: note = Description of Artificial Sequence: Synthetic coding sequence
  source 1..3060: mol_type = other DNA
atgtttcacctaagaacctgtgcggcaaaactccgaccactaacagccagccagacagtcaaaacattcagtcagaaccgaccagctgctgcccgaacattccagcagatcagatgctactcagctcccgtggctgcagagccattcctctctggcacctcgtctaactatgtggaagaaatgtattgtgcctggttggaaaatccaaagagcgtccataaaagctgggatatcttttttcgtaacacaaacgccggagcccctccgggaaccgcttaccagtctccgcttccactttccagggggagccttgcagctgttgctcatgctcaaagcctggtcgaggcccagcccaacgtagataagctggtcgaagaccacttagccgtgcagagcttgattcgtgcctatcaggtacgtggtcaccacattgccaagctggatccccttgggatttcttgcgtgaactttgacgacgctcctgtgactgtgtcaagcaacgtcggtttctatgggctggacgaatctgacctggataaggttttccacctgcctaccacgacatttataggcggtcaggagtctgccctgccattgagggagatcattagacgcctggaaatggcgtattgtcagcacattggcgtggaattcatgttcatcaacgacctggagcagtgtcaatggattcgtcagaaatttgagacaccaggtattatgcagttcactaacgaggagaaacgcaccctcctcgcaaggctggttaggtccacaagatttgaggagttcctccagcgcaaatggtcatccgaaaagcgcttcggactcgaaggatgtgaagtcctaattccagctctgaaaaccatcattgataagtcttccgagaacggcgtcgattatgtcattatgggaatgccccaccgtgggaggctgaatgtactggccaacgtcatcaggaaggaactggaacagatcttctgccagttcgacagcaagttagaagccgctgacgaaggaagcggagacgtgaagtatcacctcgggatgtatcatagacgcatcaacagagtcacagaccgcaacatcaccctgtcactggttgctaatccctcccatctggaagctgcggacccagtggtgatgggaaagactaaggccgagcaattttattgcggcgataccgagggcaaaaaggtgatgtctattcttctgcacggcgatgccgcatttgctggacagggcatagtgtatgagactttccacttatccgatctcccttcctataccacacacggtaccgtgcacgtggtggttaacaaccaaattgggtttaccacagatcctcgaatggccaggagttcgccctacccaactgacgtcgcacgcgtcgtcaacgcccctatcttccacgttaactcagatgacccggaggcggttatgtacgtgtgtaaagtggccgctgagtggagaagcacctttcacaaagatgtcgtggtcgacctggtgtgctacagacgtaacgggcataacgagatggacgaaccaatgttcacacagccactcatgtataaacagatcagaaagcagaagcctgttctacagaaatatgcagagctgctggtatcccagggggttgttaatcagcccgaatacgaggaagaaatcagcaaatatgacaaaatctgtgaagaagcattcgcaaggtcaaaagatgaaaagattctgcacatcaagcactggctcgattctccatggcctggcttcttcacactcgacgggcagccacggagcatgtcctgcccaagtaccggtctgactgaggatatcctcactcatattggaaacgtggccagctccgtgcccgtagaaaatttcaccatccacggcggtctatctcggatcctgaagacacggggtgagatggtgaaaaatcgcaccgtggattgggcgttggccgaatacatggcctttggctcactactcaaggaaggaatccatataagactatctggtcaggatgtggagagaggtacgttctcccacaggcaccatgtgctgcatgaccaaaatgtggataaacggacttgtattccgatgaatcatctctggcctaaccaggctccttacaccgtttgcaatagtagcctgagtgagtatggcgttttgggtttcgaactgggatttgctatggccagtcccaacgctctcgtcctctgggaagctcagttcggtgacttccataacaccgcccagtgcatcatagaccaatttatctgtcctggacaggccaagtgggtaaggcaaaacggaatcgtgttactcttaccgcatggcatggaggggatgggcccagaacacagctccgccagaccagagcgatttttgcagatgtgcaacgacgatccagacgtgctgcctgacctgaaggaggcgaatttcgatatcaatcagctctacgactgcaactgggtggtggtaaactgcagtaccccgggaaatttcttccatgttctccggcgacagattcttctgccttttcgaaagccgttgataatctttactccaaagtctctcttgaggcaccccgaggcccgtagtagcttcgacgaaatgctgcccggaacacactttcagcgggtcataccagaagacgggccagctgcgcagaaccctgaaaatgtgaagaggttgcttttttgcactgggaaggtctattacgatttgacaagagaacgaaaggcccgagatatggtgggacaggtcgccattacgcgcatcgagcagctctccccattccctttcgatcttcttctgaaggaagttcagaaatatccaaatgcggaactcgcctggtgtcaggaggaacacaagaatcaaggctactatgattacgtgaagcctcggctgcggactacaataagccgcgctaagcccgtgtggtatgcgggtcgagaccccgcagctgctccagctaccggtaacaagaagacgcacctgaccgagttgcagcgcttgttggatacggcgttcgatttggatgtgttcaaaaactttagctag

SEQ ID NO: 233747 - DNA, 2424 bp, synthetic construct
  misc_feature 1..2424: note = Description of Artificial Sequence: Synthetic coding sequence
  source 1..2424: mol_type = other DNA
atggctgcaactgaactcaggggcgtcgttggacctggcccagctgccattgcggcattaggaggcggaggggctggccctccggtggtgggtggagggggaggcaggggagatgcgggaccgggatctggcgctgcaagtggaacggttgtcgcagccgctgctggcggacccggaccaggggctggcggtgtggccgctgcagggccagcacccgctcccccaaccgggggaagtgggggaagtggtgccggaggttctgggagcgcaagggaagggtggctattcaaatggacgaactacattaagggctatcagaggagatggttcgtactcagcaatggtcttctgagctattacaggtccaaggcagagatgcgacacacatgccggggtaccatcaatctcgccacagctaacattaccgtggaagacagctgtaactttattattagcaacggcggtgctcagacatatcacctcaaggccagttccgaggtggagcgccagagatgggtcacagcgttggagcttgcgaaggccaaagccgtaaagatgctggccgagagtgatgagtctggggacgaagagtctgtctcacagactgacaaaaccgagctgcagaacaccctcagaactctcagtagcaaagtggaagatctaagcacttgtaatgatttgattgctaaacacgggaccgccttgcagcgctccctcagtgaactggagtctcttaagctcccggctgaaagcaatgagaaaattaaacaggtgaatgagcgggctaccctattcagaataacaagtaatgcaatgatcaacgcgtgccgggactttctcatgctggctcagactcatagcaaaaagtggcagaagtcactgcaatacgagagagaccagaggattcggttggaggaaactctagagcagctcgcgaagcagcacaatcatttagagagggcttttcgaggtgcaactgttctgcctgccaacactcctggaaacgttggctccggcaaggatcaatgctgtagcggtaaaggcgacatgtcagacgaagacgatgaaaacgagttttttgacgcaccggagataataacgatgccggagaacctaggtcacaaacggactggatccaatatcagtggagctagctccgatatatcgctggatgaacagtacaagcaccagctggaggaaaccaagaaggagaaacgcacacggatcccgtataaacccaattactccctgaatctgtggtctatcatgaaaaattgcatcggcaaggagctgagtaagatacctatgcccgtcaatttcaatgagccactatccatgctgcagcgactgacggaggatttggaataccacgaactcctggaccgagccgctaaatgcgaaaatagcttagagcagttatgctacgtggccgcttttacagtgagtagctactcgaccactgtgttccgcacatctaaacctttcaatccactgctgggagaaacctttgaattggatcggctggaggaaaacggttaccgaagcctgtgcgaacaggtctctcatcacccaccggctgccgcacaccacgccgaatccaagaacggctggaccctcagacaggaaatcaaaattacaagcaaatttagaggcaaatatctgagcatcatgccactgggcaccatccactgtatttttcacgccacaggacaccactacacctggaagaaagtaactaccactgtgcataatatcatcgttggcaagctgtggatagaccagagcggggaaatagatatcgtcaaccacaagacgggcgacaaatgtaacctgaagtttgtaccgtactcgtacttctctcgagacgttgctagaaaggtgactggagaggtgactgatcccagcggcaaggtgcactttgctctgcttggcacatgggatgaaaaaatggaatgcttcaaagtgcaacccgtgattggcgagaatgggggagatgcacggcagagagggcatgaagctgaagagagcagggtgatgctgtggaaaaggaatcccttacctaaaaatgcagagaacatgtattacttctctgagctcgccctgacgcttaatgcatgggaaagtggtacagcccctacggattcaaggctcagacctgaccagaggctcatggaaaatggccgatgggatgaggctaatgcagaaaagcagaggctggaggagaaacagaggctttcccgcaagaagcgggaggcggaggccatgaaggcaaccgaggatggtacaccgtacgatccctataaagcgctttggttcgagcgaaagaaggacccagtcacaaaagagcttactcacatttaccgcggagagtattgggagtgtaaggaaaaacaagattggtcctcctgtccagacatattctag

SEQ ID NO: 233748 - DNA, 1224 bp, synthetic construct
  misc_feature 1..1224: note = Description of Artificial Sequence: Synthetic coding sequence
  source 1..1224: mol_type = other DNA
atggccgcaactgaattgagaggcgtcgtgggtccaggtccagctgctattgccgcactcggaggtggtggagccggacccccagtagtgggaggcggaggcggacgtggggacgcaggtccagggagcggggcagccctgcagcgactgactgaagatctcgagtaccatgagctcctggatagggccgcaaaatgtgagaattccctagaacagctctgctatgtggctgcctttactgtaagttcttattctactactgtgttccggacttcaaagccctttaatccattgcttggcgagacctttgagttggaccggttagaggagaacggatatcgctcactgtgcgaacaggtgtctcatcatccaccagcagctgcacaccatgccgaatcaaaaaatggctggacccttcgtcaggagatcaagattacctcaaagtttcgaggcaaatatctgtcaataatgcccttaggaaccatccactgcatattccatgcgactggtcatcactacacatggaagaaggtcaccacgacagtccataatatcatcgtagggaaactttggattgatcagtcaggtgaaatcgatatcgtgaatcacaaaacgggggacaagtgcaatttgaaatttgtaccttactcttacttctcccgggacgtagctcgcaaagtgaccggtgaggtgaccgatccctcaggtaaggtgcacttcgcactgttagggacttgggacgaaaagatggagtgcttcaaagttcagcccgtgattggcgaaaatggcggtgacgcaagacagcgtggccatgaagcagaggaatcaagagtgatgttatggaagcgaaatcctctgcctaaaaatgcagagaatatgtactacttctccgagctggctctcactttgaatgcctgggagtctggtaccgcaccaactgactcaaggctgcgccctgaccagcgcctgatggaaaacggacgttgggatgaggccaacgccgagaagcagcggctagaagaaaaacagcggctatcgcggaaaaagagagaggcagaggccatgaaggccacagaagacggaacgccctacgacccatacaaggcactgtggttcgagcgcaagaaagacccagtgactaaagagctgacccatatttataggggcgaatactgggaatgcaaagagaaacaggattggagttcttgcccagatattttctag

SEQ ID NO: 233749 - DNA, 2751 bp, synthetic construct
  misc_feature 1..2751: note = Description of Artificial Sequence: Synthetic coding sequence
  source 1..2751: mol_type = other DNA
atgggtaaagccgctgcaccctcaagaggtgggggatgtgggggtagaagtaggggccttagcagtctctttactgtggtcccctgtctgtcatgccataccgctgccccaggtatgagcgcctcaacgagcggcagcggtccagaacctaaaccgcagccccagcccgtaccggagcctgaacgcggtcccttgtctgagcaagtatcggaggccgtgtccgaggctgtaccacggagtgagcctgtgtcagagacgacttcagaaccagaacccggagctggtcagccttcagagctcttacaagggtcacgccctggaagcgaatcctcaagcggagttggtgccggaccattcaccaaagccgcatccgagcccctcagtcgcgctgtgggcagcgctacctttctgagaccagaaagcggctccctccccgcacttaaaccactgcctctactgagaccaggccaggccaaaacacccttaggagtgccaatgagcggtaccggaaccacgtcctccgcaccactggcccttcttccactcgattctttcgaaggatggctcctgaagtggacaaactacttaaagggctatcagaggcggtggttcgtgctgggaaacggtttgctgagttattataggaaccagggcgaaatggcacacacatgtagaggaacaattaatctgtcgaccgcccatattgataccgaggatagctgcgggattctgctcacatccggagccagatcctaccatctcaaggcatcctcagaggttgacagacagcagtggattaccgctttggaacttgcgaaggccaaagcggtccgagtgatgaatacccatagtgacgattctggggacgatgacgaggccacgacaccggcagataagtccgaactccatcatacactgaagaacctctcactgaagctggacgacttgtccacctgcaacgatcttattgccaagcatggggctgcattgcagcgctcactgacagagctggacggactcaaaatcccaagcgaaagcggtgagaaattgaaggttgtgaacgagcgcgctacgctgtttcggatcacaagcaacgctatgattaatgcttgtagggatttcctcgagctggccgagatccactcccgaaaatggcaacgtgctttgcagtacgagcaggaacagagagttcacttggaggaaaccatcgaacagcttgccaagcagcataattcacttgaacgagctttccattcggccccaggacgccctgccaacccaagcaaaagcttcattgaaggttcattgttaactccaaagggagaggattccgaggaagatgaagacactgagtactttgacgccatggaagacagtacttctttcattaccgtcattacagaggctaaagaggactcccggaaggcggaagggtctacggggacatccagcgtggactggtcaagtgcagacaacgtgttggatggtgcatctctggtccctaaagggagctccaaggttaagagacgagtgcggatccctaacaaaccaaattactcactaaatctttggagcataatgaagaattgtataggaagggagctgtctagaatccctatgcccgtaaactttaatgaacctctctcaatgcttcaaaggttaacggaagatctggagtatcatcatttgctggataaagcagtgcactgcacgtctagcgtggagcaaatgtgcctagtggcagcattctccgttagttcctattctacaacggttcaccgcatcgccaaaccttttaaccccatgctaggcgaaacttttgaattagacagactggatgatatgggtctgcgaagtctatgcgaacaagttagtcaccacccaccgtcagccgcacattatgtgttcagcaagcacggatggagcttgtggcaggaaataactattagcagcaagtttagaggcaagtatatttctatcatgccattgggcgctatacacctagaatttcaggcctctggaaaccactatgtgtggcggaagtctacgagcacagtccacaatattattgtgggaaagctctggattgatcaatccggtgatatcgagattgtaaaccataagactaacgaccgatgtcagctgaaattcttaccatattcgtatttttccaaggaagcggctcgcaaagtcacaggcgtggtttctgactcacagggcaaagcccactacgtcctgtcgggctcttgggatgaacagatggaatgttctaaagtgatgcattcaagtccctctagtccttctagcgatgggaaacaaaaaaccgtttaccagacattaagcgcaaaactcctgtggaagaaatacccactgcctgaaaacgccgagaacatgtattatttttccgagctagctctgactctgaacgagcatgaggaaggagtcgcccctaccgatagcaggctacggcctgatcagagattgatggagaagggtcggtgggacgaggccaacactgagaagcagagacttgaagagaagcaacggctgagcaggagacgcaggctagaagcttgtggcccaggctctagctgttcatcagaagaagagaaagaggctgacgcgtatactcctttgtggtttgagaaacggttggaccctttaaccggcgagatggcttgtgtgtataaggggggttattgggaggcaaaagaaaagcaggactggcacatgtgcccaaatatcttctag

SEQ ID NO: 233750 - DNA, 2625 bp, synthetic construct
  misc_feature 1..2625: note = Description of Artificial Sequence: Synthetic coding sequence
  source 1..2625: mol_type = other DNA
atgggaaaggccgcagctccttctcggggtggcggatgtggtgggaggtcaagaggcctgtccagcttgttcacagtggtcccatgcttatcttgtcacacagctgcacctggaatgagcgcctcaacttccggcagtggaccagagccaaagccgcaaccccagccagtgccagagccagaaaggggtccactaagcgagcaggtctcagaagctgtcagcgaggccgtcccccgatctgaacctgtatcagaaaccacctccgagccggaacctggggctggacagccttctgaattgctgcagggatctcgacctggcagcgaaagcagcagcggggtcggcgctggcccatttacaaaagctgctagcgaaccattgagcagagccgtgggctccgctaccttcctgcggccagagtcgggaagtttaccggctctgaagccgctgccactgcttaggccaggccaagcaaagacgccattaggggtgcccatgtcgggaaccgggacgacctcaagtgccccactggctctcctgccactggacagtttcgagggatggttgctcaaatggaccaactacctcaagggctatcagagacgttggtttgtgctcggtaacggtctcctaagctactatcggaaccagggggaaatggctcacacctgtcgcggaaccattaatctctctacagcccatattgacaccgaggattcctgcgggatacttctcaccagcggcgctaggtcctaccatctgaaagcaagctctgaggtcgaccgccagcagtggatcaccgctctggaattggctaaggctaaggcagtcagagtgatgaatacacatagcgatgactccggggacgatgacgaggcaactactcccgctgacaagagtgaactgcaccacacacttaagaatctatcactgaagttggacgacttgtctacctgtaatgatctaatcgctaaacatggagccgctctgcagaggtccctgaccgagctagatggtctcaaaatacccagcgaatccggagaaaaactgaaggtcgttaacgagagagctaccctctttagaataacgtcgaatgcaatgatcaacgcctgcagagacttcctggagctggctgagatccactctcggaagtggcagcgggctttgcagtacgagcaggagcaaagggtccatctggaggaaacaattgaacagctggccaaacagcataattcacttgagcgggcttttcacagtgcccctgggcgtccagctaacccctccaagtcatttattgaaggttctttactcacccccaagggagaggatagcgaggaggacgaggatactgaatacttcgatgcgatggaggattctacctctttcatcactgttattactgaggcaaaagaagattcccggaaagctgaaggctccaccggtacctccagtgtcgactggagtagcgcagacaacgtgaacttcaatgaacccctcagtatgctccagcggctcaccgaggacttagagtaccaccaccttctcgacaaagccgtccactgcacatcctctgtcgagcagatgtgcctcgtagccgctttttcggtgtcctcttattctaccactgtccatcgtatagccaagcccttcaatcctatgctaggcgagacttttgaattggaccgcctggacgacatgggactccgttctctgtgtgagcaggttagccaccacccgccaagcgcagcacactatgtgttctctaaacacggctggtccctgtggcaggaaattactattagcagcaaattccgtggcaagtatatctcaataatgccgctgggcgctatacatttggaattccaggcctctggtaaccattacgtgtggcggaagtcaacgagcaccgtgcacaatatcattgttggaaaactctggatcgaccagagcggtgacattgagatcgtgaatcacaaaacgaacgatagatgtcagcttaaattccttccatactcctacttttccaaggaagcagctcgaaaggtgaccggagtagtgtccgatagtcagggcaaggcacattatgtattgtccggtagctgggacgaacagatggagtgcagcaaagtcatgcacagtagtccaagcagtccctcttccgatggcaaacagaagaccgtgtatcagaccctctccgcgaaactcctatggaaaaagtatcccctccccgagaacgccgaaaatatgtactactttagtgagcttgctctgactcttaacgaacacgaggaaggggtagccccaaccgactccagattacggcctgatcaaaggttgatggagaagggcagatgggacgaagctaacacagaaaagcaaagactggaggagaagcagcgactgagccggaggcggaggcttgaggcctgcgggcctggtagcagctgcagctccgaagaaggagaagccggtcgggaaggtcgccctggaggagaagaacggggagctcgagtgggcgtcccacaggggagaatcccaggcgagcaggccaccagcccacctaccagcccgctgtgcctaccgagtcgtgagggtggagggtgcctccacgcaaccgtggtgtag

SEQ ID NO: 233751 - DNA, 2253 bp, synthetic construct
  misc_feature 1..2253: note = Description of Artificial Sequence: Synthetic coding sequence
  source 1..2253: mol_type = other DNA
atgcatcggcagcggactcgaaccatgtcaagcctggctgcaaaacgtttaggcatgaacaggcgccctgcgggttcagggggaggaggaggcgaggctgccacgtggggacatcgattttggagacctcaggaacgcccaaccgacaggaaccagggggaaatggcacacacctgccgcggaactataaatctgtcaaccgcccacatcgatacggaagattcatgtgggatattgctgaccagtggagccagatcctaccacctaaaggccagtagcgaggtcgatagacagcaatggatcacagcactcgagctggctaaggctaaagccgtgagggtgatgaacactcacagcgatgattccggagatgatgatgaggccaccacgcccgctgacaaatccgaattgcaccataccctcaagaatctgtctctgaaactagacgacctgtccacctgcaacgatttaatcgccaagcacggagctgcgctgcagcggagcctcactgaattggacggcctcaagatcccaagcgagagcggcgagaagctcaaagtcgtaaatgagagggctactctgtttaggattacctccaatgctatgatcaatgcctgtagggattttctggaattggccgagatccactctcggaagtggcagcgggctctgcagtatgagcaagagcagcgcgtgcatcttgaggagaccatcgagcaactcgccaagcaacataactcgctggaaagggcattccattcggcccctggaagaccagccaacccttcaaaaagttttatcgaaggatcactccttaccccaaagggcgaagacagtgaagaagatgaagacacagaatactttgacgccatggaagactctaccagttttattactgtgattacggaagccaaggaagataggaaagccgaagggagcaccggcaccagctctgtggactggtcatcagctgacaacgtgctcgacggcgcttcactggtgccaaagggatccagtaaagtgaaacgtagagtgcggatcccaaataagccaaattatagcctgaatctttggtcgattatgaaaaactgcatcggacgcgaactatcgagaattccgatgcctgtcaatttcaacgaacccctgtccatgctgcaaaggttgaccgaggacctggagtaccatcatctcttagacaaggccgtgcattgtacatcaagtgtcgaacagatgtgtctggtagcagcattttccgtctcgtcctacagtacaacagtgcatcgaatcgctaagccctttaaccccatgttgggcgagactttcgagctggaccgactcgacgatatgggactgcgctcactttgtgaacaggttagccaccatccaccttccgctgctcactatgtgttcagcaagcatgggtggtctctgtggcaggagatcaccatttcgtctaaattccgcggaaaatacatctctattatgcctctcggcgcaatccacttagagtttcaggcatccggcaaccactatgtttggcgcaagtccacttcaaccgtacataacatcattgtgggcaagctgtggatagatcagtctggcgatatagagattgtaaatcacaagaccaacgatcggtgccagctcaagttcctgccttactcatacttctcaaaagaagccgcaagaaaagttactggggtggtcagcgactctcagggaaaggcacattacgtgctcagcgggtcatgggatgagcagatggagtgctcgaaagtaatgcactcgtctccctcttccccctcttcagatgggaagcagaagacagtctatcaaaccctgtccgccaagttactgtggaaaaagtacccactcccggaaaacgctgaaaacatgtattacttctcagagctggctttaactctgaatgaacacgaagagggtgtcgctcctactgactcccggctgcgccctgaccagcggctgatggagaaggggcgatgggacgaagccaacactgagaaacagcgcctggaagaaaaacaacgactctccagaaggagacgcctggaggcttgtggcccaggtagcagctgctcgtccgaggaggagaaagaggcggatgcctacacccctctctggttcgagaagcggttagatccgctgactggggagatggcatgtgtttataaagggggttactgggaggcaaaggagaagcaggattggcacatgtgtccgaatatcttctag

SEQ ID NO: 233752 - DNA, 1980 bp, synthetic construct
  misc_feature 1..1980: note = Description of Artificial Sequence: Synthetic coding sequence
  source 1..1980: mol_type = other DNA
atgaaggggaggggctgttgggataccgcttccgtgcgctctttctgttcatccggttgtttgaacaagtttaagaaagatgattcaggggatgatgacgaagccactacacccgcagataaaagtgaacttcaccacaccctgaagaacttgagcttaaaattagacgacctcagcacgtgtaacgatttgatcgctaaacatggagcagccctgcagcggagcctcacagagctggatggccttaagatcccatccgagagcggggagaaactgaaggtggttaatgagagggctacgttattccgaatcacatctaacgccatgatcaatgcctgccgagatttcctcgaacttgccgaaatccacagccggaagtggcagagagccctgcagtacgaacaggagcagcgggtgcatcttgaggagacgattgaacagctcgccaagcagcataactcccttgagagggccttccattccgccccagggaggccagccaatccgtcgaagtcttttatcgagggctctcttctgactcctaaaggggaggacagtgaagaggacgaggatacagaatatttcgatgcaatggaagattcaacatcctttatcaccgtcattacagaagctaaagaggacagcaggaaagccgagggatcaacaggcactagctcagttgactggagtagcgcagataacgtccttgatggagcatcattagtacccaagggtagctcaaaagtgaaacgccgagtgcggattccgaataagcccaattacagtctcaatttatggtcaatcatgaaaaattgcattggccgtgaactctccaggatccccatgcccgttaactttaacgaacccctgagtatgctgcaaaggctcaccgaggacctggaataccaccatctcctggacaaagcggttcattgtaccagcagcgtcgagcagatgtgtctcgtcgccgcatttagtgtgtcttcttactctactacagtgcataggatagccaaaccttttaaccctatgctaggggaaacatttgagctcgatcgtctggacgacatgggcctcagaagcttgtgcgagcaagtcagtcatcatcctccgtctgccgctcactacgttttttccaagcatggttggagcctgtggcaggagatcacgatctcctccaaattcaggggaaagtatatcagcatcatgcccctaggagcaattcacctggaattccaggcgagtggtaatcactatgtctggaggaaatctactagtacagtgcacaacatcatcgtgggtaagctgtggattgaccagagcggtgatatcgagattgtgaatcacaagactaacgataggtgtcaacttaagttcctaccttactcttatttctcgaaggaggccgcacgaaaagtaaccggagtggtgagtgattctcagggcaaggctcactatgttctctccggctcttgggacgaacagatggaatgttccaaggtcatgcactctagcccatcatccccctcatctgacgggaagcagaaaacagtatatcagacgttgagcgccaagcttctgtggaaaaaatatcctctacccgagaatgcagagaacatgtactatttctctgagctcgccttgaccctaaatgagcatgaagagggagttgcaccaacagactcccggttgcggcctgatcagagactgatggaaaaaggccgatgggacgaggccaataccgaaaaacagaggttagaagaaaagcaaaggctctctaggcgcaggagattagaggcctgcggtcctgggagttcatgtagtagcgaagaagccgaaaaggaagccgacgcctatacacccctttggtttgagaagcggttagatcccttaacgggggagatggcttgtgtgtacaaaggtggctattgggaggcaaaggagaagcaggactggcatatgtgtcccaatatattctag

SEQ ID NO: 233753 - DNA, 1383 bp, synthetic construct
  misc_feature 1..1383: note = Description of Artificial Sequence: Synthetic coding sequence
  source 1..1383: mol_type = other DNA
atggaagactctacctccttcatcactgtcattactgaggccaaagaagatagaaaggcggaaggtagcaccggcaccagctccgtggactggtcctcagctgacaatgtgctcgacggagcctctttggtgcctaagggatccagcaaagtaaaacggagggtcagaatccctaataaacctaattatagtctgaacctgtggtcaattatgaagaactgcataggaagggaattgagccggatcccaatgcccgtcaattttaatgaacctttgagtatgctccaacggctcactgaggatttggagtaccatcacttactggataaggccgtgcactgcacatcttcagtcgagcaaatgtgtttggtggcagcctttagtgtttcttcgtacagtaccacagttcaccgcatagctaagccctttaaccccatgttaggcgagactttcgagttagacaggctcgatgatatgggcctccgcagcttgtgcgagcaagtgagtcaccatccaccgagcgcagcgcattatgtgttctccaagcacgggtggtccctctggcaggaaatcactatctcctccaaattcaggggcaagtacataagtattatgcccctcggggctattcacctggaatttcaggcgtcgggtaaccattacgtgtggcgcaaaagcaccagtaccgtccacaacatcatagtaggtaagctgtggattgaccaatccggtgatatcgagatcgttaaccacaagacaaatgacagatgccagttaaaattcttgccttacagctacttctcaaaagaggctgctcgcaaggtgactggcgttgtgtctgacagccaggggaaggcccattacgttttgtcaggatcttgggacgaacagatggaatgctcaaaagtgatgcatagcagcccaagctcgccttccagtgacgggaagcagaagacagtatatcagactcttagcgctaaactgctttggaaaaagtatcctctaccagaaaacgcagaaaacatgtattacttttccgaactcgccctgacgttaaatgagcacgaagagggcgttgctccaaccgactctcggctgagacccgatcagaggctaatggagaagggcagatgggatgaggctaatactgaaaaacagcgcttggaagagaagcagcggttgtccaggaggcggaggctcgaagcctgcggccctggcagtagctgttccagtgaggaggaaaaagaagctgatgcgtatacccccctatggttcgagaagagactcgacccattaactggggaaatggcctgcgtctacaaaggcggttactgggaggccaaggagaaacaagactggcacatgtgccccaatatcttctag

SEQ ID NO: 233754 - DNA, 2295 bp, synthetic construct
  misc_feature 1..2295: note = Description of Artificial Sequence: Synthetic coding sequence
  source 1..2295: mol_type = other DNA
atggaacgggcagttcagggcacggatggcggaggagggtcgaactcatccagccgaagcagtagtagagccacttcagcgggttccagtccatcatgttcattggccggacgcggagtgtcatctcggtccgcggctgctggcctggggggagggggaagtcgatccagcccaggctcagtcgcagcctcaccatccgggggtggaggtcgcaggcgtgaacctgcgctagagggagtgctgagcaaatacaccaacttactccaaggctggcagaaccggtacttcgtcctggactttgaagccggaattctgcaatattttgtcaacgaacaatccaagcaccagaaaccccgaggagtgttaagtttgagcggggcaattgtgtcactatcggatgaagctccgcacatgttagttgtatattctgcaaacggtgaaatgttcaagctacgagccgctgatgccaaagaaaagcagttttgggttacgcagttgagggcatgcgcgaaataccacatggaaatgaattccaagtccgcgccaagttctcggagccggagtctgacacttctgccacacggcacccccaacagcgcatccccctgcagccagagacacctctccgtaggagcccctggggtagtgactataacacatcacaagtctcccgctgctgccaggcgtgcgaaaagccagtatagtggtcagctacacgaagtcagagaaatgatgaaccaggtggaaggccagcaaaagaacctggtccatgcaattgagagcttgccaggatcagggccactgaccgctcttgaccaagacctgctcctgctgaaagcgaccagtgcagccacattgagctgtctcggcgaatgtctgaatttactgcagcagagcgtgcaccaggctggacagccatcacagaaacctggagctagtgagaatatcttaggatggcatggctcaaagtcccactccactgaacagcttaagaacgggactctggggagtttgcccagtgccagtgccaatatcacgtgggcaatactgcccaacagcgctgaagacgaacaaacatctcagcccgagcctgaaccaaattcaggcagcgagctagtgcttagcgaagacgaaaaaagcgacaacgaagataaggaggaaaccgaattgggggtgatggaggatcagcgctccattatcctgcatcttatctcacagctgaaacttggcatggatctgaccaaggttgttttgccaacattcatcctggaaaaaagatctttgctggagatgtacgctgacttcatggcccaccctgatctcctgctggctatcacagccggagccactcctgaggagagggtgatctgtttcgttgagtactatcttactgcttttcacgaagggagaaagggggctttagccaagaagccgtacaatccgatcatcggcgagacgttccactgctcatgggaggtgccaaaggatcgggttaagcccaaaagaacagccagtcgaagcccagcttcttgccatgagcatcctatggcggatgaccccagcaaaagttacaagttgagattcgtggcggagcaggtgtcccatcatcccccaattagttgtttctactgcgagtgtgaggagaagaggctttgtgtgaatactcacgtctggaccaaatcaaagttcatgggcatgagtgttggggtgagcatgattggtgagggcgtgctgaggctccttgagcacggcgaagaatacgtgtttaccctgccctcggcttacgccagaagcatacttaccatcccttgggtggagttgggaggaaaagtgtccatcaattgtgcaaaaacaggctattcagctactgtgatctttcatacgaagccattctatggcggaaaggtgcaccgagtcactgctgaggtgaagcacaatcctacgaataccatcgtgtgcaaggcccacggtgaatggaacggtacacttgaattcacctataacaatggggaaactaaggtaatcgacaccaccactctgcctgtgtatccgaaaaagattagacctctcgaaaagcaaggacccatggaatcaaggaatctttggcgggaggtgacgcggtatctgaggctgggtgatattgatgctgccacagaacagaaacggcatcttgaggaaaagcaacgcgtggaggaacgcaagcgcgagaatcttcggaccccctggaagcctaagtactttatccaggaaggagacggctgggtctatttcaatcccctgtggaaagctcattag

SEQ ID NO: 233755 - DNA, 2103 bp, synthetic construct
  misc_feature 1..2103: note = Description of Artificial Sequence: Synthetic coding sequence
  source 1..2103: mol_type = other DNA
atggaacgggcagttcagggcacggatggtggcggagggtcaaactccagcagccgcagttcctcacgggcaacgagtgctggctctagccccagttgctctctggccggaagaggcgttagctcacgctccgccgcagctggattgggtgggggaggaagtcgctcatctcctggttctgtggccgcatcgcctagtggcggtgggggacggcgtcgcgagcccgctctggaaggtgtcttgagtaagtacaccaacctcttacaggggtggcagaaccgatattttgtcttggacttcgaggcaggaatcctgcagtactttgtgaacgagcaatctaaacaccagaagcctcgaggtgtgctcagcctgtccggcgctatagtgtcgctatcagacgaggcaccccatatgctcgtggtctattctgccaatggtgagatgttcaaactacgcgcagctgacgcaaaggagaaacagttttgggtcacacagctcagggcctgtgccaagtaccacatggaaatgaacagcaagatgatgaatcaggtcgagggccagcagaaaaacttggtacatgccattgaaagtttaccaggaagcggccctctgacagcgctggatcaagacttgctgctcctgaaggctacaagtgccgctactcttagctgcctgggagagtgccttaaccttctccagcaatcagtgcaccaggcaggacagcccagtcagaagccaggggcttcagagaacatccttgggtggcacggcagcaagtctcatagcactgagcagctgaaaaatggcaccctgggttccctaccatccgccagcgctaatatcacgtgggcaattctgcccaactccgctgaagatgaacaaacctcgcagcccgaaccggagcctaacagcgggagtgaactggttttgagtgaagatgagaagtccgacaacgaggataaggaagagaccgagctgggggtaatggaagaccagcggagcatcatacttcatcttatatctcagctaaagcttggaatggacctgacaaaggtggtgttaccaaccttcattctggagaagaggagcctgttagagatgtacgccgatttcatggcccacccagacctgctgctggccatcaccgcgggagccactcccgaggagagggtaatctgctttgttgagtactacctgaccgcattccacgagggcaggaagggagctctggccaagaaaccttataacccaatcatcggagagacattccactgttcttgggaggtccccaaggatcgcgttaagcctaagcgtaccgcgtccagatcaccggcatcatgccacgagcaccctatggctgacgacccctcaaagagctacaagctgcgattcgtcgccgaacaagtatcgcatcaccccccaatctcatgcttttattgtgaatgcgaggagaaacgtctgtgtgtgaatacccatgtctggacaaagagtaaatttatgggcatgtccgtgggggtctctatgatcggcgagggagttctcagactgctggaacatggcgaggagtacgtctttacactcccctctgcttacgctcggagtatccttactatcccctgggttgagcttgggggaaaggtttctatcaattgcgcgaaaactggatacagcgccaccgtcatttttcacacaaaacctttctacggtggtaaagtacaccgcgtgaccgccgaggttaagcataatccgaccaacaccattgtatgcaaggctcacggcgaatggaacggaactctggagttcacgtataataatggggaaacaaaagtaatcgacaccaccacattgcccgtataccccaagaaaatccggcctctggagaaacagggcccaatggagtcacggaatctctggcgggaagtgacgcggtacttgcgccttggggacatcgatgctgcaactgagcagaaacggcacttggaggaaaagcaacgggtggaagagcgcaaaagggaaaacttgaggactccatggaaaccgaaatactttattcaggagggggacggttgggtatactttaatcccctctggaaagcacactag

SEQ ID NO: 233756 - DNA, 2244 bp, synthetic construct
  misc_feature 1..2244: note = Description of Artificial Sequence: Synthetic coding sequence
  source 1..2244: mol_type = other DNA
atgcagggaggggaaccagtgtccaccatgaaggtcagcgagtcagaggggaagctggagggccaagccaccgcggttacccctaataagaacagctcatgcggcggaggcataagctcatctagctcatctcgtgggggaagcgccaagggatggcaatactctgatcatatggagaatgtgtatggctacctgatgaagtatactaatctggttacaggttggcagtaccgcttttttgtccttaacaatgaagctggcctactcgagtatttcgttaacgagcagtcaagaaaccagaagcctcgcggtaccctacaattggccggagccgtcatatcacccagtgatgaggattctcatacgtttacggtcaacgccgcatcaggggagcagtataagctcagagctaccgacgcaaaggaacgacagcattgggtgagcagactgcagatctgtacacagcaccatactgaagctattgggaaaaataacccacccttaaagtcgaggtcattctcacttgcctctagcagcaactctcctatctcccagagaaggcctagccagaatgctattagcttcttcaacgtcgggcatagtaagctccagtcgcttagcaaaagaaccaatttgcctccagaccatctggtcgaagttcgagagatgatgtcgcatgcagaaggacagcagagggatctgattcgaagaatcgagtgcttaccaacatccggacacctttccagccttgaccaagacctgctgatgctgaaagccacatcgatggctacaatgaattgcttgaacgactgtttccacatcctgcagcttcagcacgctagtcaccagaaaggctctctcccttcaggaaccaccatcgaatggctcgagccaaagatctcgctctcaaaccattacaagaacggtgccgaccagcccttcgccactgatcagagcaaacctgttgcagtgcccgaggagcagcctgttgccgaaagcggtttattagccagggaaccagaggagatcaacgccgacgacgaaatcgaggacacctgtgaccacaaggaggatgacctgggcgctgtggaagagcagcgctccgtgatccttcacctgctgtcccagctgaagcttggaatggatcttaccagagtggtgttgcccacctttatcctcgagaaacgaagcctgctcgaaatgtatgctgactttatgagccacccagacctgtttatcgccatcaccaacggcgctactgccgaggatcgaatgattcgttttgtagagtattatctgacatctttccacgaaggtagaaagggggcaatcgccaagaaaccttataatccgatcatcggcgagaccttccattgttcctggaagatgccaaaatccgaagtggcttcttcagtgttctcttcctctagcacccagggggtgactaaccacgctccactgtcgggcgagtccctcacgcaggtgggttctgactgttacacagtgaggtttgttgccgaacaagtcagtcatcatccacccgtaagtgggttctatgctgaatgtacagagcgcaagatgtgcgtgaacgcccacgtctggaccaaatccaaattcttgggaatgtctattggagtgaccatggtaggcgaaggcatcttgagtcttcttgagcatggcgaagaatataccttctctctcccttgtgcctacgcacggtccatcctcacagtgccctgggtagaattgggcggtaaagtcagcgtgaactgcgccaagacaggatattccgctagcatcactttccacaccaagccgttttatggtggcaaactgcaccgagttacagcagaggtcaaacacaacattaccaacaccgtcgtgtgcagagtacagggtgagtggaatagtgtcctggaatttacatatagtaacggtgaaacaaagtacgtcgacctgaccaagctggccgttactaagaagagggtgagacctttagagaaacaagatcctttcgagtctcggcgactgtggaagaatgtaacagactctttgcgcgagagtgaaatcgacaaggccacagaacacaagcatactctagaggagagacagcgcacagaggagaggcacagaaccgagaccggaacaccctggaagaccaaatacttcatcaaagaaggggatggctgggtgtaccataagcctctttggaaaattattcccacaactcagccagcagagtag

SEQ ID NO: 233757 - DNA, 2853 bp, synthetic construct
  misc_feature 1..2853: note = Description of Artificial Sequence: Synthetic coding sequence
  source 1..2853: mol_type = other DNA
atgaatacagaagccgagcagcagctgctgcatcacgcgaggaacgggaatgcagaagaagtccggcaactcctcgaaacaatggcgcgtaatgaagtgatcgccgatattaactgtaaagggaggtcaaaaagcaatcttgggtggactccactgcacttagcttgctatttcgggcatagacaggtggtccaggatcttctgaaggcaggcgcagaggtcaacgtgttaaacgacatgggcgatactccattacatcgcgctgctttcacaggcagaaaagagctagtcatgctgctgcttgaatacaatgctgacacaacgatcgtgaatggttcgggccagacagccaaggaggttacccacgccgaggaaatcagatcaatgctggaggctgtcgagcggacacagcagaggaagctagaggaacttctgctggccgctgctagagagggcaagaccaccgaactgactgccctcctgaacaggcccaaccccccagatgtcaactgttccgatcaactagggaatacgccgcttcactgcgccgcatatagagctcataagcagtgcgctctgaagttgctgcgatccggcgctgatccgaatctcaagaacaaaaatgatcaaaaacctctggacttggctcagggcgcagaaatgaaacacatcctagtgggcaacaaggtgatctataaggccctcaaaaggtatgagggtcctctgtggaagtcttcacgcttctttggctggagactgttttgggtggtcctggagcatggcgtgctgagctggtaccggaaacagcctgatgcggtccacaacatctataggcagggatgtaagcatctcacgcaggctgtctgcactgtgaagtcaaccgactcctgtctgttcttcataaaatgctttgacgacacaattcatgggtttagggtaccgaaaaacagtcttcagcaatcaagggaggactggctcgaggccatcgaggagcatagcgcctactccacccactactgttcccaggatcagctgaccgacgaggaagaggaggatactgtgagcgcagccgatctgaaaaagtctctggagaaggcccagtcttgccagcagcgattggaccgggagatatctaacttcctcaaaatgatcaaagagtgtgacatggccaaggaaatgctcccaagtttcctgcagaaagtcgaagtagtgtctgaggccagtagagagacgtgtgtggctttgaccgactgcctaaatcttttcacaaagcaagagggggtaagaaatttcaaattagaacaggaacaggagaaaaataagatcctcagcgaggccttagagaccctggcaactgaacatcatgagttggagcagagtctggttaaggggagcccccctgcttcaatcctgtctgaggacgagttttacgatgcccttagtgattctgagagtgagagatcactgtctcgcctggaggccgtcacagcacggagcttcgaggaagaaggggagcatttggggtctaggaagcacagaatgtcagaagagaaagactgcggcggtggggacgctttaagcaatgggatcaagaaacatcgcacttcgttaccgtctcctatgttctcccgcaatgatttcagcatctggtcaatcctcaggaagtgtatcggtatggagctgagcaaaatcacaatgcctgtgatttttaatgaacccctatctttcctccagcggctgactgaatatatggagcacacctacctcatacacaaggcctcttctctctccgatcccgttgagaggatgcagtgtgttgccgcttttgccgtgtccgccgtggctagccagtgggaacggaccggcaaaccatttaatccacttttgggagagacctacgagctggtccgagatgacctcggcttccgactcattagtgagcaagtaagccaccatccacccatctctgcctttcacgcagagggactgaataacgatttcatttttcacggcagcatctatcctaagctcaagttttggggcaaaagcgtcgaggccgaaccgaagggtactattacactggaactcctggaacacaacgaggcatacacttggaccaatcctacctgctgtgtgcataacataatagtgggtaagctctggatcgagcaatacggcaatgtggaaataatcaaccacaagaccggggacaagtgcgtgcttaatttcaagccctgcggcttatttggcaaggagctgcacaaagtcgaagggtacattcaggacaagagcaaaaagaaactttgcgcactctacgggaagtggaccgagtgtctgtactctgtcgaccctgctaccttcgacgcctacaagaagaacgataaaaaaaatacagaggagaaaaagaattctaaacagatgtcgaccagtgaggagttagacgagatgcctgttccggacagtgaaagcgtatttatcatccccggaagcgtactcctgtggcggatagcacctagacccccaaattcagcgcagatgtataattttacttccttcgcaatggtgctgaatgaggttgacaaagatatggaaagcgtcattccaaaaactgactgtcggctgaggcctgatattagggccatggaaaatggtgagatcgatcaagccagtgaggagaaaaagcgactcgaggaaaaacaacgtgccgcacggaagaataggtctaagagcgaggaggactggaaaaccaggtggttccatcaggggccaaatccatacaacggcgcacaggattggatttattccgggtcctattgggacaggaattacttcaacttacctgacatctactag

SEQ ID NO: 233758 - DNA, 1707 bp, synthetic construct
  misc_feature 1..1707: note = Description of Artificial Sequence: Synthetic coding sequence
  source 1..1707: mol_type = other DNA
atgattaaagagtgcgacatggctaaggaaatgctcccctcctttttgcagaaggtcgaggtcgtctcagaagccagtagggagacgtgcgtggccctcactgattgcctgaacctcttcactaaacaggaaggggtccgtaattttaagctggagcaggaacaggaaaaaaacaaaatactgtctgaggccctggaaaccctggctacagaacaccacgagctcgagcaaagtttggtgaagggcagcccccctgccagcatactcagtgaggacgagttttacgatgccctgagcgatagcgaatccgagcggtcgctgtctagattggaggccgttaccgccaggagtttcgaggaggagggtgagcacctggggtctcgtaagcatagaatgtctgaagagaaagactgcggaggcggtgacgccctcagtaacggcattaaaaaacaccgcacatctctgcctagccccatgttctcacggaatgatttttcaatttggtccatcctccgcaagtgtatcgggatggagctctccaaaattaccatgcccgtcatctttaacgagcctctgtccttcttgcagagattaaccgagtacatggaacacacatacttaattcacaaagcttcgtccctgtccgaccccgtagagcgcatgcaatgtgtcgcagcatttgcagtgtccgccgtcgctagccagtgggagaggacaggcaagccctttaatcccctgctgggggagacttacgaacttgtacgggatgacctgggctttaggctgatctccgagcaggtttctcatcaccctcccatctccgcctttcacgcagaaggtttgaataatgattttattttccatggctccatttacccaaaacttaaattctggggcaagtccgtggaggcagagccaaagggcacaatcacactagaactcctagaacacaatgaagcctatacttggaccaatcccacatgctgtgtgcacaacataatagtggggaagctctggattgaacagtacgggaacgtggaaataatcaaccataaaacgggagacaagtgcgttctgaacttcaagccatgcggattattcggaaaagagctgcacaaagtggaggggtatatccaggacaagtctaagaagaagctatgtgccctgtacggaaaatggactgaatgcttatactccgtggatccagctactttcgacgcctacaagaaaaacgacaagaaaaacactgaagagaagaagaacagtaagcagatgtctacatcagaggagttggacgaaatgccagtgccagattctgagagcgtgttcataattccaggttctgtgctcctctggcggatcgcccctaggcctccgaactccgcgcagatgtacaacttcacaagctttgctatggtgctgaacgaggtggataaggacatggaatccgtgattccgaagaccgactgtaggctccgtccagatatcagagcaatggaaaacggtgagatagatcaggcttccgaggaaaaaaagcggcttgaggaaaagcagagggcagccaggaagaatagaagcaaaagcgaagaggattggaagacccgatggttccaccaagggccaaatccctataacggtgcccaagactggatctactctggtagttattgggaccgcaactacttcaacttacccgacatctattag

SEQ ID NO: 233759 - DNA, 303 bp, synthetic construct
  misc_feature 1..303: note = Description of Artificial Sequence: Synthetic coding sequence
  source 1..303: mol_type = other DNA
atgaacactgaagctgagcagcaactgttacaccacgccaggaacggcaatgcagaagaagtgaggcagctcctggaaacaatggcacggaatgaggttatcgccgacatcaattgcaaaggtaggtcgaagagtaacctggggtggacacccttgcacctcgcgtgctatttcgggcaccgacaggtggtgcaagacttgcttaaagcaggagccgaagttaacgtactgaatgacatgggtgacacccccttacaccgcgcagccttcaccgggaggaaaatttgttcgcaggggtcctag

SEQ ID NO: 233760 - DNA, 1314 bp, synthetic construct
  misc_feature 1..1314: note = Description of Artificial Sequence: Synthetic coding sequence
  source 1..1314: mol_type = other DNA
atgtcagaagagaaggactgtgggggtggcgatgctctgtccaacggcataaagaagcacagaactagccttcctagccctatgttttctcggaacgatttttctatctggtcaatcctgcgcaaatgcattggaatggagttatccaaaatcaccatgccagttatttttaacgagccactgtccttcttacagagattgacagagtacatggagcacacatacctgatccacaaggctagctcactgagtgatccagtggagcgcatgcagtgcgttgctgcgtttgccgtgtctgccgtggcgtcgcagtgggaaaggacagggaagccattcaaccccttgctgggggagacctacgagttagtccgggacgatctcgggtttagactgatcagtgaacaggtaagccaccaccccccaatctccgctttccatgctgaggggcttaataacgactttatctttcatggctctatctatccgaaactaaagttctgggggaagtccgtggaggcagagccaaagggcacaatcacactggaactgctggaacacaacgaggcctacacatggactaatccgacttgctgcgtgcacaatattattgtgggaaaactgtggatcgagcagtatgggaacgtggagatcattaaccataagaccggcgacaaatgtgtgctcaacttcaaaccttgcgggttatttggcaaggaactccataaggttgagggctacatccaggacaaaagtaaaaaaaaactgtgtgccttgtatggtaagtggaccgagtgtttgtactccgtcgaccctgcaactttcgacgcgtacaagaagaacgacaagaagaataccgaagagaagaagaactccaaacagatgtctacaagcgaggagcttgatgagatgcctgtgcctgactcggagagtgtcttcattatccccggttccgtgttactatggagaattgcaccccgaccacccaattccgcacagatgtataatttcacgagtttcgcgatggtgctgaatgaagtggacaaggatatggagtctgttatacctaaaactgattgtagattacgaccagatatcagagctatggaaaacggtgaaatcgaccaagcatctgaggagaagaagcgcctggaagagaagcagcgagccgcacgaaaaaaccggtcaaagtcggaagaagattggaaaaccagatggttccaccaggggccaaacccttacaacggcgcacaagattggatatacagcggaagctattgggatcgcaattactttaatctgcctgatatctactag

SEQ ID NO: 233761 - DNA, 345 bp, synthetic construct
  misc_feature 1..345: note = Description of Artificial Sequence: Synthetic coding sequence
  source 1..345: mol_type = other DNA
atgcagagcgtcgcagcttttgcagtatctgccgtagctagccagtgggagcgaaccggaaagccgtttaacccactcctcggggagacctacgagctgattagagaggacctggggtttagattcatcagcgagcaagtatcacatcaccccccaatctcggctttccactctgagggactcaatcacgactttctgtttcacggcagtatctatcctaagttaaaattctggggcaagtctgtcgaggcagagccgagagggacaattacgctagaactgcttaacgtgaatcagaggcatctaagagcaaaacataagtctccaacaaatgccggtaggtag

SEQ ID NO: 233762 - DNA, 1443 bp, synthetic construct
  misc_feature 1..1443: note = Description of Artificial Sequence: Synthetic coding sequence
  source 1..1443: mol_type = other DNA
atgaacggagaggaggaattctttgacgcggtcaccggattcgactccgataatagttctggcgagttttctgaggcaaaccagaaagttactggaatgatagatttagataccagcaaaaacaatcggattgggaaaactggagagaggccttctcaagaaaacggaatacagaaacaccggacaagtctgcctgcccctatgttctcccggtctgacttcagcgtttggacaattctgaaaaagtgtgtcggcctggaactaagtaaaatcaccatgcctatcgctttcaacgagccactcagttttctccagagaatcacagaatatatggaacacgtttacctcatacacagggcctcatgccagcctcagccactagagcggatgcagtccgttgctgcattcgcagtgagcgctgtggcctcacagtgggagaggaccgggaaacctttcaatccactgctaggcgaaacctatgaactcatccgagaggacctcggtttcaggttcatctcggaacaggtttcccatcacccaccaatctcagcctttcatagcgaaggtctcaatcacgacttcctatttcacggcagtatctaccctaagctgaagttctggggaaagtcggtcgaagcagaacctcggggaacaatcacactcgagctgcttaagcacaatgaggcatatacttggacaaacccaacctgttgtgtgcataacgtaattatcggtaagctgtggatcgaacaatatgggaccgttgagatcttaaaccatcgcaccgggcataaatgcgtgctccatttcaaaccttgcggcctgtttggaaaggaacttcacaaagtagagggtcacatacaggacaaaaacaagaaaaaattgtttatgatctatggcaagtggaccgagtgcctgtggggtatcgaccccgtctcatatgaaagcttcaaaaagcaagaaaggcggggtgaccatctgcgcaaggcgaagttggacgaagattcgggcaaggccgatagcgacgtagctgacgatgtccccgttgcccaggaaacagtacaggtgatcccaggatcaaaactgctctggcgaataaacactagacccccaaacagcgctcagatgtacaatttcacgagttttactgtctccctgaacgagctggagacaggaatggagaagaccctcccacccaccgactgtagactgaggcctgacataagaggcatggagaacgggaacatggacttggcttcccaggagaaggagcgtctggaggagaagcagagggaggctcggagggagagagcaaaggaagaggccgaatggcagactcgctggttctaccccggaaataatccgtataccggtacacctgattggctgtatgcaggagactactttgagcggaactttagtgattgccctgacatttattag

SEQ ID NO: 233763 - DNA, 1407 bp, synthetic construct
  misc_feature 1..1407: note = Description of Artificial Sequence: Synthetic coding sequence
  source 1..1407: mol_type = other DNA
atgaatggggaggaggagttcttcgatgcagttacagaggctaaccagaaagtaaccggcatgattgatctggacacaagcaagaacaaccggatcggcaaaacaggtgaacggccttcccaggaaaacggcattcaaaaacatcgtacatcactgccagccccaatgttttctagatcagatttcagcgtttggactatcctgaagaaatgcgtgggcttggagctgtctaaaatcacgatgcctattgcattcaacgaaccgttaagctttttgcagcgaattactgagtacatggaacacgtgtacctcattcaccgagcttcctgccagccccaaccactggagagaatgcaaagcgttgccgcttttgcagtgtccgccgttgcgtcccagtgggaacgaacaggcaagccatttaacccactcttaggagagacttatgagttgatccgggaagatcttggctttaggttcatctctgagcaggtgtcccaccatccccctatctccgcattccactcagaagggctcaaccacgatttcctgttccacggctccatctacccaaaacttaaattctggggcaaatccgtggaggccgagcccaggggcaccataactctggaacttttaaaacacaacgaggcctacacatggactaatccaacttgttgtgtacacaacgtgatcatcggaaagctctggattgagcagtacggaaccgtagagattctgaaccataggaccggccacaaatgtgtgttacactttaagccttgcggcctctttggaaaggaattgcacaaagtcgagggacatatccaggataaaaacaaaaaaaagctgtttatgatttatggcaaatggactgagtgtctctggggcatagatccagtgagttacgagtcctttaagaaacaggagcgacggggagatcacttgagaaaggctaagctagacgaggatagcggcaaggcagattccgacgtggcggacgatgtgcccgtcgcccaggagaccgtgcaggtgatacctgggtcgaagctcctgtggcgcatcaacaccagacccccaaacagcgctcagatgtacaactttacctcatttaccgtgagcctgaatgagctggagacaggcatggagaaaaccctaccccctaccgattgtagattgcgacctgacattcggggaatggaaaatggaaatatggacctggcctctcaagagaaggaaaggctggaggaaaaacagagagaggccagacgggagcgcgcaaaagaggaagccgagtggcagacaagatggttttatcctggcaacaacccgtataccggcacacccgactggttgtatgctggcgattattttgagaggaatttctcagattgtcccgacatctactag

SEQ ID NO: 233764 - DNA, 1113 bp, synthetic construct
  misc_feature 1..1113: note = Description of Artificial Sequence: Synthetic coding sequence
  source 1..1113: mol_type = other DNA
atgccaattgcatttaacgagcctttaagcttccttcagagaatcactgaatatatggaacatgtttatctcatccatagagcttcctgccagccccagccgctggaaaggatgcaaagcgtggccgctttcgctgtttcagctgtagcgtcccaatgggaaaggacaggcaagccattcaaccccctgttgggcgaaacttatgagctcattcgggaggacctgggcttcagatttatcagcgaacaggtgagccaccacccgccaatatcagccttccattcagaagggttgaaccacgacttccttttccacggaagcatatacccgaagcttaaattttgggggaagtctgtcgaggccgagccccgaggaactattaccctggaattactgaaacacaatgaagcctacacctggacaaatcccacctgctgcgtgcataatgttatcatcggaaagctgtggattgagcaatacgggaccgtcgagatcctcaatcacagaaccggccataagtgcgtactgcattttaagccctgtgggttgtttggtaaagagctccacaaagtagaaggccatatccaggataaaaacaagaaaaagctatttatgatatacggaaagtggacagagtgcctatggggaattgaccccgtatcatatgaatcgtttaaaaagcaggagaggagaggggaccacttgcgcaaggcaaagctggacgaggattctggcaaagcggattctgacgtcgccgatgacgtccctgttgcccaggagactgtccaggttatccccggtagcaagttactgtggcgcatcaatacccggcctcccaatagcgcccaaatctggcctgctaggaggcgatccggatggagacgttcacgagagaaacacggcggttctggacccaggcggagacaaagtggtcgaagagggggatctacacaggccataactccgacactgggccctcctacaggctgcatgcagggcatcaccttgtctggaatttccccaacagcacaaatctcaactgaaggtttagagggcccaggggctcgtgataggaggctgaccagactggattttttggaatggccactgtag

SEQ ID NO: 233765 - DNA, 339 bp, synthetic construct
  misc_feature 1..339: note = Description of Artificial Sequence: Synthetic coding sequence
  source 1..339: mol_type = other DNA
tccgttgccgctttcgccgtatccgcagtcgcctcccagtgggagcggaccggaaagccgttcaaccccttactgggggaaacttatgaactcatcagagaagacttggggtttagatttattagcgagcaggttagtcatcacccgcctattagtgcctttcactccgagggccttaatcatgactttctgttccacggcagtatatatcccaaactgaaattttgggggaaaagcgttgaagcggaacctcgcggaactatcacgctcgagcttctcaatgtgaatcaacgccatctgagggcaaaacataagtcccctaccaacgcaggacgctag

SEQ ID NO: 233766 - DNA, 2664 bp, synthetic construct
  misc_feature 1..2664: note = Description of Artificial Sequence: Synthetic coding sequence
  source 1..2664: mol_type = other DNA
atgatgtcagacgagaagaaccttggagtctctcagaagctcgtctcgccatcaagatcgacctccagctgtagttccaagcaaggctccagacaagactcctgggaagtggtcgagggattgaggggcgagatgaactatacgcaggaaccccctgtccagaaaggctttttactgaaaaagagaaaatggccgctgaaggggtggcataagcggtttttctacctggacaaagggattctcaaatacgctaagtcgcagaccgatattgaacgcgagaaactgcacggctgcatagatgtcgggttatcggtcatgagtgtcaaaaaaagtagcaagtgtatcgacttagacaccgaagagcatatttaccatctgaaggtgaagagcgaggaagtttttgatgaatgggtgtccaagctgcgccatcatcgcatgtaccggcagaacgagatagcgatgtttccgcacgaagtgaatcatttttttagtggtagtacaattaccgacagctcctcgggagtctttgactcaattagctcccggaaacggtcctccatctccaagcagaacctgttccagaccggctctaacgtctcattctcatgtggcggagaaacacgcgtgcctttgtggctacagtcatccgaggacatggaaaagtgctcaaaagacttggcacattgccatgcttatctcgtagagatgagtcagctcctgcagtcaatggacgttctgcaccggacctacagcgcccctgcaattaacgccattcaggggggttccttcgagtcccctaaaaaggagaagaggagtcataggaggtggcggagtcgggctatcggaaaagacgccaaaggaacgctgcaggtgccaaagcctttctctgggcctgtgcggctgcattcatcaaaccctaatctttccacgctcgattttggagaagagaagaactacagtgatggttctgagacaagcagcgaattcagcaaaatgcaggaagacctttgccacatcgcccataaggtctattttacgttgcgctccgcctttaatattatgagcgccgaacgggagaaactgaagcaactaatggaacaggacgcctctagctctccctccgctcaagtcattgggcttaaaaacgccctgagcagtgcacttgcccagaacacggatttgaaagagcgcctgcgtagaatccacgccgagtccctcctgttggactcgcctgccgtcgccaagtctggggataatctcgccgaagagaactcgcgcgatgagaacagggccctggtccatcagctgtcgaatgaaagccggttatccattaccgatagcttgtccgaattctttgatgcccaggaagtactgctgagtcccagctcctcggagaacgagatctccgatgatgacagctacgtgagtgatatttccgataatctgtccctggacaatctctcaaatgacctggacaacgagcgtcaaactctcggccctgtgcttgactcaggtagggaagcaaaatctcgcaggcgcacctgtttgccagccccatgcccttcatcctcaaatatctctctctggaacatccttaggaataacatcggtaaggacctgtcaaaagtggctatgcccgtcgaattgaatgagcccctaaatactctccaacgcctatgtgaggagctggaatatagcgagctactagataaggctgctcagattcccagccctctggaaagaatggtgtacgttgcagcatttgctattagtgcgtatgcatcttcctattaccgcgctggcagtaagccttttaatccagtcttgggagaaacatacgaatgcattcgggaagataaagggttccaatttttcagtgagcaggtaagtcatcaccctcctattagtgcctgccatgctgaaagcagaaattttgtgttctggcaggacgtgagatggaaaaataaattttggggcaaatctatggagatagtgcctattggaaccactcatgtaactcttccagtgttcggtgaccatttcgagtggaataaggttacgtcgtgtatccacaatattctgtccggacagcgctggatcgagcattatggcgagatcgtgattaagaatttacatgacgactcctgttattgtaaggttaactttataaaggccaagtactggtcaacgaacgctcacgagattgaaggaacagtttttgataggagcgggaaggctgtgcaccgcctctttggcaaatggcacgaatccatctattgcggcggaggttcttcatctgcctgtgtttggagagcgaatccgatgccgaaggggtatgagcagtactatagcttcacccaattcgccctggagttaaacgagatggacccaagttctaaaagtctgctgccccctacggatacccggtttcggcctgaccagagattcctcgaggagggtaatctggaggaggctgagattcaaaagcagcgtatcgaacagctccagcgtgaacgaaggagagttttggaggaaaatcacgttgaacaccagccgagattttttagaaaatcagacgacgatagctgggtatctaatgggacttacttagaattgcgtaaggatctggggttctctaagctggatcatccggtcttatggtag

SEQ ID NO: 233767 - DNA, 2571 bp, synthetic construct
  misc_feature 1..2571: note = Description of Artificial Sequence: Synthetic coding sequence
  source 1..2571: mol_type = other DNA
atgatgagtgacgagaagaatttgggtgtctcccaaaagctcgtaagcccatcgagatcaacatcatcttgttcgtccaagcagggctctaggcaggattcctgggaggttgttgagggtcttcgaggtgaaatgaattacacacaagaaccaccagtacagaagggcttcctactgaagaagcggaaatggcccttgaaaggctggcacaagcgattcttttacctggataagggcatcctgaaatatgctaaatcccagacagacatcgagagagagaagttgcatggctgtatcgacgtgggcttgtcggtgatgtctgtcaagaaaagtagcaagtgtatagacttggataccgaggaacacatttaccatctaaaggtaaaaagtgaggaggtgttcgatgaatgggtgagcaagcttcgtcatcacaggatgtatcggcagaacgaaatagctatgtttccccacgaagtcaatcatttcttcagcggctccaccataaccgatagctcctctggcgtattcgactcaatcagttcaaggaagcggagttctatcagtaagcagaacctgttccagaccggttccaacgtatctttctcttgtggaggggagacacgcgtccctctgtggttgcaaagcagcgaggacatggagaagtgtagcaaggacttggcgcactgccatgcatacctggtggaaatgagccagctgctgcagtccatggacgtgctccaccggacctacagcgctcccgcaattaacgctatccaggtgccgaaacctttttccggcccagttaggctgcattcctccaaccctaatcttagcactttggactttggagaagagaagaattattccgatggttccgaaacatcctccgagtttagtaaaatgcaagaagatctgtgtcacatagctcataaagtgtattttacgttgagatctgcttttaatatcatgtctgccgagcgagaaaaactgaagcagttgatggagcaagatgcctctagctctccatccgctcaggtgattggactcaagaatgccctctcaagcgccttagctcagaacacagatctgaaggaaaggctgcgtcgtattcatgccgaatccctgctattagacagcccagctgtcgcaaagagcggtgataatctcgccgaggaaaatagccgcgacgagaacagggcgctggtccaccagctgtcgaatgaatcccgactgtcaatcacggacagtctgagcgagttttttgacgcccaggaggtactgctcagtcctagctccagcgagaacgaaatatcagatgacgactcatacgtgagcgacatctctgacaatctgagtctcgacaacttaagcaacgatctggacaacgagcgtcagactctggggcctgtgctcgatagcgggagggaagcaaagagtaggcggagaacctgcctgccagccccttgcccctccagcagcaatatcagcctctggaacattttgcgcaacaacatcgggaaagatctgagcaaagtggccatgccagttgagctgaacgaacctttgaacaccctccagagactgtgcgaggagcttgagtactccgagttgctggacaaagccgctcagattccttccccattagaacgcatggtttatgttgccgcatttgccatttctgcctacgcctcgagttattaccgcgcaggaagcaaaccttttaatcctgtgttgggtgaaacgtacgagtgcatacgggaggataagggattccaatttttcagtgagcaagtgtcccatcatcccccaatttccgcttgccacgcagagagtcgcaatttcgtattctggcaggacgtgaggtggaagaataagttttggggaaaaagcatggagatcgtgccaatcggaactactcacgttactttaccagtattcggggatcattttgaatggaataaagtgaccagctgcattcacaacatcctcagcggccaaaggtggatagaacactacggtgagatagtgataaagaacttacacgatgactcatgttactgcaaagttaacttcattaaagcaaagtactggtccacaaatgctcatgaaattgaaggtaccgttttcgacaggtcaggcaaagcagttcataggcttttcggaaagtggcacgagtctatttactgtgggggtggcagctcaagcgcatgcgtgtggagggccaatccaatgcctaaggggtatgagcaatactacagcttcacccagttcgcactggagctgaacgagatggacccaagctccaagtcactcttgcctcctactgacacacgattcaggcccgatcagagatttctggaggaggggaacctggaggaggctgagatccaaaagcagcgtattgagcaactccagcgggaaaggaggcgtgtgttggaagagaatcacgtagaacaccagcccagattcttccgaaagtccgatgatgactcctgggtaagtaacggtacctatttagagttgcgcaaagatttgggcttcagcaaattagaccatcctgttctgtggtag

SEQ ID NO: 233768 - DNA, 2556 bp, synthetic construct
  misc_feature 1..2556: note = Description of Artificial Sequence: Synthetic coding sequence
  source 1..2556: mol_type = other DNA
atgatgtccgacgaaaaaaacttgggagtgtcccagaaacttgtgtcccccagtcgcagtacatcttcctgctctagcaagcaaggatctcgccaagatagttgggaggtggtggagggactgcgcggagaaatgaactacacacaggagcctcccgtccagaagggcttcctgttaaagaagcgcaaatggcctcttaaaggatggcacaaacgcttcttttacctcgataagggcatactgaaatatgcaaagagccaaaccgacatagagagagaaaagttgcacgggtgcattgacgtgggcctcagtgtgatgagcgtcaagaagagctcaaagtgtatcgatctggatacagaagagcatatttaccacttaaaggttaagtctgaggaggtatttgacgagtgggtttcaaagctaaggcaccatcgcatgtacaggcagaatgaaattgccatgttcccgcacgaagtgaatcatttcttttcagggtcaactatcaccgatagcagttctggcgttttcgactcgatcagctccaggaaaagatcatccatttccaagcaaaatctctttcagaccggaagcaacgtctctttttcctgcgggggtgagaccagagtgcctctttggttacagtccagtgaggacatggagaagtgctctaaagacctggcccattgtcacgcgtacctggtggagatgtcccaattgctgcagtctatggacgtcctgcaccgcacttactccgcgccagcaatcaatgcgattcaggggggaagctttgaatctccaaaaaaggaaaaacgctcccacaggagatggcgcagcagggcaataggcaaggacgccaaaggaacacttcaagtgccaaagccattctcaggacccgtgaggttacactcctccaaccctaacctgtcaactctcgatttcggtgaggagaaaaactatagcgatggcagcgaaacttccagcgaatttagtaagatgcaagaggacctatgccatatcgcacataaggtgtacttcacattgagatcagcctttaatattatgtctgctgagcgtgaaaaactgaaacagctgatggagcaggacgctagcagtagtccttctgcgcaagttattgggctcaaaaacgctctctctagcgagaattccagagacgaaaacagggctctcgtacatcagctgagcaatgagtcaaggctgtcaataactgattcccttagtgaattctttgacgcccaggaggttctactctccccttctagctcagagaatgagatctccgatgacgacagctatgtctcggacatttctgataaccttagccttgacaatctgagtaatgacctcgacaatgagagacagaccctaggccctgttctcgactccgggagggaggccaagagtcgcaggaggacttgtttaccagctccatgcccttcttcctctaacatctctctttggaatatactgagaaataatatcggcaaggaccttagtaaagtcgcaatgccagtagaactgaatgaacctctgaacaccctccagagattgtgcgaggaactggaatatagcgagctactggataaagctgcccagatacccagtcctctcgaaagaatggtgtatgtggcagcctttgccatcagcgcctatgcaagctcctactatcgagccggaagcaaaccctttaatcccgtgcttggggagacttacgagtgtattcgcgaagacaagggatttcagtttttctcagagcaggttagtcatcaccctccaatcagtgcctgtcacgccgagtctcggaattttgtcttctggcaagacgtgcgatggaagaataagttttgggggaaatctatggaaattgtacccatcggaaccacccatgtcacacttcctgtgtttggcgatcattttgagtggaacaaggtgacatcctgtattcacaatattctctccgggcagagatggattgaacactatggggagattgtgatcaagaacctgcacgacgactcatgctattgtaaggtcaacttcataaaggctaaatattggagcaccaacgctcatgaaattgaagggactgtgttcgaccgctccggaaaagccgtgcacaggttgtttggcaaatggcacgaatctatatactgtggtggtggctcttcctccgcatgcgtgtggcgggctaatcctatgccaaaggggtacgaacagtactatagtttcacacagtttgctcttgagctcaacgagatggatccgtcaagcaaatccctgctcccaccaactgatacaagatttcggcctgatcagagattcctcgaagagggcaacttagaggaggcagaaatacagaaacagagaattgagcagctgcaacgcgagcgccgaagggtgctggaggagaatcacgtcgagcatcagccaagattcttcagaaaatccgacgatgactcttgggtctcaaatggaacttatctggagctaagaaaggatcttggcttctccaagctggatcaccctgtgttatggtag

SEQ ID NO: 233769 - DNA, 2556 bp, synthetic construct
  misc_feature 1..2556: note = Description of Artificial Sequence: Synthetic coding sequence
  source 1..2556: mol_type = other DNA
atgatgagtgacgagaaaaatttgggcgtgtctcaaaagctggtgagcccatctagatcaacaagttcatgctcctccaaacaaggcagccggcaggattcatgggaggttgtcgagggactccggggtgagatgaattatacacaagaaccacccgtgcagaaaggatttctgttaaagaaacggaagtggccattgaaaggctggcacaagaggtttttctatcttgacaagggtatactgaagtacgcaaagagccaaactgacatcgaaagagaaaaactgcacgggtgcatcgatgttggcctctctgtcatgtccgtgaaaaagtcaagtaagtgcatcgacctcgacaccgaggaacatatctaccacctaaaagtaaagagtgaagaggttttcgacgaatgggtctcaaaattgcggcaccaccgcatgtacagacagaacgaaatcgccatgttcccgcatgaggtaaaccacttttttagtgggtccacaatcactgactcatcatctggggtgttcgacagcatctcttcacgcaagcgtagctcgatctccaaacagaatctgttccagaccggatcaaacgtatctttctcatgcggtggggaaacacgcgtccctctgtggctacagtcctccgaggacatggaaaagtgttccaaggacttggcccactgccacgcttatttggtcgagatgtcacaacttctacagtctatggacgtcctgcacagaacatattcagccccagcaatcaacgccattcagggtggcagtttcgaaagcccgaagaaagaaaagcggagtcacaggaggtggcggtcccgtgctatcgggaaagacgccaagggaaccctccaggtcccaaagccgttctcaggacctgtgagactgcacagctccaaccccaatttgagcactctggatttcggcgaggagaaaaactactctgacggttctgaaacgagttccgaatttagcaagatgcaagaagatctatgtcatatcgcacataaagtttattttacgttgcgttccgcttttaacattatgtctgcagagagagagaaactgaagcaactcatggagcaagacgcttcttcttcaccctccgcccaagtcataggacttaaaaatgccctcagttcagagaacagcagagatgaaaatcgggctctagttcaccagctgtcaaacgaaagccggctctcaataacagactccctgtcggagttctttgacgcccaagaagttcttctctcgcctagttccagtgagaacgaaatcagcgacgatgactcctatgtcagcgacatctcagataatctctccctggataacttatctaatgatctggacaacgagaggcagaccctaggaccagtactggacagcggaagggaggctaaatcaaggaggaggacctgtctccccgcaccctgtcctagcagctctaatatctcactgtggaacatcctgcgcaataatattggcaaagacctgtcaaaggttgccatgcctgtggagctgaacgagcccttgaatacgctccagcgtctttgcgaggagttggaatattctgaactacttgacaaggccgcacagattccatcccccctcgagagaatggtgtacgtggccgctttcgctatcagcgcatatgcctcgtcttattaccgggcaggatccaaacccttcaatccggtactgggagaaacttacgagtgcatcagagaggacaagggcttccagtttttttccgagcaagtgtcccaccaccccccaatctccgcttgccacgccgaaagtcgcaactttgtgttctggcaagatgtacggtggaaaaacaaattctggggaaaatctatggagattgtgcccatcgggactacccacgttaccctcccagttttcggagatcatttcgagtggaacaaagtaacctcttgtattcacaatatcctctctggtcagaggtggatcgagcactacggagaaatcgtcataaagaacctccacgatgattcatgttactgcaaagtcaacttcatcaaagccaagtactggtccacaaacgcccacgaaattgaggggacagtgtttgatagatccggcaaggcagtgcaccggctgttcgggaaatggcacgaatcaatctactgcggcggaggctcatcgtccgcgtgcgtgtggcgagcgaaccctatgcccaaaggatatgagcaatattacagcttcactcagtttgccctggaactgaatgagatggacccatcatctaagtcccttttaccccctactgacacccgatttaggccggatcagcggtttctggaggagggtaaccttgaggaggcggaaattcaaaagcagagaattgagcaattacagcgtgaaagacgcagagtcttggaggagaatcatgttgagcatcagccacggttctttaggaagagtgacgatgatagctgggtctccaatggaacatacctggaactcaggaaagatctgggcttttcaaagctcgaccaccctgtgctgtggtag

SEQ ID NO: 233770 - DNA, 2571 bp, synthetic construct
  misc_feature 1..2571: note = Description of Artificial Sequence: Synthetic coding sequence
  source 1..2571: mol_type = other DNA
atgatgtctgatgagaaaaacctgggcgtcagtcagaagcttgtcagcccctcaagaagtactagctcatgcagttccaagcaagggagcaggcaagacagctgggaggtggtggagggcctccggggtgagatgaattatacgcaagaacctccagtccagaaggggtttctgctgaagaaaagaaagtggccgctgaaaggctggcataaacggttcttttatttggacaaaggcatcctcaagtacgcgaaatcacagaccgacatagagcgggaaaaactgcacgggtgtatcgacgtgggcttgtcggtgatgagtgtgaaaaagtcaagtaaatgcatagaccttgacacggaagagcatatctaccacctaaaagtgaagagcgaggaggtattcgatgagtgggtgtcaaagttgaggcaccatagaatgtaccgtcagaacgaaatcgcgatgttcccgcacgaggtaaatcatttcttcagtggttcgaccataactgatagtagcagcggcgtctttgactccatttcttccagaaaaaggtcctcaatttccaaacagaacctcttccagacagggtccaatgtgagctttagctgcggtggagagactcgcgtccctctgtggctgcaaagctcagaggatatggaaaaatgctccaaggacctggcccattgtcatgcctatctggtggaaatgtcacagctcctgcagtccatggatgtgttgcaccggacctattctgcgccagccattaatgctattcaagttccaaagcctttctccgggcctgtccggttgcatagcagtaatcccaacctttccaccctggactttggagaagagaaaaattattctgacggcagtgaaaccagcagtgagtttagcaagatgcaggaagacctttgccatatagctcataaagtgtacttcacactacgctcggcctttaatattatgagtgctgagagggaaaagctcaagcaactgatggagcaggacgcctcgagcagtccttccgcccaggtcatcggccttaagaacgccttgtctagcgcccttgcacaaaacaccgatctgaaggaacggttaaggaggatccatgccgaatcactgttgctggacagccccgcagtagctaaaagcggcgacaacctcgctgaggagaactcccgtgatgagaaccgcgctctggtgcatcaattgtcgaatgagtcaaggttgtcgattacagatagccttagcgagttttttgatgcccaagaggtcctgctttcaccatctagttccgaaaatgagatcagcgatgatgattcctacgtctccgacatatcagataatctcagcttagacaatctctctaatgatctcgacaatgagagacagaccctgggcccagttctggattccggtagggaggcgaaaagccgacggcgaacatgcctaccagcaccatgtcccagtagttctaacatcagcctgtggaacatcctccgcaacaacattggcaaggacctgtccaaggtagccatgccggtagaactcaatgaaccgcttaatacattacagcgcctgtgtgaagagttggagtactccgaactgttggataaggctgcacagattccaagccccttagagcggatggtttacgtggctgcttttgccattagcgcttacgcctcctcttactaccgagctggctctaagccctttaacccagtactgggagagacctacgaatgtatccgtgaagacaaggggtttcaatttttcagcgagcaggtttctcaccaccccccaatctccgcctgccatgctgagtcccggaactttgtgttttggcaggacgtgaggtggaaaaacaagttttgggggaagagtatggaaattgttcccatcggcaccactcatgtgacgctgccagtgttcggagaccactttgaatggaataaggtaacctcatgcatccataatatcctgagcggccagagatggattgagcactatggtgaaatcgtgattaagaacttgcacgatgattcttgctactgtaaggtgaattttataaaggcaaaatactggagcaccaacgcccatgagatagaggggaccgtcttcgatcggtccggaaaagctgtacatcggttatttgggaagtggcacgaatcaatatactgcggtggcggaagtagttcagcttgcgtatggcgcgcaaaccctatgcccaaagggtatgagcaatactatagttttactcagttcgcgctggaactgaatgaaatggacccctccagtaagtccttgctcccacctaccgatactaggtttcggcctgatcagaggtttttagaggaaggaaacctggaagaggccgaaattcagaaacagcgaatcgaacagctgcagagagagaggaggagggttctcgaggaaaatcacgtagagcaccagcctagattcttcaggaagagcgatgacgatagctgggttagcaacggcacctacttagagcttcggaaagacttgggattctccaaattggaccatccagtactgtggtag

SEQ ID NO: 233771 - DNA, 2463 bp, synthetic construct
  misc_feature 1..2463: note = Description of Artificial Sequence: Synthetic coding sequence
  source 1..2463: mol_type = other DNA
atgatgtccgatgaaaagaatttgggcgtctctcagaaactggtctcgccgagccgatccaccagctcatgcagctctaagcagggctctcgccaagacagctgggaggtcgtagagggactgagaggcgagatgaactatactcaggagccacctgttcaaaagggattccttcttaaaaaacggaaatggcctctcaaggggtggcacaagcgatttttctatctagataaggggattctaaaatacgcaaagagccaaacagatattgaaagggagaagttgcacgggtgcattgatgtagggctgagtgtgatgtcagtgaagaaatcaagcaaatgcattgacttggataccgaagagcacatctatcatctgaaggttaagtcagaggaagttttcgatgagtgggttagtaagctgcgccatcatcgaatgtaccgacaaaatgagatagcgatgttccctcacgaggtgaatcacttttttagcggctcaaccataacggactcgtccagtggcgtctttgatagcatatctagccgaaagcgctcgtctattagcaagcagaaccttttccagacaggatccaatgtatcgtttagctgcggtggcgaaactcgtgtccccctatggcttcagtcatccgaggatatggaaaagtgctcaaaggatctcgcacattgtcatgcatatttggtagagatgagtcaactcctccagagtatggatgtgctccaccgcacatacagcgcgccagcgatcaacgcaattcaagtccccaaacctttctccggccctgtgcgtcttcactcttctaatcctaatctgtcaacgctcgactttggcgaagagaagaactacagcgatgggtccgaaacatctagcgagttctccaagatgcaggaagacctatgccatatcgcccataaggtctatttcaccctgcgttctgccttcaacatcatgagcgcagagcgggagaagcttaaacagttaatggagcaggatgcctcttctagtcccagtgcccaggtaatcggccttaagaatgctctctccagcgaaaatagccgggatgaaaacagggcgctcgtgcaccagctgtccaatgagagccgattgagcatcacagactcactaagcgaattcttcgacgctcaggaggttctcttgtctccctctagttctgagaatgaaattagcgacgatgacagttacgtgtcggatattagtgataacctgagcctcgacaacctctctaacgacttggataacgaacgccagaccctggggcctgtgttggacagcggacgggaggctaagtcaaggagacgaacttgtctgcctgcgccatgtccttccagcagcaacatcagcctgtggaacatactgaggaacaatatagggaaggacctgtcgaaagtagccatgccagtcgaattgaacgagcccctgaacacccttcagaggctgtgcgaagaattggagtacagcgagctgctcgataaggcagcccagatcccaagcccacttgaaagaatggtttatgtagcagctttcgcgatctccgcgtacgctagtagttactaccgcgcaggaagcaaaccctttaatccagttctgggcgagacgtatgaatgcatcagggaagataagggatttcagttcttttctgaacaggtgtcccatcatccaccgattagcgcctgtcacgccgagtccagaaatttcgtgttctggcaggacgttcgatggaagaataaattctggggcaaatccatggaaatcgtgccaattggcactactcatgtgactttgcccgtgtttggcgatcacttcgagtggaacaaagtcacttcctgtattcacaacatcctgtcaggccagcgttggatcgaacattatggcgaaatcgtgattaaaaatctgcatgacgatagctgctactgcaaggttaattttataaaggccaagtattggtctacgaacgcccacgagattgaagggacagtgtttgacaggtctggcaaagccgtgcataggctgttcggaaaatggcacgaaagcatctactgtggaggtggatcatcttcagcttgtgtttggcgagccaaccctatgccaaaaggttatgaacaatactatagcttcacgcaatttgccctggaattaaatgaaatggatccttcgtccaagtccctcctccccccaacagacactcgctttcgacctgatcagcggttccttgaggaaggtaatttggaggaagcagaaatccagaaacagaggatcgagcagctgcagagagaaaggcggagggtcctggaagagaaccatgttgagcaccagccaagattttttcgcaaaagtgatgatgactcttgggtgtccaatggcacttacctggagctgcgcaaggatttggggttctctaagctggaccacccggtactctggtag

SEQ ID NO: 233772 - DNA, 339 bp, synthetic construct
  misc_feature 1..339: note = Description of Artificial Sequence: Synthetic coding sequence
  source 1..339: mol_type = other DNA
atgatgagcgatgaaaagaacctgggcgtttctcagaagcttgttagccccagccgctcaacatctagctgctcttcaaaacagggctcgaggcaggactcatgggaggtggtggagggtctccgtggggagatgaattacactcaggaacctccagtgcagaaaggcttcctgttaaaaaagagaaaatggccactgaagggatggcacaagaggttcttctatcttgataagggaatcctgaagtacgcaaagtctcagactgacattgagagggagaagctccacggatgtattgatgtgggactgagtgttatgagtgttaaaaagtcctcttag

SEQ ID NO: 233773 - DNA, 186 bp, synthetic construct
  misc_feature 1..186: note = Description of Artificial Sequence: Synthetic coding sequence
  source 1..186: mol_type = other DNA
atgatgagcgatgagaaaaatcttggggtgtcccagaaactggtgtcaccaagtcgttcaacgtcatcttgtagttcgaagcagggtagccggcaagattcttgggaggtggtcgaaggacttagaggcgagatgaattacacccaggaaccacccgttcagaaaggatttctgctcaagaagtag

SEQ ID NO: 233774 - DNA, 2463 bp, synthetic construct
  misc_feature 1..2463: note = Description of Artificial Sequence: Synthetic coding sequence
  source 1..2463: mol_type = other DNA
atgatgagtgatgagaaaaaccttggggtgagccaaaaactggtctccccctctagaagcacctcaagttgctctagcaaacagggaagcaggcaggatagttgggaggtagtggaaggccttcgaggggaaatgaactacacccaggaacctcctgtacagaaagggtttctgcttaaaaagcggaaatggccactcaaaggctggcacaaaaggtttttttacctcgacaaggggatcctgaagtacgcaaaatcccagacagatattgaaagggagaaactccatggatgtatcgatgtcgggctctccgtgatgtctgtcaagaaaagttcgaagtgtatcgatctggataccgaagagcacatttaccatctgaaggtgaagtctgaggaagttttcgatgaatgggtgtcaaagctgcgacaccatcgtatgtacaggcaaaacgaaatcgccatgttcccccacgaagtgaatcacttcttctcaggaagtaccatcacagattcctcttccggggtgtttgacagcatctcttctcgaaagcgctcctcaatttctaagcaaaatctcttccagacaggctcgaatgtgtcttttagctgcgggggagagactagagttcctctgtggctacaatcctcggaggacatggagaagtgctccaaagacctggctcactgtcatgcttacctggttgaaatgtcccagcttctgcagagcatggacgtactacataggacctattctgctccggctatcaatgccattcaggtgcctaagccattttccggaccggtgcggttgcactcatctaatcctaatctgtccacccttgattttggagaggagaagaattacagcgatggctcagagacatcctcggagtttagtaaaatgcaggaggacctttgccacattgcccataaggtttatttcaccctccgtagtgccttcaacataatgagtgctgagcgagagaagctcaagcagctcatggagcaggatgcttcctcttcaccgtctgcccaggtgattggactcaagaatgcgcttagttccgaaaactctcgggacgagaaccgggctctcgttcaccagttgtcgaacgagtctcgcctgagtataacagactcactcagcgagttctttgacgcgcaggaggtgctcttatcaccaagttcctcggagaatgaaattagcgatgacgattcatatgtctctgatattagcgataatttgagcctggacaatctgagcaacgatctcgataatgagcgccaaacacttgggcctgtacttgatagtggtagagaggctaaatctcgcagaaggacctgcctgcccgcaccatgcccttctagcagtaatattagtctctggaatatcctcagaaataacataggcaaggacctctcaaaagtcgccatgcccgtggaactaaacgagccccttaacactctccaaagactttgcgaagagctggaatactccgaacttttggataaggcagcccaaatcccatcccctctggagcgaatggtgtacgtggctgcatttgctatcagtgcctacgcgtctagttattatcgagccggtagcaagccattcaaccccgtcctgggggaaacctatgaatgcatcagagaggacaaaggctttcagttcttctccgagcaagtctcgcaccatcctccaattagcgcttgtcacgccgaatcacggaacttcgtcttctggcaggacgtcaggtggaaaaacaagttctggggtaaatctatggagatcgtacccatcggcaccactcacgttacactccccgtctttggcgaccatttcgaatggaacaaggtcacctcatgtatacataacatcctgtcagggcagcggtggatcgaacattacggcgaaatcgtgatcaagaacctgcatgatgacagctgctactgtaaggttaacttcatcaaagcaaaatattggagcacaaatgcccacgaaattgaggggactgtgtttgatcgtagcggcaaagcagtgcatcgactgttcggcaagtggcacgaatccatttactgcggcggagggtccagttcagcctgtgtgtggcgcgctaacccaatgcccaagggttacgagcagtactattccttcacacagtttgccctcgaattgaatgaaatggatccaagctcaaaaagcctgctgccccctaccgatactcgatttcgaccagatcaacgattccttgaagaaggcaatcttgaagaagcggaaatccaaaagcagaggatcgagcagcttcagagggagcggagacgggtcctcgaggagaaccatgtcgaacaccagccacgcttttttcgcaaatctgacgacgactcttgggtgtcaaacgggacctatctcgaactccggaaggatttgggtttctcaaagctcgatcacccagtgctgtggtag

SEQ ID NO: 233775 - DNA, 270 bp, synthetic construct
  misc_feature 1..270: note = Description of Artificial Sequence: Synthetic coding sequence
  source 1..270: mol_type = other DNA
atgatgtcagacgaaaaaaatctgggcgtgagtcagaagctggtgtctccttcacggtccaccagtagttgttcgtccaagcagggcagccggcaggattcatgggaagttgtggaaggcctgcgcggagagatgaattacacccaggaaccaccggtgcagaagggctttctgctgaagaagcgcaaatggcccctgaaaggatggcataagcgatttttctacctcgacaagggaattcttaagtacgcaaagagccagacagattag

SEQ ID NO: 233776 - DNA, 2640 bp, synthetic construct
  misc_feature 1..2640: note = Description of Artificial Sequence: Synthetic coding sequence
  source 1..2640: mol_type = other DNA
atgaaggaggaggcatttctccgcagacggttttcactgtgtcctccgagttccactccccaaaaggttgatccgcgaaagctcaccaggaatctgttgctgtcaggagataatgaactatatccactatctccagggaaggacatggagccaaacggcccttccctgccgagggacgaaggcccaccaaccccctccagcgccaccaaggtccccccagcagaatacaggctgtgtaacgggtccgacaaagagtgcgtgtcgccgactgcgagagtcacaaagaaggagaccctcaaagctcagaaagaaaattatcgccaggagaagaagagggccactcgccagctcctcagcgccctaactgatccctcagtagtaatcatggcagatagtctgaaaatcaggggcacgctaaaaagctggaccaaattgtggtgtgttttaaagcctggcgtgctgctgatttataaaacgcccaaagtcggccagtgggtgggaactgtgttgctgcattgttgcgagctgatcgaaagaccttctaaaaaagacggcttctgctttaaactattccaccctctggaccagtctgtctgggcggtgaagggaccgaagggtgagagtgtaggaagtattacgcagcccctgccttcttcctacttaatcttccgcgctgcatctgagagcgacggacgatgttggctggacgccctggagctggctctcaggtgcagtagccttctcagactcggcacttgtaaacccggaagagacggtgagcctgggacaagtccagacgctagcccgtcttccctgtgcggtctgcctgctagtgccacagtccaccctgaccaggacctcttccccctgaatggcagctccctggagaacgacgccttcagtgataaaagcgagcgcgaaaaccctgaggaaagtgatacggaaacgcaggaccactccagaaagactgaaagcgggagtgatcagagcgagacgcccggtgcccctgtgcgtcgaggtacgacttatgtggagcaggtgcaggaggagctgggcgagctgggggaagcctctcaggtagaaaccgtgtcagaggagaacaaaagtctgatgtggacactacttaagcaactcagacccggaatggacttatctcgggtcgtcttgcccactttcgtgctggaacctcggtctttcctgaacaaattgtcggattactattatcacgcggacttgctctccagagcagcagtcgaggaggacgcttactctcgcatgaagctagtgctgcggtggtacctcagcggattttacaagaagcccaaggggattaaaaagccctacaaccccattctgggtgaaacattccggtgctgctggttccatcctcaaacagattccaggactttctacatcgccgagcaggtaagtcaccatccaccagtatctgcttttcatgtgagcaaccggaaagacggcttctgcataagtggcagcatcacagctaagagcaggttctatggcaactctctaagcgccttgcttgacggaaaagctactttgaccttcctaaatagggcggaggattacacactcactatgccctatgcccattgtaaagggatcctttacggtaccatgaccctggagttgggcggaaaagtgaccatcgagtgcgccaaaaataatttccaggcccagctggaatttaagctgaaacctttcttcggaggcagcacttccattaaccaaatttccggaaagattacgagtggcgaagaggtgttggcaagtctatctggacattgggaccgtgacgtttttatcaaggaggaggggtccggctcttcagctttgttttggaccccctccggcgaagtcaggcgccagcgactcaggcagcacaccgtcccactggaggagcagactgagctggagagcgagcggctttggcagcacgtgacaagagcaatcagcaagggcgatcagcacagggccacacaggagaagttcgccctggaggaggctcaacggcagagagccagagaaaggcaggagtcactaatgccctggaagccgcaactctttcatctcgaccccataacacaggagtggcactatcgctatgaggaccatagtccctgggaccccctcaaagatattgcccaattcgagcaagatggcatcttacggactctgcaacaggaagcagtggcgcgtcagactactttcctcggcagtccaggccctagacatgagcgttccggccctgaccagcgcctgaggaaggcgtccgatcagccatccgggcactcccaggcaaccgagagctctggctccactcccgagtcctgccccgaactgagtgatgaggagcaggacggagacttcgtgccaggaggcgagtccccgtgccccagatgcaggaaggaggccaggcgactgcaagcacttcacgaggccattttatctatccgagaagcacaacaggagctgcatcgtcatttatcggccatgctgtcttccaccgctcgagcggcacaggcaccaacgcccggactcctgcagtcacctcgcagttggtttctgttgtgcgtattcttggcgtgccagctgttcataaatcacatactgaagtag

SEQ ID NO: 233777 - DNA, 2436 bp, synthetic construct
  misc_feature 1..2436: note = Description of Artificial Sequence: Synthetic coding sequence
  source 1..2436: mol_type = other DNA
atgaaagaagaagctttcctgcggaggcgcttttctttatgcccgccatcctccactcctcagaaagtggatcctaggaagctgaccagaaacttactcctctccggagacaacgaactatatcccctgtcccctggcaaagatatggagccaaatggaccatcactgcctagggacgaaggcccaccaaccccgtctagcgcgaccaaggtacccccagccgagtacagactttgcaacgggtcggacaaagagtgtgtttcccccaccgcgagagtgacaaaaaaagagacgctcaaagctcaaaaagagaactacaggcaggagaagaagcgagccacccgacagcttcttagcgctttgactgaccccagcgtcgtcataatggcagactcactgaagggccctaagggagaatccgttggctccatcacccagcccctcccgagcagctacttgattttcagggccgcaagcgaatccgatggcagatgttggcttgatgcccttgaactagccctgagatgctcgtccctgttacggctcggcacttgtaagccaggcagagacggagaacccggaaccagtccggatgcgagtccctcgtccttgtgcggcttgccagcaagcgccactgtgcatcctgatcaggatctttttcccttgaacggcagctcgctggagaatgatgccttcagcgacaagagtgaaagggagaatccagaagagtcagatacagaaacccaggatcattcaaggaagactgaatctggctcagatcagagcgagaccccaggcgctccagtgaggcgcggaactacatatgtggagcaggtgcaagaggagttaggtgagctcggagaggcttcccaggtggagaccgtaagcgaggagaataagagcttgatgtggaccctccttaagcagcttcggcctggaatggacctgtctcgggtcgtccttcctaccttcgttttggaaccacggagctttcttaacaaactgagtgactactactatcatgctgatttgctgtcccgggcagctgtggaggaggatgcctattctcggatgaagttagtcctgcggtggtacctttcagggttttacaagaagcctaagggcataaagaagccttacaatcccatcctgggggaaacttttagatgctgttggttccatccacagacagattcgagaacattctatatcgcagaacaggtcagtcaccacccccctgtgagcgcgttccacgtatcgaatagaaaggacggattctgcatctctggatctattacagctaagagcaggttctatggaaactccctttcagcactgctggacggaaaggctactctcacattcttaaacagagccgaggactacaccttaaccatgccgtacgctcattgtaagggcatactgtatgggactatgaccctcgagctcggaggtaaggtgaccatagagtgcgcaaaaaataactttcaggctcagctcgaattcaaactgaagccatttttcgggggtagtacttcaattaaccaaatatccgggaaaataacctctggcgaggaagttctggcctcccttagtggacactgggatcgggatgtttttatcaaagaagagggctcaggcagttccgcgctgttctggacacctagtggagaggtgaggcgacagagacttaggcagcacaccgtgcctcttgaggagcagacagaactagagtccgagaggctgtggcagcacgtgaccagggccatttctaaaggtgatcagcaccgcgcaactcaggaaaaatttgccctggaagaagcccaacgccagcgggctcgggagcgacaggagagtttgatgccatggaagccccagttatttcacctggatcctattacccaggagtggcactatcgctacgaagaccacagtccatgggatcctctgaaagatattgcccaattcgaacaggatgggatactgcgcactctccagcaagaagctgtcgcgaggcagaccacctttttaggttcaccagggccacggcatgaacgctctggacctgaccagagacttcggaaggcgtccgatcagccctctgggcactcacaggcgaccgagagctcggggagtacgcctgaaagttgcccagagctgtccgatgaagaacaggatggggacttcgttccgggtggagagtcaccttgtcctcgatgcagaaaagaggccaggagacttcaggccctacatgaggctatccttagtattcgagaagcccagcaggaactgcaccggcacctgagtgcgatgctgagcagtactgccagagctgctcaggcacccaccccaggcctcctgcagtctcctcgcagctggttcctattgtgcgtctttctcgcatgccaactgtttatcaaccacattctcaagtag

SEQ ID NO: 233778 - DNA, 1320 bp, synthetic construct
  misc_feature 1..1320: note = Description of Artificial Sequence: Synthetic coding sequence
  source 1..1320: mol_type = other DNA
atggacctttcccgagttgttctgccgacctttgtgctggaacctcgttcatttctgaataaattaagtgactactactaccacgccgatctcttgagcagggcagcagtagaggaggacgcctactctagaatgaagctcgttctgcgttggtacctgagtggcttctataaaaaacccaaaggaattaagaaaccttacaatcctatcctgggcgaaacttttcggtgttgttggtttcacccccagaccgattccagaactttctacatagcggaacaagtgagtcaccaccccccagtgagtgcatttcatgtgtcaaaccgcaaagatggtttttgtatctcaggctcaattactgccaaatctcgcttttacggcaatagtctcagcgccttgctggacgggaaggcaacactgacctttctcaacagggccgaggactacacgcttaccatgccttatgctcactgcaagggcattttgtacggaacgatgacgctcgagttaggagggaaggtcactattgaatgtgccaagaacaacttccaggctcagctggagttcaagttgaagccattctttggaggatcaacttctataaatcagattagcggaaagatcacttcaggagaggaagtgttagcctcacttagtggccattgggaccgggacgtgtttatcaaagaagaggggagcggcagctctgcccttttttggactcccagcggggaagtgagacgacagaggctccgacagcatacagtccctcttgaagagcaaactgaactcgagtcagaacgcctgtggcagcacgttactagagcaattagcaaaggagaccagcatagagccactcaagagaaattcgccttggaagaagctcaacgacaacgagcacgggagcgccaggaaagcttgatgccgtggaaaccccagctgtttcacctggacccaatcacccaagagtggcactataggtatgaggaccactcaccatgggatccgttaaaagacattgcacagtttgaacaggatgggatcctgagaaccttgcagcaggaagctgtagcacgtcaaacaaccttcctagggagccccggacccaggcacgagcgcagtgggcctgaccagcgcctccgtaaggcgtcggatcaaccctctggccacagccaagcaacggagagctcaggatccacccctgagtcatgcccagaacttcatggaaccgggtcgactggtacagatccacgcccacctgccgagcctccgatcctcgtccccgcactaagagttccaggggtttccgcagtacactag

SEQ ID NO: 233779 - DNA, 2436 bp, synthetic construct
  misc_feature 1..2436: note = Description of Artificial Sequence: Synthetic coding sequence
  source 1..2436: mol_type = other DNA
atgaaggaggaggctttcttgcgcaggcgtttctccctctgtcctccaagttctactccccagaaggtggaccctcgcaagctgaccagaaatcttctcctgagcggcgataatgagctttatcccttatctccaggcaaggacatggagcctaatggaccctctctgccacgggatgaggggccacccacaccctctagcgccaccaaggttccacccgcagagtaccgattatgcaatggcagtgacaaagaatgcgttagccccaccgcgagggtgaccaagaaagaaactttaaaagcacagaaggaaaattaccgccaggagaaaaaaagggctaccaggcagctactcagcgccctcacagatccttctgtcgtgattatggccgactcactgaaaggacccaagggggagagtgtgggctctataactcaaccacttccgtcgtcctacctgatttttagggctgccagcgagagcgatggccgatgctggctggacgcattagagctcgccctgagatgtagtagtctgctgaggctcggaacctgtaagccaggacgagacggcgaaccaggaacatcccctgacgccagcccatcttccctgtgcggcctccccgcatcggcaaccgttcaccccgaccaggatctgtttcccctgaatggcagctctttggaaaacgatgcctttagcgacaagagtgagagagagaaccctgaggagtctgacacagaaacccaggaccacagccgcaagacagagtcaggaagcgatcaaagtgaaacccccggtgctccggttaggcgcggaaccacctatgtcgagcaggtccaggaggagctcggtgagctgggggaagcatcacaagtggagactgtgagcgaggaaaataaaagcctgatgtggacgctgctcaaacagctgcgccctgggatggatttgtcacgtgtggtactgccgacattcgtgctggaacccagaagcttcttaaacaagctaagcgattactactatcatgcagaccttttgtctagggctgccgtagaggaagacgcgtattcaaggatgaagctcgtgcttcgctggtatctgagcgggttttataaaaagccaaaaggcattaaaaagccttacaatccaatacttggtgagacctttcgctgttgttggttccatccccagaccgatagcagaactttctacattgcggaacaggtcagccaccatcctcccgtctccgcctttcatgtctccaatcgcaaggatggattttgtatcagcgggtccatcacggcgaagtcaagattctacggcaattctctgagcgctctactcgacggaaaagccaccctcacatttttgaatagggcagaggattacaccctcactatgccgtacgctcactgtaagggcatactgtacggaaccatgactctcgaactgggcggtaaggtcaccatagaatgtgctaagaataatttccaagcacagctggagtttaagctcaagcccttctttggcggaagtacatctatcaaccagatatcaggaaagattacaagcggcgaggaggtgctggcatctctctccggacactgggaccgggatgtatttattaaagaagaaggatcaggctcttcagcgttgttctggacgcctagcggagaggtgaggcggcaacgtctgcggcagcacacggttccactggaggaacagaccgagcttgagagtgagcggctgtggcagcacgtcaccagggctatttccaaaggagatcagcatcgggctacccaagagaaatttgctctggaggaggcccaacggcaaagggccagggagaggcaggagtccctcatgccctggaaacctcagctgttccacctcgatcccattacgcaggagtggcactatcgatatgaggatcactctccatgggacccattaaaagatatcgcccagtttgagcaggacgggattctgagaaccttacagcaggaagccgtcgctcgccagactacgtttctcggttctcccggaccacgccacgaacgcagcgggcctgaccaaagactgcgaaaggcatctgatcaaccttccggccactcacaggcaacggagtcaagcggatcaacccccgaaagttgcccagagctgtctgacgaggagcaagacggagatttcgtgcccggaggcgaaagtccgtgtccgaggtgccggaaggaggcccgaaggctgcaggctctccacgaagcaatcctcagcatcagggaagctcagcaggaactgcacaggcacctctccgctatgttgagttccaccgcgagggctgctcaagctcctactcccggattgctgcagtccccacggtcttggtttcttctctgtgtgttccttgcctgtcaactctttatcaatcacatcctgaaatag

SEQ ID NO: 233780 - DNA, 375 bp, synthetic construct
  misc_feature 1..375: note = Description of Artificial Sequence: Synthetic coding sequence
  source 1..375: mol_type = other DNA
atgaaggaagaggcttttttgagacgaagatttagcctctgccccccttctagcacaccgcagaaggttgaccccagaaagcttaccagaaatttgcttcttagcggcgataacgagttgtatcccctctccccaggaaaggacatggagcctaacggtcctagcctgccacgggatgaaggacctcctacaccctcatccgcaacaaaagtgcctcccgctgagtatcgcctgtgtaacgggtccgacaaggagtgcgtgtctcctactgcccgtgttactaagaaagaaacactgaaagctcagaaagagaactaccggcaagaaaagaaacgggctacccgtcagttgttgtccgctctgaccgatccctag

SEQ ID NO: 233781 - DNA, 297 bp, synthetic construct
  misc_feature 1..297: note = Description of Artificial Sequence: Synthetic coding sequence
  source 1..297: mol_type = other DNA
atgaaagaggaggcttttctacggcgacgcttctctctgtgtcctccaagttctacacctcagaaggtagaccccaggaaacttactagaaacctgttgctgtcaggggacaacgaactctacccactcagtcccggaaaggatatggagccaaatggaccttcccttccccgagacgaaggcccacccacccctagtagcgctactaaggtgcccccagcggaatatcgtctgtgcaatgggagcgacaaagagtgcgttagccctaccgctagagtaaccaagaaggagacttag

SEQ ID NO: 233782 - DNA, 420 bp, synthetic construct
  misc_feature 1..420: note = Description of Artificial Sequence: Synthetic coding sequence
  source 1..420: mol_type = other DNA
atgaaagaggaagctttcttaagacggaggttctcactgtgcccaccttctagtaccccacagaaagtggacccccgtaagttaactaggaaccttctgttgtcgggtgataacgagctctatccattatcacctggcaaagacatggagcccaatggtccttcattgcctcgcgatgagggcccacccactcctagcagcgcgactaaggtaccaccagccgagtacagattgtgtaacggctccgataaggagtgtgtaagcccgacggcacgggtgactaaaaaggaaaccctgaaagcgcagaaagaaaactaccgacaggagaagaagagggctacacggcagctactgtcagccctgaccgacccatccgtcgtaatcatggccgacagtcttaagatccggggaacactgtag

SEQ ID NO: 233783 - DNA, 273 bp, synthetic construct
  misc_feature 1..273: note = Description of Artificial Sequence: Synthetic coding sequence
  source 1..273: mol_type = other DNA
atgaaagaagaggccttcctaagacggaggttttccctgtgccccccaagtagtacaccacagaaggtggatcccaggaagctcacaaggaacctgcttctcagtggcgacaacgaactgtacccactctccccgggtaaggatatggagcctaacggccctagtctcccacgagacgaaggccctccaacgccctcgagtgctacgaaagtgccgccagctgagtaccgcctgtgtaatggaagtgacaaagagtgtgtgtcaccaacttag

SEQ ID NO: 233784 - DNA, 210 bp, synthetic construct
  misc_feature 1..210: note = Description of Artificial Sequence: Synthetic coding sequence
  source 1..210: mol_type = other DNA
atgaaggaggaagccttcttgagacgcaggttcagcctgtgcccaccatcgagcacccctcagaaagtggacccgagaaaactaacgaggaacttgcttctgagcggtgataacgagctgtatcctttaagtcccggtaaggatatggaacctaacggcccttctctcccgagggatgaggggcctccaactcctagctctgctacttag

SEQ ID NO: 233785 - DNA, 1299 bp, synthetic construct
  misc_feature 1..1299: note = Description of Artificial Sequence: Synthetic coding sequence
  source 1..1299: mol_type = other DNA
tataaccctatcttgggggaaacattcaggtgctgctggttccacccccaaacagacagtaggaccttctatatcgctgaacaggtttcacaccaccctcccgtgtccgcatttcacgtatctaataggaaggatgggttctgcatttcaggctctatcactgccaagtcaaggttttacggcaacagcctgagcgcgctccttgacggaaaagctacactaacatttctgaatcgggcagaggattatacgctaactatgccttacgcccactgcaagggcatcctgtacgggacgatgactttggaactagggggaaaggtgaccatcgagtgtgccaaaaacaacttccaagcacagctggagtttaagcttaagccgtttttcggagggtccacaagcatcaatcagatttcaggtaagatcacttctggcgaggaagttttagctagtctgagtgggcactgggacagagacgtctttattaaggaagaggggtctggcagttcagcgctgttttggacgccaagcggtgaggtgcggcgtcagcggttaagacaacacaccgtgccattggaggaacagaccgaactggagagcgaaagattgtggcagcacgtgacccgggcaattagcaagggcgaccaacaccgcgcaacacaagagaagttcgctctcgaagaagctcagcggcagcgggctagggaaagacaagaatcactgatgccctggaagccccagctattccatttagaccccattacccaggaatggcactaccgatatgaagatcactcaccttgggacccactgaaggacatcgcccagtttgaacaggacggcattctgcgcacccttcaacaggaagccgtggcccgacagaccactttcctgggaagccccggtccaaggcatgagaggagcgggccagatcagaggctccggaaggctagcgaccagccatcaggccactctcaggccacggagagtagcgggagtacccctgagtcctgtcccgagctctcggacgaagagcaggatggagactttgtcccgggaggggaaagcccctgccccagatgtaggaaggaggccagacggctgcaggctctgcacgaagccattttatccatccgagaggctcaacaggagttacaccgtcacctcagtgccatgctgagcagtactgctcgggcagcgcaggcccctaccccagggctcctgcagagtcctcgaagttggtttctgctgtgcgtgttcttagcgtgccagctcttcatcaatcatatattgaagtag

SEQ ID NO: 233786 - DNA, 1533 bp, synthetic construct
  misc_feature 1..1533: note = Description of Artificial Sequence: Synthetic coding sequence
  source 1..1533: mol_type = other DNA
atgtgcgtgccccaccgacagggtcaccaggaaggggatagccagggagcggagggggagctgccagccggtgaggagccccgtagtttccttaacaaactgtctgactactattatcatgcagatttgctgagccgggctgccgtggaggaggacgcttattctcgcatgaagcttgttctgaggtggtacctcagcgggttctacaaaaagcccaaaggcatcaagaaaccctataaccctatactcggtgagacttttagatgctgctggtttcacccacagacagacagccgcactttttatattgcggagcaggtgtcccaccatccgccagtgtccgcctttcacgtctctaaccgaaaggacggcttctgtatttcgggctccatcacggcaaagtctcgattctatgggaattcgctttccgcgcttctggacggtaaagccacactgacctttttgaaccgggcagaggactatacgttaacaatgccctatgctcactgcaaaggcattctgtatggaactatgactctggagctcgggggaaaagttacaatcgaatgtgccaaaaataacttccaggcacagttagaattcaagctcaagcccttctttggtgggtcaactagcatcaaccaaattagcggcaagattaccagcggggaagaggtgctggcttctctgagtggtcactgggaccgcgacgtctttatcaaggaggagggatctggatcttccgcactgttctggacgccaagtggcgaggtgagaaggcagcgtctgcgacaacatacagtccctcttgaagaacagacagagctagagtctgaacggctctggcagcacgtcacacgcgcaatctcaaaaggggaccagcatcgtgccacacaagagaagtttgccctggaagaagcccagaggcagagagccagagaacgacaggagtctctgatgccgtggaaaccccagctttttcatttagatccaataactcaggagtggcattacaggtacgaagaccactccccctgggacccgctgaaagacatcgcccagttcgaacaagacgggatcctcaggaccctacaacaggaagcggttgcccgacaaacaaccttcttgggatccccgggacctaggcacgagagatccggcccagatcagaggctgcgtaaagcttcggatcagcctagtgggcactctcaggctaccgagtcctcagggagcaccccagagtcctgccccgaactgtccgacgaagagcaggacggtgattttgtcccagggggagagtccccatgcccaaggtgtagaaaagaagctcgacggctacaagccttacatgaagcaattctgagcatacgtgaagcccagcaggagctgcatcgtcacctcagtgcaatgctctcttccacagccagggctgctcaagcccctactcccggactgttacagtcacccaggagttggtttctgttgtgcgtgttcctggcctgtcaactgtttatcaatcacattcttaaatag

SEQ ID NO: 233787 - DNA, 2805 bp, synthetic construct
  misc_feature 1..2805: note = Description of Artificial Sequence: Synthetic coding sequence
  source 1..2805: mol_type = other DNA
atgtcatccgacgaaaagggtatctccccagcccataagacctcaactcccactcatcgcagtgcctcctccagtacatcctctcaaagggacagccgccaatccatacacattctggagaggactgcctccagctccaccgagcctagtgtctctcgtcaacttttggagcccgaacctgtacctttgagtaaggaagcagatagctgggaaatcattgagggtctgaagattggccagactaatgttcagaagcctgataaacatgaaggtttcatgctgaaaaagcgcaagtggcccctgaagggttggcacaagagattcttcgtcctggacaatggaatgctgaagtacagcaaagcgccattggacatccagaaagggaaggtgcatggatccattgacgtggggttgagcgttatgtccatcaagaagaaggcccgaagaatcgatttggatactgaggagcacatttatcacctcaaagtgaagagtcaggattggtttgatgcgtgggtgagtaaactgcggcaccatcgcctgtaccgccaaaatgagatagtgagatcaccaagagatgcatccttccatatttttccgagcacctcaacagctgaaagctcgcccgctgcaaacgtaagtgtgatggatggaaaaatgcagcccaactcttttccttggcaaagccccctcccatgtagtaactccctcccggctacgtgcactaccggccagagcaaagtcgccgcttggctgcaagactctgaagagatggataggtgtgctgaagatctcgcccactgtcaatcaaacctggttgagctgtccaaactactgcagaacctcgagatcctgcagaggacacaatcagccccaaactttaccgacatgcaagccaactgcgtggacatttccaagaaggacaaacgggtgacccggaggtggcggacaaaaagcgtcagcaaggatactaagattcaattacaggtgccgttctccgccactatgagtcccgtgagactccactcatctaatcccaatctgtgtgctgatatagagtttcagactcctccatcgcatttgaccgaccccctggaaagctcgacggactacaccaaacttcaagaggaattttgtctgatagcccagaaggtgcacagtcttctcaagagcgctttcaattccatcgccatcgagaaggagaagttgaaacaaatggtgtccgaacaggatcactccaagggacactcaactcagatggctcggctcaggcagagtttaagccaggctttgaaccagaacgctgaacttcggtctagactcaaccggatccacagcgagtcaatcatctgtgatcaagtggtctccgtgaacattattccttcccctgatgaggctggtgagcagatccacgtgagtctgcctttatctcagcaggtggcaaatgagtctagactatcaatgtcagaatccgtcagtgagttctttgatgctcaggaagtgctgctgtccgcttcgtctagtgaaaatgaggcaagcgacgatgaatcttacatttcagacgtctcagacaatatctcagaggataacacatcggtggccgacaacatctctcggcaaatcctgaacggtgagctcacagggggagccttcagaaacggcaggcgagcttgtttacccgctccatgtcccgatactagcaatattaatttatggaatatcttaagaaacaatatcggaaaggatctgagtaaggtatccatgccggttgaactcaatgagccactgaatactctgcagcacctttgcgaggaaatggagtattcggaactgttggataaggcgagtgaaacagatgacccctatgagagaatggttctggttgccgcatttgccgtctcggggtattgcagtacttactttagggccggttcaaaacccttcaatccagtgttgggtgagacatacgaatgtatcagggaggacaagggcttcagattcttctcagagcaggtgtcacatcaccccccaatcagcgcatgtcactgcgaaagcaaaaattttgtgttttggcaggacatcagatggaagaacaagttctggggaaagagcatggagatcttgcccgtgggtacccttaacgtgatgctacctaagtacggggattactatgtctggaacaaagttactacctgcatccataatattctctccggacgtcgatggatagagcactatggcgaggtgaccatccgcaacacgaagtcaagcgtgtgtatctgtaagcttacgttcgttaaagtgaactattggaacagtaacatgaacgaagtgcaaggcgtggtgattgatcaggaaggaaaagccgtctacaggctgtttggtaaatggcacgaaggcctgtactgtggggtggctccatcagcaaaatgtatctggcggcctggcagcatgccaactaattatgagctttactacggatttacaagattcgccattgaactcaatgaactcgaccccgtccttaaggatctcctgcccccaacggacgcccgtttccggcctgaccagcgatttctggaggaggggaatctggaggcagccgcttccgaaaaacagcgggtcgaggagttacagcggagcagacgacgatacatggaggaaaataatctggaacatattccaaaattttttaagaaggtaatcgatgccaatcagcgcgaggcttgggtgtctaacgacacctactgggaactgcggaaggatcctggattctcaaaagtcgattcgcctgtgctgtggtag

SEQ ID NO: 233788 - DNA, 2817 bp, synthetic construct
  misc_feature 1..2817: note = Description of Artificial Sequence: Synthetic coding sequence
  source 1..2817: mol_type = other DNA
atgcaccagctctccctgatccgaggcaacaggggccgatctattcatattctggaacgtactgccagcagctctaccgagcctagtgttagcagacagttactggagcctgaacctgtccccttatccaaggaggcagacagctgggagattattgaaggactgaagatcggacaaaccaacgtgcaaaagcctgataaacacgagggattcatgttgaagaagcgtaagtggcctctcaaagggtggcataaaaggttcttcgttctggacaacggaatgctcaagtatagcaaggctccactggacattcagaagggaaaggttcatgggtctatcgatgtgggcctaagcgtaatgtccataaaaaagaaagcacggagaattgatttggatacagaagagcatatttaccacctaaaggtaaagtcacaggattggtttgacgcctgggttagtaaactacgtcaccaccggctgtatcgtcagaacgaaatcgtacgcagcccaagagatgcaagtttccatatcttcccaagcacctctacagcagagtcaagccccgctgctaatgtgtccgttatggacggcaagatgcagccaaatagctttccttggcagtctccactcccatgtagtaacagcctacctgcaacatgtacaaccgggcagtcaaaggtggctgcgtggctgcaagatagtgaggagatggaccggtgcgccgaagacctggcccactgccagtccaacctcgtggagctctcaaaactgcttcaaaacttggagatcctgcagcgcactcaatctgcccctaactttacggatatgcaagccaactgcgttgatatctcgaaaaaggataaaagggtcacgcgaaggtggcgcacaaaaagcgtcagcaaagacactaaaatccagctgcaggaaggaccccctgctaaggggcagttttccaccaccagaagaagacagaggttggcggcagcagtcgcaactactgtccccttcagcgctaccatgtcccctgtgcgcttacacagtagcaacccaaatctgtgcgctgatatcgaatttcagaccccgccatcacacctgaccgacccccttgagagcagcacggactacactaagctgcaagaagagttttgcttgattgctcaaaaagtgcactcacttctcaaaagcgctttcaattccatcgctattgaaaaggagaaactcaagcagatggtctcggagcaggaccatagcaagggtcactcaactcagatggcacgactgcgacagagcctctcacaagccttgaaccagaacgccgaactaaggtcaaggctgaaccgaatccatagtgagtcaataatctgcgaccaggtggtgagcgttaatatcattccatccccggacgaggccggagagcagatccatgtgtcccttccactgtcccagcaggtcgcaaacgaatcaagactcagcatgtccgagtcagtatctgagttcttcgatgcccaggaggttctactgtcggcatcctcgtcagagaatgaagcctctgatgatgagtcctacattagcgacgtgagcgacaatatctctgaagacaatacaagcgtggctgataacatcagccggcagattctgaacggggaacttaccggcggtgcctttagaaatggacgacgggcatgcttgcccgctccctgcccagatacaagcaacatcaatctatggaatattcttagaaataatatcggtaaggaccttagtaaagtgtcgatgcccgtggagttgaacgagcctctcaacaccttgcagcatctgtgtgaggagatggagtacagcgagcttctggacaaggcatccgaaaccgatgacccatacgaacgtatggttctagtggccgcttttgccgtaagcggctactgtagcacctacttcagggcgggatcaaaaccatttaaccccgtactgggcgagacctacgaatgtatccgagaggataaagggtttcgtttttttagtgagcaggtcagtcatcaccctcccattagtgcctgccactgtgaaagcaaaaacttcgtgttttggcaggacatcagatggaagaataaattttggggcaaaagcatggagattctgcctgtcggtaccctgaatgtcatgctgccaaagtacggtgattactatgtgtggaacaaggtgacgacctgtatacacaacatcctgtccgggagacgctggatcgagcattatggagaggttaccattcggaatacaaagtccagcgtttgcatctgcaagttaactttcgtgaaggttaactattggaattccaatatgaacgaagtacaaggagtcgtgatcgaccaagagggcaaagctgtctaccgtttgtttggcaaatggcatgagggactgtactgcggcgtggcaccatccgctaaatgcatatggcgccctggtagcatgccaacaaactatgaactctattacgggttcaccaggtttgctattgaactgaacgagttggatcctgtgctcaaggacctccttccaccaaccgatgcacggtttcgccctgaccagagatttttggaagaggggaacctggaggccgcagcaagcgaaaaacagagagtggaagaactgcagagaagtaggagacggtacatggaggagaacaacctggagcatatccccaaatttttcaaaaaggtgatagacgcaaaccagagggaagcctgggtgtccaacgacacatattgggaactgagaaaggatccaggcttttcaaaggttgactcaccagtgttgtggtag

SEQ ID NO: 233789 - DNA, 2697 bp, synthetic construct
  misc_feature 1..2697: note = Description of Artificial Sequence: Synthetic coding sequence
  source 1..2697: mol_type = other DNA
atgtcgagtgacgaaaagggaattagccccgcacacaagacctccactccaacacatcggagcgcgtcaagcagcacaagttctcagcgggactcccgccagtcaatccacatactggaaagaactgctagcagttcaaccgagccatctgtttctcgccagttgttggagcccgagcccgtcccgctgtccaaggaggcggatagctgggagattattgaagggctcaagattggtcagactaatgtccagaaaccagacaaacatgaaggctttatgctgaaaaagcggaagtggccactaaagggctggcataagcggttcttcgtactagacaatggaatgttaaaatactccaaggccccattggacatccaaaaggggaaagtccatggctctatcgacgtgggcctgtctgtcatgtcgatcaagaagaaggccaggcgcattgacctggacaccgaggagcacatatatcacctaaaggtgaagtcgcaggactggttcgatgcctgggttagcaaactgcggcaccatcgcctataccgtcagaacgaaattgtgaggtcccctagggacgcctcttttcacatttttccatccacgagtacggccgagtccagcccagctgccaacgtttccgttatggacggtaagatgcagcccaacagcttcccctggcagtctcctctgccttgctcaaattctcttcccgcaacctgcactaccggacagtccaaagtagcagcctggctgcaggacagtgaggagatggacaggtgcgccgaagatctcgcgcactgtcagagcaacctggtcgaattgagcaagctgcttcaaaatttagagatcctacagagaactcagtcagctcccaattttacagacatgcaggctaattgcgtggatattagcaagaaggacaagcgcgtcacacgtcgctggagaactaaatccgtttccaaagacacaaaaatccagttgcaggtcccttttagtgcgaccatgtcaccagtgcggctgcactcatcgaatcccaacctgtgcgcagacattgaattccagactccaccctctcatctcaccgaccccttagagtctagtacagactataccaagctccaggaagagttttgcctgattgcacaaaaagtgcattccctgctcaaaagcgccttcaactccatcgccattgaaaaagagaagctgaagcaaatggtctccgaacaggatcatagcaaaggccattccacacagatggctcgtttgcgccagtccctgagtcaggctggagaacagatccacgtgtcacttccactgtctcagcaggtggccaatgagtctcgcttgtcgatgagcgaatctgtgagtgagtttttcgacgctcaggaggtattactgtcagcttcctccagcgagaacgaggcctcagacgacgagagctacatttccgatgtaagcgataacatctctgaagacaacacatcagttgcagataacatctcacggcagatccttaacggcgaactgaccggcggagccttccgcaacggccgacgggcttgccttcccgctccttgtccagacacttctaatataaatttgtggaatattctgcgcaataacatcggcaaagatctatccaaagtcagcatgcctgtggagctgaatgaaccgttaaacactttacagcatctatgtgaggaaatggaatacagtgaattattggataaggcgagtgagaccgatgacccatacgaacggatggtgctggtggcagctttcgctgtaagcgggtattgcagcacctacttcagggctggctctaagccattcaatccagtgcttggggagacctacgagtgtatccgagaagacaagggcttccggttcttttctgaacaggtcagccaccaccccccaataagcgcgtgccactgtgagagtaaaaattttgttttctggcaggatattagatggaaaaacaagttttggggcaaaagcatggagatcttgcccgtcggcaccctcaacgtcatgctgccaaaatacggcgactactatgtttggaataaggtcaccacctgcatccacaatatattaagtggtaggaggtggatagaacactacggggaggttacaatccggaacacaaagagcagcgtgtgtatatgtaagcttaccttcgtcaaagtgaactactggaattccaatatgaatgaagtccaaggggtcgtgattgatcaggagggcaaggccgtgtacaggctgtttggcaagtggcacgagggattgtattgcggcgttgcaccatcagctaagtgcatttggagacccggatctatgcccacaaactatgagctgtattacgggttcacacggttcgcaattgagcttaatgaactcgaccctgtactgaaggacctgctgccacccaccgatgccagattccgcccagaccagagattcctggaagaaggcaatttagaagctgccgctagcgagaagcaacgggtggaagagctgcaacgatcccgccgacgctatatggaagagaataatttggagcatattcctaagttcttcaaaaaagtcatcgacgccaatcaacgcgaggcttgggtgagcaatgatacttactgggaactcaggaaggatcctggtttttcaaaggtcgatagtccggtcctgtggtag

SEQ ID NO: 233790 - DNA, 573 bp, synthetic construct
  misc_feature 1..573: note = Description of Artificial Sequence: Synthetic coding sequence
  source 1..573: mol_type = other DNA
atggatggtaaaatgcaacccaactcttttccatggcagtcaccattgccttgtagcaattccttgcccgcaacttgtactacaggacaatcaaaagtggcagcttggttacaagacagcgaagaaatggatcggtgtgcggaggatctggcccattgtcaatccaatctcgtcgaactgtcgaaactcctgcagaatctggaaatcctacagaggacccagtctgctcccaattttacggacatgcaggcaaactgcgtggacatctcaaaaaaggataagcgcgtgacacgcaggtggcgtaccaaaagtgtgtccaaagataccaaaatccagttacaggtgcctttttcagcaacaatgtccccagttaggctgcacagctctaatccaaacctgtgtgccgatattgaattccagacgccgcctcctaaccatttcggcattcttagcgtattactgcagccttacagtttaaaaaaaaaaaagaaaaaaaagaaaaagtccaccccgtcactggaatctcgcattaaaggtgcggagtacaagattcagagtcttacctcattatag

SEQ ID NO: 233791 - DNA, 2880 bp, synthetic construct
  misc_feature 1..2880: note = Description of Artificial Sequence: Synthetic coding sequence
  source 1..2880: mol_type = other DNA
atgagttccgatgaaaaaggcatcagcccggctcataaaacttcaacacccacgcataggagtgcctcctcctcaacctcctctcagcgagatagccggcaatctatccacatcctggagaggaccgcatctagttccaccgagccatccgtctctagacagcttctggaacccgaacctgtgccactgagcaaggaagccgactcatgggaaatcattgaaggcctgaagatcggccagactaatgtgcagaagccagataagcacgaggggtttatgctcaagaaacgcaaatggcccctgaagggatggcacaagcgcttcttcgtcttggacaacggcatgcttaagtactcaaaggcccctctggatatccaaaaaggaaaggtgcatggctctattgatgttgggttaagcgtgatgtctatcaaaaaaaaagcccgtaggatcgatttagacacagaggagcatatttaccacctaaaggtgaagagccaggactggttcgacgcatgggtcagcaagctaaggcatcatcggctttaccgccagaacgagatcgtgcgttcaccacgcgacgcatcattccatatattcccctcaactagcaccgccgaaagttcccccgcagctaacgttagcgtaatggatggcaaaatgcagcctaactccttcccctggcagtctccactgccatgtagcaattcactgcctgccacgtgtaccacgggtcagtctaaggtggctgcatggctccaagatagcgaggaaatggatcgttgcgcagaggacttagctcactgccagtcgaacctggtggaactgagcaaactgctccaaaacctagaaattctgcaaaggacgcagagtgctcctaacttcactgacatgcaggcgaactgtgtagatattagcaagaaggataagcgggtcacacggagatggcggacaaaaagtgtatccaaagatactaaaatccagctgcaggagggccctcctgccaaagggcagttttccaccacgaggcggcgacaaagattggccgcagcagtggcaactacggtgcctttctcagcgaccatgtctccggtccgtctgcacagctctaacccaaatctgtgcgcggacatagagttccaaacccccccaagccacctgacagacccactggaatccagcactgactataccaaactccaggaggagttttgtctaatagcacagaaagttcattccctgttaaaatccgctttcaactccattgccatcgagaaggagaaactgaagcagatggtctcagagcaggaccactctaagggccatagtacgcagatggctcggctgcgccaaagtctgtcgcaggctctgaaccaaaatgccgagctgcggagtagactgaacagaattcacagcgagtctattatctgtgatcaggtggtctccgtaaatattatccctagcccagatgaggccggagagcagattcacgtgagcctgcctctctcgcaacaagttgccaatgagtcgcggctgtctatgagcgagtcagtttccgagttcttcgatgcccaagaggtgctcctatccgcttcaagcagtgagaatgaggcctctgatgatgagtcctacatatcagatgtgagcgataacatttctgaggataacaccagtgtggccgacaatatctccagacaaatcttgaatggcgaacttactggaggcgcatttcgtaacggtcgtagagcctgtctgcccgcaccctgtccagataccagcaacatcaatctgtggaatatcctaaggaacaatatcgggaaagatctgagcaaagtttccatgcccgtggaactaaatgagccactgaataccctgcagcacctctgtgaggagatggagtacagtgaactgcttgataaagcctcggagaccgacgacccgtatgaacgaatggtccttgtcgccgcttttgccgtgtcaggctactgtagtacctattttcgagccggaagcaagcccttcaatcctgtgctcggagagacctacgaatgcattcgcgaggataaggggttccgattcttttcagaacaagtgtctcaccacccgcctattagcgcgtgtcattgcgagtccaaaaactttgtgttctggcaagatataagatggaaaaataaattctgggggaagtccatggaaatccttcccgtgggaaccttgaacgttatgttacctaagtatggagactattatgtatggaataaagttacaacatgtatccacaatatactaagcggcagaagatggatcgagcattacggcgaggttaccatacgaaacacgaagtcttctgtctgtatctgtaaactaacatttgtcaaagttaattactggaacagcaatatgaatgaggtacagggcgtggttatcgatcaggagggaaaggccgtgtaccggctattcgggaagtggcatgagggattgtactgcggcgtcgctccatccgccaaatgcatttggcgtcccggtagcatgcccaccaattatgagctctactacggctttacccgattcgccattgagttgaatgagctggaccccgttctgaaagacctccttcctccaacagatgccagatttcgaccggaccaaagattcttagaggagggtaacttggaggccgctgcctctgagaagcaacgggtcgaagagctccaacgcagccggaggaggtatatggaagaaaacaacctggagcatatacccaagtttttcaagaaggtaatcgacgccaaccaacgagaagcctgggtgtctaacgacacctactgggaactcaggaaggaccccggttttagtaaagtggacagccccgtgctgtggtag

SEQ ID NO: 233792 - DNA, 2712 bp, synthetic construct
  misc_feature 1..2712: note = Description of Artificial Sequence: Synthetic coding sequence
  source 1..2712: mol_type = other DNA
atgtcctctgacgagaaaggaattagccccgctcataagacttccaccccaacgcaccggagtgctagctcaagcacctcaagtcagagagattctcgtcagagcatccacatcctggagaggacagctagctcaagcacagaaccaagcgtgtcacgccagcttctggaacccgagccggtgcctctatcgaaggaggccgactcttgggaaattatagaaggattaaagatcggccaaaccaatgtgcagaagcctgacaaacatgaggggttcatgcttaagaaaaggaaatggccgctcaaggggtggcacaagcgctttttcgtcctcgataacggaatgcttaaatactcgaaagccccactagatatccagaagggtaaggtgcatggatcaatcgatgtgggattatccgtgatgagcataaaaaagaaggcgcgaagaattgatctcgatacagaagagcacatatatcatttaaaggttaaatcccaagattggttcgacgcctgggtttctaagctaaggcatcaccggttatatagacagaacgaaattgtgagatcacccagagacgcttccttccacatattcccatctactagtaccgctgagagctcgccagccgcaaatgtgtccgttatggatggcaaaatgcaaccaaactctttcccatggcagtctccccttccctgttcaaatagtctcccagcgacatgcaccacggggcagtctaaggtagccgcttggctacaggatagtgaggaaatggatcgatgtgctgaggacttagctcactgtcagtctaaccttgtagagctctccaagttgctgcaaaatctggagatcctccaacggacacagagcgctccaaacttcacagatatgcaggtgcctttttcagccactatgagccccgtcagactgcattcatctaacccaaatctgtgcgccgacattgagttccagacccccccaagccacctgacggatcctctggaatcttctacagattatacaaagttgcaggaagagttctgtctgatagcccaaaaggtgcatagcctgttgaaaagcgccttcaactcgatagcaatcgaaaaagagaaactgaaacagatggtcagcgaacaggaccactcgaaagggcatagcacgcaaatggcaaggctacggcagtcgctctctcaggccttgaatcaaaatgcggagctccgttcccgcctcaataggattcattctgagtcaattatttgcgaccaggtcgtgagcgttaacattatcccttccccagacgaggcaggcgagcagatccacgtcagtctcccactgagtcagcaagtggccaacgaatcgaggctttctatgtcagaaagtgtaagcgaattttttgatgctcaggaggtcctgttaagcgcatcatccagcgagaacgaggctagtgatgacgaatcatatatatcggatgtctccgataacattagcgaggataataccagcgtcgccgacaacatcagcaggcaaatactgaatggtgaattgactggcggagcgttcaggaacggtaggcgggcttgtctgcctgctccctgccccgacacctcaaatatcaatctgtggaatattctcaggaacaacatcggcaaagacctgagcaaagtcagcatgcctgtcgaacttaacgaacccctgaacaccctgcagcatttgtgtgaagaaatggaatatagtgaattactggataaagccagcgaaacagacgatccatatgagcgcatggtgctggtggccgcattcgctgtttccggatattgcagcacttattttagagcaggctccaagccctttaatcccgtcctgggtgaaacttacgagtgcataagagaggacaaggggtttcgctttttttcagagcaagtgtcccaccacccccctatctcagcctgccactgtgaaagtaagaacttcgttttctggcaggatatcagatggaaaaacaagttttggggaaaaagcatggagatcctgcccgtgggaacccttaacgtgatgctgcccaaatacggggactattatgtatggaacaaggtgactacctgcattcacaacattctcagtgggagacggtggattgaacactacggcgaagtgactatccggaacaccaaatcgtccgtatgtatctgtaaattgacatttgtcaaagtgaattactggaatagcaatatgaatgaggtgcaaggcgtggttatcgaccaggaagggaaagcagtgtaccgcctgttcggaaaatggcacgaagggctttactgcggagtggccccatctgctaagtgcatttggagacccggatctatgcccactaattatgaactctattatggttttactcgcttcgccatcgaacttaacgaattggacccagtgctgaaagacctgcttcctcccacagacgcaaggtttcgcccagaccagagattcctggaggaaggaaacctggaagctgccgcaagtgagaaacagcgggtggaggagctacagcggtcgcggagaaggtatatggaggagaacaacctggagcatatccccaagtttttcaaaaaggtcatcgacgcaaaccaacgggaagcctgggtgagcaacgatacatactgggaactgagaaaagatccaggattttcaaaggtggactcgccggtgctttggtag

SEQ ID NO: 233793 - DNA, 2529 bp, synthetic construct
  misc_feature 1..2529: note = Description of Artificial Sequence: Synthetic coding sequence
  source 1..2529: mol_type = other DNA
atggactttcaagagcgtgatcctccttttctccctgagagtgctcaatccagtaaaccttcttccgctcagcaagccagcgaactgtgggaagtcgtcgaggagccccgagtgagactgggaactgagggcgtgatgcctgaaaggcaggagggtcacttgctcaaaaagcgcaagtggccactgaagggctggcataaacgatactttgtcctagaagatgggattctgcattacgccacaacgcgccaggatataaccaagggcaagctgcacggaagcatcgacgtgaggctgtcggtcatgtccattaataagaaggcccagaggatagacctcgataccgaggacaatatctatcacctgaaaatcaaatctcaagatcttttccagagttgggtagcccaactacgggcacatagactcgcgcacagactcgatatgccaagaggaagcctccctagcactgctcaccgcaaggtgcccggtgcccagctgccaacggcagcgaccgccagtgcccttccgggattgggcccaagagagaaagtatccagctggctgcgagatagtgacggcttggatcggtgttcgcacgagctgtctgaatgtcaaggcaaactgcaggagctgcaccgcctgcttcagagccttgagagcttgcatcgtataccgtctgcacctgtcatcccaacccatcaggcctccgttaccaccgaaagacctaaaaagggcaagaggacatcgcggatgtggtgtacccagagttttgccaaagacgacacaattgggagggttgggagattgcacgggtctgtacccaacctgtctcgctacttggaaagccgggacagcagcggcacgcgcggactgcctcctaccgattatgcccacttacagcggtccttctgggctcttgcacagaaagtgcactcatcactgtcttcagtgcttgccgctcttacaatggagcgtgatcagttacgcgacatgcaccagggtagcgaactatcccggatgggcgtctctgaggcttctacagggcagcgccgtctgcattccctttccactagttctgacactaccgcagattcatttagttccctcaaccccgaagaacaggaggctctgtacatgaagggacgcgaacttactcctcaactgagccagacctccatactctccctggctgattctcataccgaattttttgacgcctgcgaggtattactaagcgctagctcctcagagaacgagggcagcgaagaagaagaaagttgcacctccgagattactacatctctctccgaagaaatgcttgatctgcggggtgccgaaagatgccaaaagggtggctgcgttccgggtagacctatgggaccgccacgacgtcgatgtcttccagctgcctccgggcctggagcggatgtgtcgctttggaatatccttaggaacaacatcgggaaagatctgtcaaaagtgtccatgcctgttcaattgaatgagcctctgaatacacttcagaggctctgcgaggagttggagtattcttctctgctcgatcaggcatccaggattgccgacccgtgcgaaaggatggtctatattgctgccttcgccgtgagcgcctactcatccacgtaccatcgggcagggtgcaagccatttaatcccgttctcggagagacctatgaatgtgaaaggcccgacaggggatttcggttcatctccgaacaggtgtcacaccatcctccaattagtgcttgccacgctgagtcagagaactttgcattttggcaggacatgaagtggaagaacaaattttggggcaagagcctggagatagtgccggtgggcaccgtgaacgtgagcttacctaggtttggtgatcatttcgaatggaacaaagtgacgtcatgcattcacaacgtactgagcggccaaagatggatcgagcactacggagaagttctgattaggaatacacaggatagctcctgccattgtaaaatcacgttctgtaaggctaagtattggtcctcgaatgtacacgaggttcagggcgctgtgctgagcagatcggggcgagtgctccatcgtctgtttggcaaatggcacgagggtctttatagggggcctaccccgggtggtcagtgcatctggaagccaaattccatgcctccagaccacgaacgcaacttcggcttcacacagttcgccctagaactgaacgaactgacggcagagcttaaacggagtttaccctctaccgataccaggctgaggcccgatcagaggtacctggaagagggaaatatccaagcagccgaggcccagaagagaaggatcgagcagctccagagagacagacggaaggtaatggaggagaacaatatcgtccatcaggcaagattctttaggcggcagaccgatagttccggcaaggagtggtgggtaacgaacaacacatattggcgattgcgggctgaacctgggtacggcaacatggatggtgccgttttatggtag

SEQ ID NO: 233794 - DNA, 2529 bp, synthetic construct
  misc_feature 1..2529: note = Description of Artificial Sequence: Synthetic coding sequence
  source 1..2529: mol_type = other DNA
atggacttccaggaacgcgacccaccctttttgcccgaatcagcccagtcatcgaagcccagtagcgcccaacaggctagcgagttatgggaggtggtcgaggagccgcgagtgcgccttggaaccgagggcgtgatgccagagcgacaggagggccacctcctgaagaaacggaaatggcccctgaaggggtggcataaaaggtatttcgttctggaagacggcattctgcactatgccactacaagacaggatatcacaaaaggcaagttgcacggaagcatcgatgtgcggctgagcgtcatgtcaataaataagaaagcccagagaatagacttggacaccgaagacaatatctatcaccttaaaatcaagtcccaggacctgtttcagtcttgggtcgcccagctgcgtgcccaccggctggcacacagattagacatgccccgtggctctctccctagcaccgctcaccgcaaggtgcctggggcacagctgcccactgctgcgacagcctctgctctgccgggactaggcccaagagagaaggtctctagttggttgagggacagcgacgggctcgataggtgctcccacgagctatcagaatgccaaggtaaattacaggagctgcacaggctgctccagagtctggaatcgctgcaccggataccatctgctccagtgatcccgacccatcaggcctccgtcaccaccgaacgccctaaaaagggtaaacgtacaagtagaatgtggtgcacccaatccttcgctaaagacgataccatcgggcgagtgggaagactgcacggctcagtgcctaatctgtcccgctatctggagtcacgggactcctccggcacaaggggcttgccaccgacagactacgcacatctccaaagatccttctgggccctcgcacagaaggtccactccagcctttcaagtgtactggccgcactcacaatggaaagggatcagctacgcgacatgcatcaagggtctgaactgtctcggatgggtgtgtccgaggcctctaccgggcaacgcagactacactccttgagtaccagtagtgacacaaccgccgatagcttcagcagcctgaatcccgaggaacaggaagctctgtacatgaagggacgtgaactcactccacagctgtcccagaccagcatccttagcctggccgactcacacaccgaattttttgacgcgtgtgaggtgctgttatctgcaagtagttccgaaaatgagggttccgaagaggaagaaagctgcactagcgaaatcacaacatctctgagcgaggaaatgttagaccttaggggtgccgagcggtgccaaaaaggaggttgtgtacctggacggccaatggggcctcctcggagaaggtgtttgccagcagccagcggcccaggcgctgatgtatcgctctggaacatcttgagaaacaatatcggcaaggatttgagcaaagttagtatgcccgttcaactcaacgaacctctgaataccctgcagaggctgtgtgaagaacttgaatactcttctttgctcgaccaagcctcgcgaatcgcagacccatgcgagagaatggtttacatcgcagcattcgcggtctccgcgtacagttcaacgtaccacagagccggttgcaagccctttaaccccgttttgggcgagacttacgagtgcgaaagacctgaccggggttttaggttcattagtgagcaggtgtcacaccatccccctatctcagcctgtcacgccgaatccgaaaattttgctttttggcaggacatgaagtggaagaacaagttttggggtaagtcgctggagatcgtgcctgtggggaccgtcaacgtgtctctgccacgatttggcgatcactttgaatggaataaggtcacaagctgcatacacaacgtgctgtccgggcagcgctggatcgaacactacggtgaggtcctcattaggaatacccaggactcgtcgtgtcactgcaagattactttttgtaaggcaaaatactggtcatctaacgttcatgaggtgcagggagccgtgctctctcggagcggcagagtgcttcacagactctttggcaagtggcacgagggactgtatcggggacccactcctggcggacaatgcatttggaaacccaattcaatgccccctgatcacgagcgcaactttggttttactcagtttgccctggagctgaatgaactcaccgccgagctcaaaagatccctgccaagcaccgacactaggctaaggccagatcagcggtatttagaggagggaaacatacaagccgcagaggcgcagaaaagacgaatcgagcaattgcaaagggatcgcagaaaggtgatggaggaaaacaacattgtgcaccaggccagattctttcggagacagacagacagtagcggaaaagagtggtgggtgacgaataatacttattggaggttgcgggctgagccaggatatggtaatatggacggcgctgtcctctggtag

SEQ ID NO: 233795 - DNA, 2670 bp, synthetic construct
  misc_feature 1..2670: note = Description of Artificial Sequence: Synthetic coding sequence
  source 1..2670: mol_type = other DNA
atggagggaggtttagctgacggcgagcctgacaggacctctctcttaggcgactccaaggacgttctgggcccttcaacagtcgttgctaacagtgacgagtcacaacttctcactccgggaaagatgtctcagcggcagggaaaggaggcctatccgactccaacaaaggacctgcaccagccatccttatctccggcttctccccattcacaagggttcgagagaggtaaggaagatatttctcagaataaggatgaatccagcctctcaatgagcaaaagcaagagtgaatccaagctctacaacggctctgagaaagattcatccacaagtagtaaactgaccaagaaagaaagtctcaaagttcagaaaaagaattaccgggaggaaaagaagcgcgctacgaaagagctcctctctaccataaccgacccaagcgtgatagtgatggctgattggctcaaaattcggggaacactgaagtcctggaccaaactctggtgtgtcctgaagcccggagtcctgctcatctacaagactcagaaaaacgggcaatgggttgggaccgttttacttaatgcctgtgagattatcgagaggccctcaaagaaggatggcttctgtttcaaactcttccacccactcgaacaaagcatttgggctgtcaagggtcccaaaggcgaggcagtaggttctattactcagccactgccttccagctacctgattatcagagccacttcagagtccgatggcaggtgctggatggacgcactggagcttgctttgaagtgcagctctttgctgaagagaacaatgattcgagaaggaaaggaacacgatctttctgtgagcagtgactccacacatgttacattctacggcctgcttagggcaaataatctgcactccggggacaacttccagctcaacgacagcgagatcgagcggcaacattttaaggaccaggatatgtattctgacaaatccgacaaagagaacgaccaggaacatgacgagagcgacaatgaggtcatgggtaaatctgaggagtctgacacagataccagtgaacggcaggatgacagttatatcgaacccgagcccgtggagccccttaaggagactacatacacagaacagtcccatgaagagttaggcgaggcaggagaggcttcacagacagagactgtctccgaggagaataaaagcctaatatggaccctgctgaaacaggtgcggcctggcatggaccttagtaaggtggtgttgcccacatttattcttgaacctcgatcctttttagacaaactttcagactattattatcacgccgacttcttaagcgaagccgctttagaggaaaatccttactttagacttaagaaagttgtgaaatggtatctcagcggcttttacaagaaacccaaaggcctgaagaaaccatataatccgattcttggagaaacttttcggtgtctgtggatccatccacggacaaattctaagaccttctacatagccgagcaggtctcgcaccacccccctatcagcgccttttatgtttccaatcgaaaagacgggttctgcctcagtgggagtatattggcaaagtccaaattttacggaaacagcctgtctgctatcctggaaggtgaagctaggctgactttcctgaacagaggcgaggattatgttatgactatgccctacgcccattgcaaaggaatactctacggcacaatgacactggagctagggggtacagtcaatatcacttgtcaaaagacaggttactccgcaatcctcgagttcaaattgaaacccttcctggggtcgtctgactgtgtgaatcagatttccgggaaactgaagctgggcaaagaagtgctcgctaccctcgagggacactgggactctgaggtgttcataaccgataaaaaaacggacaatagcgaagtattctggaatcctactcctgacattaagcagtggcgtctgatccgacacactgtgaagtttgaggagcagggcgattttgaaagcgaaaagttgtggcagcgcgtgacccgtgcgatcaatgcaaaggatcagactgaggcaacgcaggagaagtacgtcctggaagaggcccagagacaagcagcacgcgatagaaagacgaaaaatgaggagtggagttgcaagctttttgagttggaccctctcacaggagagtggcattacaagtttgcagatactaggccgtgggatccccttaatgacatgatccagtttgaaaaggacggagttatacagaccaaagtcaaacacaggacgcctatggtcagcgtgcccaagatgaaacacaaacctacccgtcaacagaagaaagtggctaagggctactctagccccgagcctgatattcaggactcaagtggttcagaggcacagtctgtcaagccctcgacgaggcgtaagaagggaatagagctcggcgacattcagtcgtccattgagtccattaaacagactcaggaggaaatcaaaaggaacattatggcccttcgtaatcatctcgtctcgtcaactcccgcaacggattattttctgcagcaaaaagactacttcataatcttcctccttattctgctacaggtgattataaactttatgttcaaatag

SEQ ID NO: 233796 - DNA, 2544 bp, synthetic construct
  misc_feature 1..2544: note = Description of Artificial Sequence: Synthetic coding sequence
  source 1..2544: mol_type = other DNA
atgtcacagcgtcaggggaaggaggcttaccccacaccaacgaaggacctgcatcagccatcactgagtccagcgtctccgcactcacagggctttgagcgagggaaggaggacattagtcagaataaagatgaatcgtctttaagtatgagcaaaagcaaaagtgaatctaagttgtacaatggatccgaaaaggatagctcaacatcctctaaattgactaaaaaagaatccctgaaagtgcagaagaaaaattatcgggaggaaaagaagagagcaaccaaggaattgctgagtacaataacggatccttctgtgattgtgatggccgactggttaaagattcgaggaaccctgaaaagctggactaagttatggtgtgtgttaaagcccggagtgcttttgatctacaaaactcaaaaaaacggtcagtgggtgggcacagtcctgctcaatgcctgcgagattatagagcgcccatcgaagaaggatggcttttgctttaagcttttccaccctctggagcagtccatatgggccgtaaagggtccaaagggcgaagcggttggatcaatcacccagcccctgccgtccagctacctcattattcgagccacgagcgaatctgacggtagatgctggatggacgccctggagctggctctcaagtgctctagtttactgaaaagaacaatgatccgggaaggcaaggagcatgacttatcagtaagctcggatagcacacatgtgaccttttatggcctgctgagggccaataatcttcattccggcgacaatttccagctgaacgattcggaaatcgaacggcagcatttcaaagatcaggatatgtactccgacaagagtgacaaggagaacgatcaagaacacgatgaatctgacaacgaagtgatgggcaagtccgaggagtccgataccgacacttcagaaaggcaagatgacagctacattgaaccagagccagtagaacctttgaaagaaacaacatacacagagcagtctcatgaggaactgggagaagccggagaggcctcccaaaccgaaacagtatctgaggaaaacaagtcgctgatatggaccctgctgaagcaggtgcgcccagggatggatttgtcaaaagttgtccttccaacatttattctggaaccgaggtccttcttagataaactgagcgattattactatcacgcagatttcctgtccgaagcagccttagaggagaacccatatttccggcttaagaaggttgttaagtggtacctctctgggttctataaaaaacctaagggcctgaagaagccttacaatcctatattaggggaaacttttagatgcctgtggatacacccaaggacgaacagcaagaccttttatatcgccgagcaggtgagccaccacccaccaatttctgctttttacgtgtccaatcgcaaggacggtttttgcctcagcggctcaattctcgccaaaagtaagttttatggcaactccctgtccgccattctggagggagaagcccgtctgaccttcctaaatagaggcgaagactacgtaatgactatgccctatgcccattgcaagggaattctttacggcaccatgaccctcgagttaggcggtaccgttaacatcacttgtcagaagactggttattcggcaattctagaatttaagcttaagcctttcctgggttccagcgactgcgtcaatcaaatctccggaaagctcaaactcggcaaggaagtgctggccaccttggaaggccactgggactcagaagtttttatcaccgacaagaaaacagataactcagaagtcttctggaatcccacaccggacattaaacagtggagactcatcaggcacacagtgaaatttgaagaacagggagactttgaaagcgaaaaattgtggcaaagggtgactcgggcaatcaacgcgaaagaccaaaccgaggctacccaggagaaatacgtgcttgaagaagcccagcgacaggccgctagggataggaagaccaagaacgaggaatggtcgtgcaagttgttcgagctggatcccctcacaggcgaatggcattacaaatttgccgacacccggccttgggatcccctgaatgatatgatacaatttgaaaaagatggcgtgatccaaacaaaagttaagcacagaacccctatggtgagcgttccaaaaatgaaacataagccaacaaggcagcagaaaaaagtggccaaaggctacagcagtcctgagccagatatccaggacagtagcggcagcgaagcacaatcagttaaaccatccacgagacgcaaaaagggtattgagcttggagatattcagtcttctatagagtctattaaacagacacaggaagagattaagcggaatattatggctttgcgcaatcatctcgttagttcaacccctgccactgattattttctgcagcaaaaagattatttcatcatatttctcttaattctgctgcaggtcataatcaacttcatgtttaaatag

SEQ ID NO: 233797 - DNA, 2544 bp, synthetic construct
  misc_feature 1..2544: note = Description of Artificial Sequence: Synthetic coding sequence
  source 1..2544: mol_type = other DNA
atgtcacagcggcaaggcaaggaagcctaccccactcccacaaaggacctgcaccaacctagcttaagccccgcttcacctcactcccagggttttgaacgcggaaaggaagacatctcacagaacaaggacgagtcatccctttccatgtctaagagtaagtcagagtctaaactgtacaacggaagtgaaaaagactcctccactagctcaaagttgacaaaaaaggagtcgcttaaagtccagaaaaaaaactatagagaagaaaaaaagcgcgcaactaaagagcttttgtctaccattaccgatccgtctgtcattgtgatggccgattggttgaaaattaggggaactctgaagtcttggactaagttatggtgtgtgctgaagcctggagtcctcctgatatacaaaacacagaagaatggccagtgggtgggaactgtgctgctgaatgcatgcgagattattgaaagacctagcaaaaaagacggattctgcttcaaactgttccatcccctagaacagtccatctgggctgtgaagggtcccaagggcgaggccgtgggatcgatcactcagccattgcctagttcatatttgattattcgcgcaacttccgaatcagacggaaggtgctggatggatgctttagagcttgcactcaagtgcagctctttgcttaagaggacaatgatcagggagggaaaagaacacgacctgtcggtgagttcagacagtacccacgtcaccttctacggcctattaagagcaaataatctccattctggcgacaactttcagttgaacgactccgaaatagaacgccagcacttcaaggatcaggatatgtattcagacaagagtgacaaagagaatgatcaagagcacgacgagtcagacaacgaggtgatgggcaagtctgaggaaagcgacaccgatacgtctgaaaggcaggatgactcatacattgagccagagccagtagaacccctcaaagagactacttataccgaacagtcccatgaggagctcggtgaagctggagaggcgtcccagactgagaccgtcagtgaagaaaacaagtcattgatttggacactccttaaacaggtcagacccggaatggatctgagcaaggtggtgctccccacttttattctggagcctcggagttttctggataaactcagtgactattactaccatgcagatttcctctcagaagctgcacttgaggaaaacccgtacttcaggttgaagaaggtagttaagtggtacctgtcaggcttttataagaagccaaagggcctcaagaaaccatataacccaatactcggggagactttccgctgcctgtggattcatccacgaaccaactctaagaccttttatatagccgagcaagtgtcccatcatcctcccatttctgctttctacgtgagcaatcggaaggatgggttctgtctcagtggttctattctggcaaaaagcaaattttacggtaactccctgagcgccatccttgaaggggaggctagacttacttttcttaaccggggtgaagattacgttatgactatgccttatgcccattgcaagggtatcctttacgggactatgacactggaactcggcggaaccgttaacattacctgtcaaaaaaccggctactcagccatcctcgaattcaagttgaagccttttcttggctcgtcagattgcgtgaatcagatctctggaaaactaaaactggggaaagaagtgttagcaactctggaagggcactgggactccgaggtgttcatcacagacaagaaaacagataactcggaagtattttggaatcccacgccggatataaaacaatggcgacttatccggcataccgttaaattcgaggaacagggagatttcgagagcgagaaactttggcaacgggtgacgcgggcaatcaacgcgaaggaccagaccgaggctactcaagagaagtatgtgctagaagaggcacagcgtcaggctgcacgcgatcgcaagacaaagaatgaggagtggagctgtaagctcttcgaactcgaccccttgactggtgagtggcactataagtttgccgataccaggccttgggacccactcaacgacatgatccagtttgaaaaagacggggtgatacagaccaaagtgaaacacaggaccccgatggttagcgttcctaaaatgaaacacaagccaacccgccaacagaagaaagttgctaaaggttattcaagccccgaaccggatatccaggatagctcagggagcgaggcgcagagcgtgaaaccaagcacacgaaggaagaaggggatcgaactgggagatatccaatcttctattgagtcaatcaagcaaacgcaggaggagatcaaaaggaatatcatggccctgagaaatcacctggtgagttccacgcctgctaccgactactttctgcaacagaaagattacttcataatattcctgctgatactgctgcaggtgataattaattttatgttcaaatag

SEQ ID NO: 233798 - DNA, 2187 bp, synthetic construct
  misc_feature 1..2187: note = Description of Artificial Sequence: Synthetic coding sequence
  source 1..2187: mol_type = other DNA
atggagggagggttagccgacggggagccggaccggacttcccttctgggcgactccaaggacgtcctcgggccttcgactgtggttgccaactcagacgagtcccagcttcttaccccagggaagatgtcgcaaaggcagggtaaggaagcctacccaacaccaacaaaagatctccaccaaccgtctctctcacctgcgagccctcacagccagggattcgaacgaggcaaagaggacatcagccagaacaaggacgagtcttccctatctatgtctaaatctaagtctgaaagcaagctgtacaatggtagtgagaaggatagcagcacttcttccaagctgactaagaaggaaagtctgaaagttcagaagaagaattatagagaagagaagaaacgtgcaacaaaagagctcttgtcgactatcacagacccgagcgtaatcgttatggcagactggctaaaaatcagagggaccctgaaaagttggacaaagttatggtgcgttctgaagcctggtgtgctgctcatctataaaacacagaaaaatggccagtgggtgggaactgtgttactgaatgcgtgcgagatcatcgagcggccatcaaagaaagacggcttttgcttcaaactcttccaccccctggaacagtctatctgggccgtgaaaggaccaaaaggagaagccgttggaagcatcacacagccgttgccatctagttaccttatcataagagcaacctcggaaagtgatggcaggtgctggatggacgcgctggagttggcactcaagtgtagctccctgttgaaacggactatgatcagagaggggaaagaacacgacctgtctgtgtcgagcgactcaactcatgtcacgttttacggattactaagggcaaataatctgcactccggcgacaactttcaactgaacgattctgaaatcgaaagacagcacttcaaggaccaggatatgtattctgataaaagcgacaaagagaatgatcaggaacacgacgagtccgataacgaggttatggggaaatccgaggaatctgatacagacacctcggagcgccaggacgattcttacatcgagcccgagcctgtcgaaccgctcaaggagaccacatatacggaacagagtcacgaggagctcggcgaggcaggtgaagcctcccagaccgagacggtgtctgaagagaacaagtccctgatttggaccttgctgaagcaggtgagaccgggaatggacttgagcaaagtggtactcccaacattcatcctggaaccaagatcatttttagacaagttgtccgactactactaccacgcagatttcctctccgaggccgcactagaggagaatccctactttcggctgaagaaggttgtgaaatggtacctgtctggattttacaaaaagccaaaagggctgaaaaaaccttacaacccgattctcggggagactttcaggtgtttgtggatccaccctagaaccaattccaaaaccttctacatagccgagcaagtgagccaccatccaccaatctctgctttctacgtctccaatcgtaaagacggcttttgcctgtcaggcagtatactagccaagagcaaattttacggaaactcattatcagctatattggagggggaggccaggttgacattcctgaatagaggggaggattatgtgatgaccatgccctacgcacattgcaaaggaatcctgtacggaaccatgacattggaattaggcggaaccgttaatattacctgccagaagaccggttattccgcaattctcgaatttaagctcaagccatttctggggtcgtccgactgcgtgaaccagatcagtgggaagctgaagctggggaaggaagtgctggctaccttggaaggtcattgggattctgaggtatttattaccgacaagaaaacggacaactctgaagtattttggaatcccacgcctgatatcaagcaatggcgcctgatccgtcatactgtgaaatttgaggagcagggagactttgagtccgaaaaactgtggcagagggttacccgcgctatcaatgcaaaagaccagaccgaggcaacgcaggagaagtatgtcctggaggaggcccagaggcaagccgcaagggatcgtaagaccaagaacgagaagaagaaatag

SEQ ID NO: 233799 - DNA, 2625 bp, synthetic construct
  misc_feature 1..2625: note = Description of Artificial Sequence: Synthetic coding sequence
  source 1..2625: mol_type = other DNA
atggaaggcggtttggcagacggtgagccagaccgtaccagcgctaacagtgatgagtcccagctactgaccccgggaaagatgagtcagcgtcagggcaaagaggcgtatcctactcctactaaggacctgcatcagccatcattatcaccggcttccccacactctcagggattcgaaagaggaaaagaagacatctcccagaataaagatgagtcaagtttgagcatgtctaagtctaaaagtgaaagcaagctgtataacggcagtgaaaaagactcctcgacaagctctaagcttacaaaaaaagagtcactcaaggtgcagaagaagaactatcgagaggaaaagaaacgggctaccaaggagttgctgagcaccatcacagatccatctgtgattgtgatggcagattggctaaagatccgcggaactctgaagtcctggactaagttgtggtgcgtgttaaagcccggagttctactgatctacaaaactcagaaaaacggtcagtgggtcgggaccgtactccttaacgcttgcgaaatcattgagagaccttccaaaaaagatgggttctgcttcaaactcttccatccactggaacagagcatttgggccgtgaaaggtcccaagggcgaagccgtaggaagcatcacgcagcccctcccttcaagttacctgattattcgggctacatcagaatccgatggacggtgctggatggatgccctcgaactcgctctgaaatgctcctccctgctaaagcgcactatgattcgtgagggaaaggagcacgatttgtcggtgtcttcagattctacccatgtcactttctacggacttctgcgcgcaaataacctgcacagcggcgataacttccagttgaatgactccgaaattgaaaggcagcattttaaagaccaggatatgtattccgacaaaagtgacaaagagaacgaccaggagcacgacgagtccgacaacgaagtgatgggcaagtcggaggaaagcgataccgatacaagcgaaaggcaggatgattcctacatcgagccggagcccgtggagcctctcaaagagacgacctacacagaacagagccacgaagagcttggggaagcgggtgaagccagccagaccgaaacagtttctgaagagaataaaagtctcatctggacgctgttaaaacaggtgaggcctggtatggacctgtcaaaggttgtactgcctacatttatcctggagccgcgaagcttcctcgataaattgagcgactactactatcatgctgacttcctctccgaggctgctctcgaggagaacccttattttaggcttaagaaggtggttaagtggtatctgtcagggttctacaagaagcccaaaggactgaagaagccatacaatcctatcctgggagagacattcagatgcttgtggatccatccgagaacgaactcaaaaaccttttacatcgctgaacaagtgtctcaccatcctcctattagtgccttttacgtatctaatagaaaggatggattctgtctgagcggctcgatcctcgcgaagtccaagttttacggcaatagcctgagcgcaatcctcgagggagaagccagactgacattcctcaatcgtggggaagactacgtcatgacaatgccttacgcccattgcaaaggcatattgtatggaaccatgacgctcgagctcgggggaaccgtgaacattacgtgtcagaaaactggttattccgcgatcctggagttcaagctcaagccgttcctcggcagctctgactgtgtgaatcagatttcagggaagctgaagctgggcaaggaagttcttgcgacactagaagggcattgggattctgaagtatttataaccgacaagaagaccgataacagtgaagtgttctggaatcccacgccagatatcaaacagtggagactaattagacataccgtgaaatttgaagagcagggggattttgaatccgaaaaactgtggcagcgggtgacgcgtgcgataaatgccaaggatcagactgaggcgacacaggaaaaatatgtactggaagaagcccaaagacaagcagcacgggaccgtaagacaaaaaacgaagaatggtcttgcaaactgtttgagctggatccactgactggggagtggcactataaatttgccgataccaggccttgggaccccctaaatgatatgatacagtttgaaaaagacggcgtgatccagaccaaagtaaaacatagaacacccatggtgtccgtgcctaagatgaaacataagccaaccaggcagcagaagaaagtggctaaaggatattcatccccggagcctgatatccaggattcttccggaagcgaggcacaatctgtgaaaccaagcacacggagaaagaagggcatcgaactgggcgacattcagtcatctattgagagcatcaagcagacacaggaagagattaagagaaatattatggctctacggaaccatctcgtgagcagtacccccgcaacagactactttctccagcagaaagactattttatcatctttctgctgatcctgctgcaagtgataattaacttcatgtttaagtag

SEQ ID NO: 233800 - DNA, 162 bp, synthetic construct
  misc_feature 1..162: note = Description of Artificial Sequence: Synthetic coding sequence
  source 1..162: mol_type = other DNA
atggagggcggattggctgatggcgagcccgatcgcacctctcttctgggtgattctaaggatgtactggggccatccactaatagcgatgaatctcagttactcacgcctggcaagatgagtcagcggcaaggaaaggaggcctacccaaccccaacatag

SEQ ID NO: 233801 - DNA, 231 bp, synthetic construct
  misc_feature 1..231: note = Description of Artificial Sequence: Synthetic coding sequence
  source 1..231: mol_type = other DNA
atgtcacaaaggcagggtaaggaagcttacccgacaccaaccaaggaccttcaccagccatcattgtcacctgcgtccccacacagtcagggcttcgagaggggtaaagaagacatttcccagaacaaagacgagtccagtctctctatgagcaaaagcaaatccgagagtaagctctacaatgggtcggagaaggactccagcacttcgtcaaaattaacgaaaaaatag

SEQ ID NO: 233802 - DNA, 177 bp, synthetic construct
  misc_feature 1..177: note = Description of Artificial Sequence: Synthetic coding sequence
  source 1..177: mol_type = other DNA
atggagggcggactcgcggacggggagccagaccggacatcgttgctcggtgactctaaagatgtcctcggtccatccactgtcgtagctaatagcgacgaatctcagctgctgacccctggcaaaatgagccagcggcagggaaaggaggcctatcctacaccaacgaaggattag

SEQ ID NO: 233803 - DNA, 336 bp, synthetic construct
  misc_feature 1..336: note = Description of Artificial Sequence: Synthetic coding sequence
  source 1..336: mol_type = other DNA
atgagtcagagacagggtaaagaggcttaccccacgccaactaaagatctgcatcagccatcactgtcacctgcctccccacattcgcagggcttcgaacgcggtaaggaggacatcagccagaataaggatgaaagcagcctgagcatgagcaagtctaaaagtgaaagcaagctatacaacggttccgaaaaggatagtagcacttcttctaaattgactaagaaagagagtctgaaggtgcagaagaagaattaccgcgaggagaagaagcgcgctaccaaagagcttttgtctacgattactgatcccagcgtcattgtgatggcggactag

SEQ ID NO: 233804 - DNA, 2226 bp, synthetic construct
  misc_feature 1..2226: note = Description of Artificial Sequence: Synthetic coding sequence
  source 1..2226: mol_type = other DNA
atgccctaccgacgggtgacctctggtcgcctgctgtcacttgccgctccaaaaatggcctccatcatggagggcccactgagcaagtggaccaacgtgatgaagggctggcagtaccgctggttcgtgctggactacaatgccggtctgctctcatattacacctcaaaggacaagatgatgagagggtcacgcaggggctgtgtcagactgcgaggagctgtcattggaattgatgacgaggacgatagcacatttacgatcacagtcgatcagaaaacgttccactttcaggcccgtgatgcagacgagagagaaaaatggatccacgctcttgaggagactattcttcgccacactctgcagctgcagggcctagacagcggcttcgtgccaagtgttcaggattttgataagaaacttacagaagcagatgcgtatttgcagatcctaattgagcagctcaagctgttcgatgacaagttgcagaactgtaaagaggacgagcagcgcaagaaaatcgagacactgaaagagacgaccaacagtatggtggagtcaattaagcactgcattgtgctcctccaaattgccaagtctacaattaatccagtggacgccatctaccaaccaagtccccttgagcccgtaatttcaaccatgccctcacagacagtcctgccaccggagccggtgcaattgtgcaagagcgagcagcggccttcatccctgcctgtcggacctgtgttggccacgttgggccaccaccagaccccaacacccaactctacaggctcagggcactctcccccttcttctagcttgacatcgccctcccacgtaaacctgagccctaataccgtgcctgagttttcctacagcagctctgaggatgaattttacgacgcagacgaatttcaccagagcggcagttctcctaagcggctcattgattccagcggaagtgcctctgtactaacccacagttccagtgggaatagccttaagcggccagacaccacagagtcattgaattctagcttgagcaatggcactagtgacgctgacctgttcgattcccatgatgacagggatgacgatgccgaggcaggcagtgtggaagagcacaaaagcgttatcatgcacctgttgagtcaggtgcgactaggcatggatctcaccaaggtggtgcttcctactttcatattggaaaggcggtcactccttgagatgtacgccgatttctttgctcacccggatcttttcgtgtctatttcggatcagaaagatccaaaagacaggatggtacaggtcgtgaaatggtatctgtccgcctttcacgctggtcgaaagggaagtgtcgccaagaaaccatataacccgatcctgggcgagatcttccagtgccactggaccttgcccaatgatacggaggaaaacacagagctggtgtccgagggtcctgtcccgtgggtgtcaaagaattctgtgacattcgtcgcagagcaggtcagccaccatcctcctatcagtgccttttacgcagagtgcttcaacaagaagattcagtttaatgcacatatttggacgaagagtaaattcttgggcatgtccatcggcgtgcacaatatcgggcagggatgcgtgtcttgtctcgactacgacgaacattacatactgacctttcctaacgggtatggtaggtctatcctgactgtaccatgggtcgagctgggaggcgagtgtaatatcaattgcagcaaaaccggttacagcgctaacataatatttcacactaaaccattctacgggggaaaaaaacaccgcatcacagctgagattttcagccccaatgataaaaaatcattctgctcgatagagggcgagtggaacggcgtgatgtacgctaaatacgcaactggcgagaacactgtcttcgttgataccaaaaaactgccaattataaagaagaaggtgagaaagctggaggatcagaacgagtatgaatcaagatccttgtggaaagatgttacgttcaacctgaagattcgcgatattgacgctgccacagaagcaaagcacagattggaggaacggcagagggccgaggcgagagaacggaaggaaaaggagattcagtgggaaacacgtctgttccacgaggacggagaatgctgggtgtatgatgagcccttgctgaagcgcttgggggcagccaagcactag

SEQ ID NO: 233805 - DNA, 1881 bp, synthetic construct
  misc_feature 1..1881: note = Description of Artificial Sequence: Synthetic coding sequence
  source 1..1881: mol_type = other DNA
atggccttcctcctggccacctgcggaggtttggatagtggatttgtcccttcagtgcaggactttgacaagaagcttaccgaagccgacgcatatctgcagatcctgatcgagcaattaaaactcttcgacgacaagctgcagaactgcaaggaggatgagcagagaaaaaaaatcgagaccctgaaggagacaacaaactccatggtggagagtatcaaacattgtattgtactccttcagattgctaaaagcactataaacccggtagacgccatttaccaaccctcacctttggagcctgttatctcgacaatgcccagtcaaactgtattaccccctgaacccgttcagttatgcaagtcagagcaaaggcctagttccctccctgtgggcccagttctggccacacttggccaccaccagacaccaacgcctaacagcactggatcagggcacagcccgccatccagttccttgacctcacccagtcacgttaatttgagcccgaacaccgttcccgagttcagctattcaagctcagaggatgagttttatgacgccgacgaatttcatcagagcggatcctcccctaagagattgatcgattccagcggctcagcttccgtcctaactcacagtagctctggcaactccctgaaaaggcccgacactactgagtccctaaacagcagtctgtccaatggcacatctgacgccgacctttttgatagccacgatgacagagacgatgacgctgaggccggttcagtggaagagcataagagcgtcattatgcatttgttatctcaggtgcgcctcggaatggacctgacaaaggtagtcctcccgactttcattttggaaagacgctcactactcgagatgtacgcagacttctttgcccacccagatctcttcgtctccatctccgatcaaaaggatcctaaagatcgaatggtacaggtggtaaaatggtacctaagcgcctttcacgccggtcgaaagggatccgtggctaaaaaaccctacaaccctattctgggggagatattccagtgtcactggaccctccccaacgacaccgaagagaatacggaacttgtttcagaggggcctgtgccctgggtgagtaaaaacagcgttacatttgtcgccgagcaggtatcccaccatccacctatttcagcattctacgcagaatgcttcaacaagaaaatacagtttaacgctcacatctggaccaaatccaaattccttggaatgagcatcggggtacacaacattggacagggctgcgtgagttgtctggattatgacgaacattacattctcacatttccaaatgggtatggaaggtccatcctaactgtcccatgggtggaactgggcggagagtgtaatataaactgttcaaagactgggtactcagctaacatcatctttcacacaaagcccttttacggaggaaagaagcaccgcattaccgccgagatcttctcacctaacgataagaagtccttttgtagtatcgagggtgaatggaatggagtgatgtacgcgaagtatgccacaggggaaaacactgttttcgttgacacaaagaaactgcccattattaaaaaaaaggtccgcaagttggaggaccagaacgagtacgagagtaggtccctatggaaagatgttacattcaatctaaaaattcgggacattgatgcagcaaccgaggctaaacaccgactcgaggagcgccagcgggctgaagcacgggaacggaaggaaaaagagattcagtgggagacccgcctctttcacgaagacggagaatgttgggtttatgacgagcctctgctcaagagattaggagccgcaaagcactag

SEQ ID NO: 233806 - DNA, 2265 bp, synthetic construct
  misc_feature 1..2265: note = Description of Artificial Sequence: Synthetic coding sequence
  source 1..2265: mol_type = other DNA
atgccatatcggagagtcaccagtggacggctgctgtcactggctgcgccaaagatggcctcgataatggaagggcctttgtccaagtggactaacgtgatgaagggatggcaataccgctggtttgtgctggactacaacgccggattattgagttactatacatccaaagacaaaatgatgagggggtctagacggggatgtgttaggctacgaggcgcagtgatcgggattgatgacgaggatgatagcacctttacaatcacagtggaccagaaaacgttccacttccaggccagggatgccgatgagagagagaaatggattcatgctctcgaggaaacgattctgaggcacacattacagcttcagggcctcgatagcggatttgtccccagcgtgcaggattttgacaaaaaactgacagaagctgatgcctatctgcagattttgatcgaacagctgaagctattcgatgacaaactccagaattgcaaagaggacgagcagcggaaaaagatcgagaccctgaaagaaactactaatagcatggtggagtccattaaacactgtattgtgttacttcagattgccaaagatcaaagcaacgccgagaagcatgctgacggtatgatcagcacgattaaccccgtggatgccatctaccagccttctcctctggagcccgtcattagcacaatgcccagtcagacagtcctgccccctgaacccgtgcaactgtgtaaaagcgaacagcgtccaagctcactgccggtcggaccagtactcgcaacgttggggcaccaccaaactcctacgcccaatagcactgggagcggacacagtccaccgagctcaagcctcacctcaccgtcacatgtgaatctctccccaaatacggtgccagaattctcatattcgtcgagtgaagacgagttctacgacgccgacgagtttcaccagtccggatcctcccccaaaaggctgatagacagctccggatccgcgagcgtgctgactcactcctcatcaggaaactccctaaaacggcctgacacaaccgaatccctcaattctagcctttccaacgggacctctgacgccgatctgttcgatagccacgatgacagagatgatgacgctgaagccggatctgttgaggagcacaagtccgtcataatgcacttgttgtcccaggtgcgcctgggaatggatttgacaaaggtggtgctgccaacttttattctcgagcgacgttccttgttggaaatgtatgccgatttctttgcgcaccctgacctgtttgtgtccatatctgatcagaaagacccaaaagaccgaatggtccaagtggtgaagtggtatttatccgcttttcacgccggtcggaagggctccgtggctaaaaagccttataacccgattctgggagagatcttccaatgtcactggacacttcctaatgacacggaggagaacacagaactggtaagcgagggaccggtgccctgggtcagcaagaattcggtgaccttcgtcgccgagcaggttagccaccaccctccgattagtgccttttacgcggaatgctttaacaagaagattcaatttaacgcccatatctggaccaagtctaagttcctgggaatgtctattggtgttcacaatataggccagggttgcgtgtcttgcctggattacgacgagcactatattctaaccttccccaatggatatggcagaagcattcttacggtaccgtgggtggaacttggcggtgagtgcaacatcaattgttcgaagactggatactccgctaacatcatttttcacaccaaacccttctacggaggcaagaagcatagaatcacagcggaaattttttcacctaacgacaagaaaagtttttgcagcattgagggagagtggaacggcgtgatgtacgccaagtatgcaacaggcgagaacactgtgtttgtggacaccaagaagttgcctatcattaaaaagaaagtaagaaagcttgaagatcagaatgaatacgagagccggtccctgtggaaagatgtcacatttaacctaaagatccgagatattgatgcagccacagaagccaaacatcggctggaggagcggcaacgggcagaggcgagagagagaaaggaaaaagagattcaatgggaaacacggctgtttcatgaagatggtgaatgttgggtctatgacgaacctctgctgaagaggcttggggctgctaaacactag

SEQ ID NO: 233807 - DNA, 2172 bp, synthetic construct
  misc_feature 1..2172: note = Description of Artificial Sequence: Synthetic coding sequence
  source 1..2172: mol_type = other DNA
atggcctctataatggagggaccgttgagcaagtggaccaacgtgatgaaggggtggcagtatcgctggttcgtgctggactataatgccggactgctcagctattataccagcaaagataagatgatgcggggatccaggaggggttgtgttaggttgaggggagcggtgattggcattgatgacgaggacgattccacgtttaccataactgtagatcagaaaaccttccactttcaggcgcgagacgctgacgagagggagaagtggatacacgcccttgaggagactattttgcgccacacactacagctccagggcctggacagcggctttgtgcctagcgtgcaggacttcgacaaaaagttaactgaggctgacgcatacctgcaaattctgatcgaacagctgaaactctttgatgataagctgcagaattgtaaggaggatgagcagcgtaaaaaaattgaaacacttaaagagacaacgaactcaatggtcgagagtattaagcactgcatagtcttactccagatcgccaagagcaccattaatcccgtggacgcaatttaccaaccctccccactggaacctgtgatctccactatgccatcacagacagtcctgcccccagagccagtgcagctctgtaaatcggaacagcgccctagttccctacccgtgggcccagtgctcgctaccctgggccaccaccaaacaccgactcctaacagcaccggttccggccatagcccaccaagctctagcttaacaagcccctctcatgtgaatttgagtcccaatacagtccccgagttttcatatagctcttctgaggacgaattttacgatgccgatgagtttcaccagtctggttcttcaccaaaacgcttaatcgactcttcaggaagtgcgtccgtgctgacacattcgagctctggaaatagccttaaaaggccagacacaactgagtctctgaatagcagcctttcgaacggcacgagcgatgccgacctgtttgacagccatgacgaccgtgatgacgacgctgaagccggatccgtggaagaacataaatccgtgatcatgcacttgctgtcacaggttcggcttgggatggatctcacaaaggtcgtgctgccgacattcattctggagagaaggtccctcctggaaatgtatgccgattttttcgctcaccctgatctgtttgtgagcatttcagaccagaaggatcccaaggacagaatggtgcaagttgtgaagtggtacctgagtgcctttcacgccggtagaaaaggtagtgtcgccaagaaaccatataaccctatcctgggagaaatttttcagtgtcactggacccttcccaacgacaccgaggaaaacacggaactggtcagtgagggtcctgttccctgggtgtccaagaactcggtgacttttgtggcagaacaggtgtcccaccatccccctatttcagccttctatgcagaatgttttaacaaaaagatccaattcaacgcccacatctggacaaagtccaagttcctgggtatgtccattggcgtccacaatataggacagggatgcgtcagttgtctggattatgatgaacattatattctaacttttcctaatggttatggcaggagcattcttacggtgccctgggtcgagctggggggtgaatgcaacataaattgctccaaaacagggtactctgcaaatataatttttcacaccaaacccttctacgggggtaagaaacaccgcatcacagctgagatcttctcaccgaatgataaaaaaagcttttgctccatcgagggcgagtggaacggcgtcatgtacgctaaatatgccacaggcgaaaatacagtgtttgtggacacgaaaaaactgccgatcattaaaaaaaaggtgcggaagctggaagaccaaaacgagtacgagagcaggtccctgtggaaagacgtgaccttcaaccttaaaatacgcgatattgacgcagcaactgaggcaaaacaccgccttgaggaacgtcagcgcgcagaagccagagagaggaaagagaaagagatccagtgggagacacggctgttccatgaagatggcgagtgctgggtgtatgacgaacccctccttaagcgactgggagccgcaaaacattag

SEQ ID NO: 233808 - DNA, 2211 bp, synthetic construct
  misc_feature 1..2211: note = Description of Artificial Sequence: Synthetic coding sequence
  source 1..2211: mol_type = other DNA
atggcatccattatggaagggccattatccaagtggacaaatgtgatgaagggctggcagtatcgctggttcgtcttagattacaacgcaggcctgctgagttactatacgtctaaagataagatgatgcgaggaagccgccgaggctgcgtgcggctgcgaggggctgtaatcggaatagacgatgaggacgactccacattcaccattacagtcgaccagaagacatttcactttcaggccagggatgcggatgaaagggagaaatggatacacgccctcgaggaaacgatcctccgacacactctgcagttacagggccttgatagcggcttcgtccctagtgtacaagattttgacaaaaagctaacggaagccgatgcttacctgcagattctgatcgagcagctcaaactgtttgacgataagctacagaactgtaaggaagatgagcaacggaaaaaaattgaaactttgaaagagacaactaatagcatggtggagtcaatcaaacactgtatcgtgcttctgcagatcgccaaggaccagagcaatgctgagaaacacgccgacggcatgatatccactattaacccagttgatgccatttatcagcctagccctcttgagcccgtcatcagcaccatgccatctcagacggtcctccccccagagcccgttcagctgtgtaagtccgaacagaggccatcttcgctacccgtgggtccggtgctcgccactctggggcatcaccagactcccacgcccaacagcactggctccgggcacagcccaccgagtagcagtctgacctcaccctctcacgtcaatttatcacctaacacggtgccagaattttcttattcctcttcagaagacgagttctatgatgcggatgaattccaccaatccgggagcagcccaaagagattgatcgatagctcaggcagtgctagcgtcctgactcattcaagctcagggaacagcctgaagcggcctgacacaacagaatctctaaattcgagtctcagcaatgggacttctgacgccgatctctttgactctcatgacgacagagatgatgacgctgaagccggttccgttgaggagcataagtcagtcatcatgcatcttctcagccaggtgaggctggggatggatctgaccaaggttgtgcttcccaccttcatattggaaagaaggagcctgcttgaaatgtacgccgacttttttgcccaccccgatttgtttgtgtctatctcagaccaaaaagacccaaaagacaggatggtccaggtcgttaagtggtacctctctgcattccatgctgggaggaaggggagcgtggcaaaaaaaccgtacaaccctatacttggggaaatctttcagtgccattggacgctcccgaatgataccgaagagaacacagagctggtgtctgaaggacccgtaccttgggtctccaagaatagtgtcacatttgtggccgagcaggtgtcacatcaccctccgattagcgccttctatgctgagtgctttaataagaagatccagttcaacgcccacatctggacaaagtctaaattcctagggatgagtatcggcgtacataatattggacaggggtgcgtttcttgcctggactacgacgagcattacatccttacctttccaaacggttatgggagaagcatactgaccgtcccatgggtggagttgggaggcgagtgcaacatcaattgcagcaaaactgggtattccgccaacattatattccacaccaagccgttctacggaggcaaaaaacatcgtattacagccgagatattctcacctaatgataaaaagagtttttgctctatagaaggtgaatggaatggggtaatgtacgcgaaatacgccaccggagaaaatacagtgtttgtggacactaaaaaattgccaataataaagaagaaagtgagaaaattggaggaccagaacgaatacgaatcgagatctctgtggaaggacgtcacctttaatctgaaaattcgagacattgatgccgcaacagaagctaagcataggcttgaggagcgccagcgtgccgaggcccgagagcgaaaagagaaagagattcaatgggagacgcgcctgtttcacgaggacggcgaatgctgggtgtatgacgagcctctgctcaaaaggcttggtgctgctaagcactag

SEQ ID NO: 233809 - DNA, 1716 bp, synthetic construct
  misc_feature 1..1716: note = Description of Artificial Sequence: Synthetic coding sequence
  source 1..1716: mol_type = other DNA
atggtagagagcattaagcactgcatcgtgctgctgcaaatcgcaaaagaccagtccaatgcagaaaagcatgcggacgggatgattagcaccatcaatccagtggatgcgatatatcagccctcccccctggaaccagtaatcagcaccatgccaagccagacagtccttcctcctgagcccgttcagctatgcaaaagcgaacagagaccttcaagcctgcccgttggtccagtgctcgcaacactcggccaccaccagacgccaaccccaaatagcacaggaagcggccatagtcccccttcctcttcgctcactagcccaagccacgtgaaccttagtccaaacaccgtaccagagttctcctatagctcatcagaggatgagttttacgatgctgatgagttccatcagtccggttcgagcccaaagcgcctgatcgacagcagtggcagtgcttccgtgctgactcacagctcatctgggaactcgctgaagcgtcctgacactactgagtcactgaactcttcactttcgaacggtacaagcgatgcagatctgtttgatagccacgacgacagagacgatgacgccgaggccggatccgtggaggagcacaagtccgtgataatgcaccttctgtctcaggttcgcctgggtatggacctgaccaaagtcgtgcttccaacctttatcctcgagaggcgatctctattggaaatgtacgctgatttctttgcacacccagatctcttcgtctcaatcagcgatcagaaagatccgaaggatcggatggtgcaggttgtcaagtggtacctgtccgcttttcacgcgggtcgcaaaggaagcgttgctaagaaaccatacaacccgattctcggtgagatatttcagtgccactggacactccctaacgacactgaggaaaacaccgagttggtctctgaaggccctgtaccatgggtgtcgaagaattctgtgacctttgtggccgagcaggtctctcatcatccgcctatcagtgccttttacgccgagtgtttcaacaaaaaaattcagtttaacgcccacatatggactaaaagtaaattccttggcatgtccattggcgtacataatatcggccagggctgcgtgtcatgtctggactacgatgaacactatatcttgacctttcccaatgggtatgggaggtcgatcctcacggtgccttgggttgaactgggaggcgagtgcaatatcaattgttcaaagaccggctacagtgctaacatcatcttccacactaagcccttctatgggggaaaaaagcaccgtataaccgccgaaattttcagcccaaacgataaaaaaagcttctgctctattgagggagagtggaatggtgtcatgtacgccaagtacgcaacgggcgaaaatactgtcttcgtcgacactaagaagctgcccattattaagaaaaaggtgcggaagctggaagatcaaaatgaatatgagtctaggagtctgtggaaggacgtgacgttcaacttgaagattcgggatattgatgcagccacagaggctaagcaccgcctcgaagagcggcagagagctgaggcaagagagagaaaagagaaggagattcagtgggagacacggttgttccacgaggacggggagtgttgggtgtacgatgagccgcttttaaagcgtctgggcgctgctaaacactag

SEQ ID NO: 233810 - DNA, 2241 bp, synthetic construct
  misc_feature 1..2241: note = Description of Artificial Sequence: Synthetic coding sequence
  source 1..2241: mol_type = other DNA
atggcctcaattatggaaggcccattgtccaagtggacaaacgttatgaaaggatggcaataccggtggttcgtgctggactataacgcgggacttttatcatactatacttcaaaggacaagatgatgagggggtcacgtcgagggtgtgtgcggctccggggagccgtgattgggatcgacgatgaggacgacagtacattcactattactgtagaccagaaaaccttccactttcaagcgcgagatgccgatgagcgggagaaatggattcacgccctcgaagagactattttaagacatacactgcaactgcagatctccacgactctggcctttttccagtccagcggaatttccccagtcttagagttttccaagatcattgggctggactcaggattcgtgcctagcgtccaggatttcgataagaaactgaccgaagccgacgcctatctccagatcctcatcgaacagctgaaactattcgacgataagctgcagaattgcaaggaggacgagcagaggaagaaaattgagactctgaaggagaccacaaatagcatggtcgaatcgatcaaacactgtatagtgctactgcagattgctaagtccacaattaatcctgttgatgccatttaccagccttcccctcttgaaccagtgatcagcaccatgcctagccagaccgtgttgccacccgaaccagttcagttgtgtaagtccgagcaacggcctagcagcctgcctgtgggcccagtgctggccaccctagggcaccatcagaccccgacacctaatagcacaggctccggtcattcaccaccgtccagctctctaactagtcctagtcatgttaatctgtcccctaacactgtaccggagttcagctattcttcctcggaagacgaattttatgacgcagatgagttccatcagtccggctcatcacctaaaagactgattgattcctcagggtctgcaagtgttctcacacacagcagttccggcaacagtctgaagcggcctgacaccaccgaatctctgaattcttccttgtctaacgggacatccgatgcagacttgttcgattcacacgatgatcgggacgacgacgcggaagccggtagcgttgaagaacacaaaagtgtgattatgcatttgctttcccaagtgcggctggggatggatctcacgaaggtggttctcccaacatttattctggagagacgaagccttctcgaaatgtacgccgatttcttcgcacatccagatctgtttgtgagcatatccgatcagaaggatcccaaggacagaatggtgcaggtcgtgaagtggtatctgtctgctttccacgccggtcggaaggggtctgtcgctaagaaaccgtacaatccaatcctcggcgaaatctttcagtgccactggactctacccaatgacactgaagagaacaccgaattggtatccgaggggcctgtgccctgggtctcaaagaactccgtcacctttgtggccgaacaggtctcccatcaccccccaatctccgccttctatgccgagtgttttaataagaaaattcagttcaacgcacacatctggacgaagtctaaatttctgggaatgtctataggcgtgcacaatatagggcaaggctgtgtgagttgtctggattatgatgagcactacatcttgacattccccaacggctacggcaggagcatcctgaccgtgccatgggtcgagcttgggggagagtgtaacattaattgctccaaaaccgggtattctgctaacatcatttttcataccaaaccattttatggcggaaaaaagcaccgtataacagccgaaatattcagcccaaacgacaaaaaaagcttttgcagcatcgaaggtgaatggaacggggtgatgtacgccaagtatgcaacaggtgaaaacaccgtgtttgttgataccaagaagttacctatcattaaaaagaaggtgcgcaaactcgaagaccagaatgagtatgagtcccgctcactgtggaaggatgttacattcaacttaaagatccgggacattgacgcggctaccgaggccaagcaccgcctcgaggaacgccagcgcgctgaggcacgggagcgaaaagaaaaagagatccagtgggaaactcggctctttcacgaggatggggagtgttgggtgtatgacgaacctttgctcaagaggctgggtgccgcaaagcattag

SEQ ID NO: 233811 - DNA, 2160 bp, synthetic construct
  misc_feature 1..2160: note = Description of Artificial Sequence: Synthetic coding sequence
  source 1..2160: mol_type = other DNA
atggcgtctattatggaaggacctctgtcaaagtggaccaacgttatgaaggggtggcaatacaggtggtttgtgctggactacaacgcaggactgctgtcatactacactggtgctgtaattggaatcgatgacgaggatgactcaacattcaccattacagtggatcagaagacctttcattttcaggctagagacgccgatgaacgtgagaaatggatacatgccctggaggaaactatcctgcgccacacactacagcttcaagggctggattccggctttgtgccgtcggtgcaggactttgataagaagctgaccgaagccgacgcctaccttcagatcctgattgagcagcttaaactttttgacgataaactacaaaattgcaaggaggatgagcagagaaagaaaatagagactctgaaagaaaccaccaattccatggtggaatctatcaaacactgcatcgtactgctgcaaattgccaaggaccaatccaatgccgagaagcacgccgacggcatgatttccacaattaaccctgtcgatgcgatataccaaccctctcctctggaaccagtaatcagcacaatgccatcccagaccgtgctgcccccagagcccgtccagctgtgcaagtcggaacagcggccatcttctctgcctgtggggccagtcttggcaacccttggccatcaccaaacacctaccccaaactctaccgggtcaggccattcgcccccaagtagcagcctgacaagcccgagtcacgtgaatttgagtccaaatacagtcccagaattcagctatagcagttctgaagacgaattctatgacgccgacgaatttcaccaaagtgggtcttctccgaagcgcttaattgacagcagtgggagtgcctccgtcctcactcattctagctctggcaattcactgaaacgacccgatacaactgagagcctgaatagttcactgtccaatggcacttccgatgccgatctcttcgactctcacgatgacagggatgacgatgccgaggccggatcggtggaggagcataaatctgttatcatgcatctgctctcccaggttcgccttgggatggacctcacaaaggtggtgcttcccacgtttattttggaaagacggtctctcctggaaatgtacgccgacttcttcgcccacccagatctatttgtctccattagcgaccagaaggatccaaaggatagaatggtccaggtggttaagtggtatctttctgccttccacgctggaaggaaaggctctgtggccaagaagccctacaatcctatattgggggagattttccagtgccactggacactccctaacgataccgaagagaacacagaactggtgagtgaggggccagtgccgtgggtcagtaaaaactctgtgacattcgtggccgaacaggtgagccatcatccgccaatatccgccttctatgcggagtgtttcaataaaaagatccaatttaacgcacacatttggacaaagagtaaatttttgggtatgtctattggggtgcataacataggccaggggtgcgtttcctgtttagattacgacgaacactatatcctcacgttccctaatggatacgggagaagtatactgacagtgccctgggtggagctcgggggagagtgtaatatcaattgcagcaaaaccggctatagcgccaatattatcttccatacaaagccattctatggcggtaagaagcaccgcattacagcggagatattctcacctaatgacaagaaaagcttctgcagcatcgagggtgagtggaacggagtaatgtacgctaaatacgctacaggagaaaacaccgtattcgtagacacaaagaaactcccgattataaaaaaaaaggtgcgcaaactggaagaccagaacgaatatgaatcaaggtccctgtggaaagacgtcacctttaacctgaagattcgcgacatcgatgccgctaccgaggccaagcataggcttgaagaacgtcagagagccgaggccagagagcgtaaagagaaggagattcaatgggaaacccggttatttcacgaggacggggagtgctgggtgtacgatgagcctctcttgaaaagactgggagctgcaaagcattag

SEQ ID NO: 233812 - DNA, 1677 bp, synthetic construct
  misc_feature 1..1677: note = Description of Artificial Sequence: Synthetic coding sequence
  source 1..1677: mol_type = other DNA
atggtggaatcaatcaagcactgtatcgtgctgttgcagatagcgaagtccacaattaaccctgtggacgccatctaccagccttctccattagaacctgttatctccacaatgccttcccagacggtgctgccgcctgagccggtccagctttgcaagagcgagcagcggccaagctctttgcccgttggacctgtgctggcaaccttagggcatcatcagacacccacaccaaactctaccggctctggacactcccctccctctagtagtctcacaagtccttcgcacgtgaatttatcacctaacacagttcccgagttctcttactcaagttcggaggatgagttttacgatgccgacgaattccaccagagcgggtcctctcctaaacgcttaatcgactcgtccggtagcgctagtgtgttgactcatagctccagcggaaactctttaaagaggcctgacacaacagaatcgctcaactcgagccttagtaatggaacctcggatgcggatcttttcgattcccatgacgaccgcgatgacgacgcggaggcaggctcagtggaagagcacaagagtgtaattatgcatctgctctctcaggtacgacttggaatggacctaacaaaagtcgtcctgccgacctttatcctggagagacggtcactgctggaaatgtatgcagactttttcgctcatccagatcttttcgttagtatatctgatcaaaaggatcctaaggatagaatggtacaggtggtgaaatggtatctgtccgctttccacgccggacgtaaggggagcgtggctaaaaagccgtataaccctattttgggggaaatttttcaatgtcattggacactgccaaacgatacggaggagaataccgaattagtgtccgaaggcccagtgccttgggtgtccaagaactcggtaacctttgttgccgagcaggtgagtcaccacccaccgatctcagcattttatgccgagtgcttcaataagaagattcagtttaacgcgcacatctggaccaagtccaagtttcttggcatgtctatcggcgtccacaatattggccagggttgtgtatcatgcctggactatgacgagcattatatcctcacatttcccaacggctatggtaggtcaatcttgaccgttccatgggtcgaacttgggggagagtgcaacattaattgctcgaaaaccggatactctgcgaatatcatctttcacaccaagcctttctatggcggaaaaaagcaccgtattactgctgaaatattctcccctaacgacaaaaaatccttttgctccatagagggagagtggaatggggtgatgtatgccaaatatgcgacaggagaaaacactgtgttcgtggacactaaaaagctcccaattattaagaaaaaggtccgtaagctagaggatcagaatgagtacgaatctaggtccctgtggaaagacgttacatttaacctgaagattagggacatcgacgcagccactgaggccaagcaccggctcgaggaaaggcagcgagcggaggccagggagaggaaggaaaaggagatccagtgggaaacacgattgttccatgaagatggagagtgttgggtgtatgatgaacctcttctgaaaagactgggcgcagcaaagcactag

SEQ ID NO: 233813 - DNA, 99 bp, synthetic construct
  misc_feature 1..99: note = Description of Artificial Sequence: Synthetic coding sequence
  source 1..99: mol_type = other DNA
atggtggagagtatcaaacactgcatcgtgcttctgcagatagcgaaggatcagtcgaatgcggagaaacacgcggacggtatgatcgtatccctatag

SEQ ID NO: 233814 - DNA, 1677 bp, synthetic construct
  misc_feature 1..1677: note = Description of Artificial Sequence: Synthetic coding sequence
  source 1..1677: mol_type = other DNA
atggtggaatctatcaagcactgtatagttttattacagattgctaagtccacaattaatcctgtggatgcaatttaccagccgtcccctttagagcctgtaatctccactatgccctcacagaccgtgttgccaccagaaccggtccagctgtgcaagtcagaacagcgcccatctagcctgcccgtagggccagtgctcgctacacttggccatcaccagacgcctacccctaattctaccggaagcggccatagtccaccatcctctagtctaacctcaccaagccacgttaacctctcccccaacaccgtgcctgaattctcttacagttcctctgaagacgagttttacgatgccgatgaattccaccagtcaggctcaagccctaaacggctcattgacagctccgggagcgcgtctgtactcacccactccagttccgggaactcgcttaagcgccctgacaccacagagtcactcaactctagcctcagcaatggaacaagcgacgctgatctcttcgatagccacgacgaccgggacgacgacgccgaagccggtagtgttgaagaacacaaaagtgtgattatgcacctcctttcacaggttcgattaggaatggatttgaccaaggtagtgcttccaacttttatcctagagcggcgatcactgctggagatgtacgcggattttttcgcccatccagacctgttcgttagcatctctgaccagaaagacccaaaggataggatggtccaagtcgtaaagtggtacctatcagccttccatgcaggtcggaaagggagcgtcgccaagaaaccctataaccctatattaggggagatttttcagtgccattggacgctgcccaacgataccgaagagaacactgaattggtgagcgagggacccgttccatgggtcagtaaaaattccgtcacgttcgtggccgagcaggttagtcaccatcccccaatttcagccttctacgccgaatgcttcaacaaaaaaatccagttcaacgctcatatctggaccaagtcaaagtttctaggcatgagtattggcgtccataatattggacagggttgtgtgtcttgccttgattacgacgaacattacattttgacgttccccaacggttacggccgatccatcctgactgttccttgggttgaactgggcggtgaatgcaacataaactgctctaaaacgggttattctgccaatattatcttccataccaagcccttctatggcggaaagaaacacaggatcaccgcagagatcttcagccccaacgacaagaaatcattctgctccatcgagggggagtggaacggagtgatgtatgccaagtatgctacaggcgagaacactgtgttcgtcgatacaaaaaaactcccaatcatcaaaaaaaaggtgcggaaactagaggaccagaacgaatatgagtcccgaagcctgtggaaggacgtgacatttaatttgaaaattcgggacattgacgccgctactgaagctaagcaccggctggaggaaagacagcgcgctgaggctagggagagaaaagaaaaagaaattcagtgggagaccagactctttcacgaggacggtgagtgctgggtgtatgacgagcctttgctaaagcgcctcggtgcggcaaagcactag

SEQ ID NO: 233815 - DNA, 1968 bp, synthetic construct
  misc_feature 1..1968: note = Description of Artificial Sequence: Synthetic coding sequence
  source 1..1968: mol_type = other DNA
atgggctgttgctgttgttggctcgtctttactgaagctcgggatgccgacgagcgggaaaagtggatccacgcactcgaagaaaccatcctgcggcacacactacagctgcagggcttggacagcgggttcgtgccctccgttcaggattttgataagaaactgacagaggccgatgcttacctgcagattttgatcgagcaactgaagctctttgacgacaagttacagaactgtaaagaggatgagcagcggaagaagattgagaccttaaaggaaacgactaacagcatggtggaatcaataaaacactgcattgtgttgcttcagatcgcgaagagcaccattaatccagtggacgctatataccaaccctctcccctggagcctgtcatctcaacaatgccatcccagactgtactccccccagagccagtacagctgtgcaagtctgaacagcgcccttcctctctgccagtcgggccagtactggccaccctcggtcaccaccagacgccaacaccaaatagcaccggatctggacacagtccaccctcaagctctttgacgtccccttcccacgttaatctttctcccaacaccgtcccagaattctcgtatagttcatccgaagacgagttttacgacgccgatgagtttcaccagagtggttctagtcccaaaagacttatagacagttccggatccgcctccgttctgacccactctagttccggcaacagtttgaagaggccggatactaccgaaagcctcaactcgtctttgagtaacggcacatctgatgctgacttgttcgactcgcacgacgatcgcgatgacgacgcagaggctgggtccgtggaagagcacaagagcgtgatcatgcatcttctgagccaagttcggctggggatggatctcactaaagtggtgcttcccactttcattttggagagacggtccctactggagatgtacgccgatttcttcgctcatcctgacctgtttgttagcatatcagaccagaaagaccctaaagaccggatggtacaagttgtgaagtggtatctgtccgccttccatgcagggagaaaaggctctgtggccaaaaagccatacaatcctatcctgggggaaatattccaatgtcattggactctacccaatgataccgaagagaataccgagctagtgtcagaagggccagtgccatgggtgtcaaagaatagcgtcacattcgtggctgagcaggtcagtcatcacccaccaataagtgcgttctacgcagaatgtttcaacaaaaagatccagttcaatgcacacatttggaccaaatccaagtttctaggcatgtcaataggggtccacaatattggccagggatgtgtttcttgtctggactatgatgaacattacattttgacattccccaacgggtatggaagatctatcctcactgtgccgtgggtcgaactcggtggagagtgcaacataaactgttcaaagaccggttattccgcaaatattatcttccataccaagcccttctacggcggaaagaaacaccgcattacagctgaaattttttcacccaacgataaaaagtcattctgctctatcgagggggagtggaacggagtaatgtatgctaaatacgcaacaggtgaaaataccgtgttcgtagatacgaaaaagttgcccataataaaaaagaaagtgcgtaaactcgaggaccagaatgaatatgagtcgcggagcctctggaaggatgtgacatttaatttaaaaattcgcgatattgacgccgctacagaagccaagcatcggctggaagagcgacagagggcggaggcccgagagaggaaggagaaagagattcaatgggaaactaggttgttccacgaagacggagagtgctgggtatatgatgagccgctgttaaagcggcttggggcagctaagcattag

SEQ ID NO: 233816 - DNA, 330 bp, synthetic construct
  misc_feature 1..330: note = Description of Artificial Sequence: Synthetic coding sequence
  source 1..330: mol_type = other DNA
atggtggagagtattaagcattgtatcgttctattgcagatcgccaagagcaccattaatcccgtcgacgcaatctaccagccctctccccttgaacccgtgatcagcaccatgcctagccaaactgtgctgcctccagagccagtccagctttgtaaatcagagcagagacctagctcactgccagttggccctgtgctcgcgacactaggtcatcaccaaacacctacccctaacagtacaggatcaggccattctcccccatccagcagcctgacttccccatcacacgtaaatcttagccctaacaccgtccctgaattttcgtag

SEQ ID NO: 233817 - DNA, 1170 bp, synthetic construct
  misc_feature 1..1170: note = Description of Artificial Sequence: Synthetic coding sequence
  source 1..1170: mol_type = other DNA
atggaaggggctctggctgcgaattggtcggctgaagccgctaacgcttctgccgctcccccaggcgcagagggcaaccggacggcagggcctccccgaaggaatgaagctctggctcgggtggaggtcgcagtactatgccttatactgctgttagcactcagtggaaatgcctgcgtcctgttggccttgcgaactacccggcagaaacacagcagattgttcttttttatgaaacatttgtcaattgccgatctggtggtcgccgtctttcaggtgcttcctcaactactttgggacatcacatttcgtttttatggcccagatctgctctgcaggttagtcaagtacttgcaggttgtcggaatgtttgccagcacctatctcctcttactgatgtccctggatcgctgcctcgctatctgccagcctctgcggagcctcagaagacggactgatcggctcgcagtcctggctacctggctggggtgcctggtagcaagcgcccctcaggtgcacatctttagtcttcgggaagtagccgatggggtgtttgattgctgggccgtcttcattcagccttggggaccaaaagcctacattacctggattacgctcgcggtgtacattgtgccggtcatcgtactagctgcctgttacggactcattagctttaaaatctggcagaacctcagactgaaaacggcagccgcagccgctgccgaggcccctgaaggcgcagcggcaggcgatgggggacgcgtggccttagccagggtctccagcgtgaagctaatttcaaaggcgaaaatcagaaccgttaaaatgaccttcatcatagtgctggcatttattgtctgttggaccccctttttcttcgttcagatgtggtcggtgtgggacgctaatgcccctaaagaggccagtgcctttatcatagtgatgttactagcctccctgaacagctgctgtaatccttggatctatatgctgtttactggacatctgttccacgagctggtgcagcggtttctgtgctgctccgcttcttacttgaaaggcaggcgcttgggtgaaaccagcgcgtcaaagaagagtaattcctcaagcttcgtgctgtctcatcgaagtagttcacaacggagttgcagccagccaagcacagcatag

SEQ ID NO: 233818 - DNA, 132 bp, synthetic construct
  misc_feature 1..132: note = Description of Artificial Sequence: Synthetic coding sequence
  source 1..132: mol_type = other DNA
atggaaggggctctcgccgcaaattggagtgccgaggccgctaacgcttccgcagcacccccaggcgctgaggggaacaggactgcaggcccaccccgtagaaatgaggccttagcccgagtggaagtatag

SEQ ID NO: 233819 - DNA, 279 bp, synthetic construct
  misc_feature 1..279: note = Description of Artificial Sequence: Synthetic coding sequence
  source 1..279: mol_type = other DNA
atggaaggggcactcgcagcaaattggtcagcagaggcagccaacgcctcggccgcacctcccggagcagagggaaatcgcacagccggtcctccacgccgaaatgaagccctcgcccgtgtggaggtggctgtcctctgcctcattttgctcctggccctgtctggaaatgcctgcgtcttgcttgcccttagaacaacaagacagaagcactcaagattatttttttttatgaaacaccttagtatcgctgacctggtcgtggccgtctttcaatag

SEQ ID NO: 233820 - DNA, 1518 bp, synthetic construct
  misc_feature 1..1518: note = Description of Artificial Sequence: Synthetic coding sequence
  source 1..1518: mol_type = other DNA
atggcctcaggaaggcgtgcccctcgcacaggtctgctcgagctgagagccggtgccggttctggagctggcggagagaggtggcagcgcgttctgctgtccctagcagaagacgtgctgaccgtatccccagccgacggcgaccccggacctgagcctggggcacccagggagcaggagccagcgcaacttaacggggctgcggaacccggagctggtccaccccagctccccgaggctctcctgctccagcgcagacgggttaccgtgagaaaggcagacgctggcggtctagggatttctattaagggcggaagggagaataagatgccaatactcatctctaaaatcttcaagggactcgctgccgatcaaaccgaggctctattcgttggagacgcaattctgagcgtgaatggcgaagaccttagcagtgccacacatgacgaggcagtgcaagtgctcaaaaaaacaggcaaggaagtggtgctggaggtgaagtacatgaaggacgtttccccatactttaaaaattcaacaggagggacatctgtggggtgggacagccccccagcttccccgctacagcgccagcctagttctcctggtccaacacctagaaacttctccgaggccaagcacatgtcacttaagatggcatacgtgagtaaacgatgcactccgaacgaccccgagcccaggtacctggaaatttgctcagccgacggccaagatacactcttcctacgtgccaaggacgaggcttccgctcggtcctgggcgaccgccattcaggcccaggtgaacacactcactccacgggtcaaagacgaactccaggctcttctagctgccacgtccaccgctggcagccaggatattaagcagatcggctggttgactgagcaactgccttccggcggtactgcccctacattggctctattgaccgagaaggagctgctgctgtacctgagtttaccggaaacccgggaggcactcagcagacctgcccgaactgcccctctgatagctacccggctggtacactctgggcctagcaagggctcagtgccctatgatgccgaactttcatttgcgctgcggaccgggacccgacatggagtcgatacccatttgttcagcgtggagagcccgcaggagctggcagcatggaccagacagctggtggatgggtgtcaccgggcagctgagggcgtgcaagaggtgtccacagcctgtacatggaacggaaggccctgctccctgtccgtccacatcgacaagggatttactctgtgggccgcagaacccggagccgctagagccgttttacttcgacagcccttcgagaagctgcagatgagcagtgatgatggcgcaagcctcctcttcctcgatttcggcggagccgagggggagattcaacttgatctccatagttgtccgaagactattgtgtttattatccattcctttttgagcgccaaagtcacacggcttggcttgctcgcctag

SEQ ID NO: 233821 - DNA, 441 bp, synthetic construct
  misc_feature 1..441: note = Description of Artificial Sequence: Synthetic coding sequence
  source 1..441: mol_type = other DNA
atgggattcctgagaagactgatctatagaagaagacccatgatttacgtggagtcctccgaagagtcaagcgatgaacaacctgatgaagtggagtctccaacccagtcccaggatagtaccccagcagaagagagggaggacgagggcgcttccgctgctcagggacaggaaccggaggccgattcacaggaattggtgcaaccgaagacaggatgtgaactcggtgatgggcctgacacgaagcgtgtatgtctgaggaatgaagaacagatgaagttgccagcagaaggacctgagccagaggctgacagccaggaacaggtgcatccaaaaactggctgcgaacgcggagatggcccagatgtgcaggagcttggactccccaaccctgaggaagttaagacgccagaagaagacgaaggccagtcccagccgtag

SEQ ID NO: 233822 - DNA, 336 bp, synthetic construct
  misc_feature 1..336: note = Description of Artificial Sequence: Synthetic coding sequence
  source 1..336: mol_type = other DNA
atgtctgagctgctgagggcgaggagccagtccagcgagcggggaaatgatcaggagtcttcccagcctgtcggtagcgttattgtccaagagcctacagaagagaagcggcaggaagaagagcctccgacagacaatcaggggatcgctccctccggggagattgagaaccaggccgttcctgctttccagggtcccgacatggaagcctttcagcaggaactggccctgttaaaaatcgaagatgaacccggtgacgggccagacgtgcgtgagggtatcatgcctacatttgaccttacaaaggtgttagaggctggtgacgcacagccctag

SEQ ID NO: 233823 - DNA, 195 bp, synthetic construct
  misc_feature 1..195: note = Description of Artificial Sequence: Synthetic coding sequence
  source 1..195: mol_type = other DNA
atgtccgaactgctcagagcccgaagtcagtcatccgaacggggaaacgaccaggagtctagtcagccggttgggtcagtaattgttcaggagcctacagaagagaaaaggcaggaagaggagcctccaaccgacaaccagggaatagctccatccggtgagatcgaaaaccaagccgttcctgcatttcagtag

SEQ ID NO: 233824 - DNA, 342 bp, synthetic construct
  misc_feature 1..342: note = Description of Artificial Sequence: Synthetic coding sequence
  source 1..342: mol_type = other DNA
atgtccggtcaccagaggacgcgctctcgctcccgcgagaggcgcgatgaccaggattctaaccatcctgtgggcgcagtggttgcccaagagttaccaagtaatgaccaattgcaacaggaggagccacctattgaatcacaagactatacgccgggtcaggaacgggatgagggagccttggattttcaggttttgggcctggcagcctatctgtgggaactgactcggtccaaaacaggtggtgagagaggagatggacccaatgtgaaaggggagttcctgcctaacctcgagcccgtgaaaatccctgaggctggagaaggccaacccagtgtctag

SEQ ID NO: 233825 - DNA, 342 bp, synthetic construct
  misc_feature 1..342: note = Description of Artificial Sequence: Synthetic coding sequence
  source 1..342: mol_type = other DNA
atgtctggtcaccaacgaactcggtctagatcccgcgagcgtcgagacgatcaggattctaatcacccagtcggagccgtggttgcccaggaattgccgtctaacgaccagcttcagcaagaggagccccctatcgagtctcaggactatacgcccggtcaggaacgagacgagggagccctggattttcaggtgttaggtctggcggcttacttgtgggagctgactagaagcaagaccggcggtgaaagaggggacggacctaatgtgaagggggagttcctacctaacttggagcctgtgaagatccctgaagcaggtgagggccagcctagcgtatag

SEQ ID NO: 233826 - DNA, 1458 bp, synthetic construct
  misc_feature 1..1458: note = Description of Artificial Sequence: Synthetic coding sequence
  source 1..1458: mol_type = other DNA
atggccgcagtgtggcagcaggtattggccgtggatgcccgatataacgcatacagaacaccgaccttcccgcagttcagaacgcagtacattaggaggagaagtcagctcttacgggagaacgccaaggcaggacaccctccagccctgagacggcagtacctaagactgcgtggccagttgctgggtcaacggtatgggccactctctgaacccggaagcgcacgcgcttactcaaacagcatagtgcgaagttcacggactacgctagatagaatggaggatttcgaggacgaccctagagccctcggagccagaggccaccggagaagcgtaagccgcggttcctatcagctccaagcccagatgaaccgggcagtgtacgaagacaggcctccagggagcgtagtcccaaccagcgccgcagaggcctcccgcgctatggccggtgacacatcactgagtgagaactacgcttttgcgggaatgtaccatgtgtttgaccagcacgtcgatgaggcagtccctagggtacgattcgctaatgacgaccggcaccggctcgcctgttgcagtctcgatggttctatcagcttgtgccagctggttcccgcaccccctacagtgctgagagtgctgcgcggtcacactagaggggttagcgacttcgcctggtccctcagtaatgacatcctggtcagtacatctctggatgccaccatgcgaatatgggcttcggaggacgggcgatgtattcgggagatcccagaccccgattccgctgaactgctgtgttgcactttccaacccgttaacaataacctgacagtcgtcggcaatgcgaaacataacgtgcacgtgatgaatatcagtacaggaaagaaggttaagggcggaagctccaaactgactggcagggtgttggctttgtcatttgacgctcccggtaggctgctgtgggcaggcgacgatcacggcagtgtattttcgtttctcttcgatatggcgaccgggaaactcacaaaggcaaaacgactggtcgtacatgaggggtcccctgtcactagcatttctgcacggagctgggtgagccgcgaagccagagatccatccctattgatcaacgcatgcctgaataagctgctgctttatagggtcgtggacaatgaaggcacattgcagttaaagagatcatttccgatagagcaatcgtcacatccagttcgctcaatcttctgtccactcatgtcatttaggcagggcgcttgcgtcgtcaccggcagcgaggatatgtgcgtgcatttctttgacgtagaacgggcagccaaggccgcagttaataagctgcagggacactctgctccagttctggatgtgagcttcaactgcgacgagtctctgcttgctagctcagatgccagcggcatggtgattgtgtggcgccgagagcagaaatag

SEQ ID NO: 233827 - DNA, 309 bp, synthetic construct
  misc_feature 1..309: note = Description of Artificial Sequence: Synthetic coding sequence
  source 1..309: mol_type = other DNA
atgagcgctagagtgaggagtaggtcacggggtcgcggagatggacaggaggctcctgacgttgtcgcattcgtggcccctggagagtcacagcaggaggagcccccaaccgacaaccaggacatagagcctggccaggagcgggaaggaacccccccaatagaagagagaaaagtggaaggggactgtcaggaaatggatcttgagaagaccagatcagagcggggagacggctccgatgtcaaagagaagacccccccaaatcccaagcatgctaaaactaaagaggcaggagacggccagccatag

SEQ ID NO: 233828 - DNA, 1575 bp, synthetic construct
  misc_feature 1..1575: note = Description of Artificial Sequence: Synthetic coding sequence
  source 1..1575: mol_type = other DNA
atgagtgataacggggaactagaggataagccacccgcaccccctgtgcgcatgtcttccacgatcttctctacagggggtaaagaccctctctccgccaatcattctctgaagccgttgcccagcgtacctgaggaaaagaagccaagacacaaaatcatttctatttttagtgggacggagaaaggatcaaagaagaaggagaaagagcgccctgaaattagtcctccgtcagattttgagcatactatccacgtgggttttgacgcggtcacaggcgaattcacgggtatgcccgagcaatgggccaggctactgcagacctccaatatcacaaaactggagcagaaaaagaatccccaagcagtgctagacgtcctgaagttttacgacagcaataccgtaaagcagaaataccttagctttacacctcccgaaaaagatggctttccatctggcacccccgcactcaatgctaaggggacagaggccccagctgtcgtaactgaagaggaagacgacgatgaggagaccgctccccctgtgatcgcgcctaggcccgatcacaccaagtctatatatacaagaagtgttattgatccagtgccagccccagtcggtgacagtcacgtggatggggctgctaagtctctagacaagcagaagaagaaaaccaagatgaccgatgaagaaatcatggagaaacttcggactattgtatcaattggggacccaaagaagaagtacacccgctatgaaaaaattgggcagggggcttctggcaccgtgtttactgccacagacgttgcgctggggcaagaagttgctatcaaacagattaatctgcagaaacagcccaaaaaagaattgatcatcaacgagattctggtgatgaaagaactcaaaaatccaaatatcgtgaactttctggattcctatttggtaggtgatgagctgttcgtggtgatggagtatctggccggaggctccctgacagatgtggttaccgaaacctgcatggatgaggcacaaatcgctgccgtttgcagagaatgtttgcaggctttagagttcctgcacgcgaaccaggtcattcaccgggacattaagtcagacaacgtcctacttggcatggaggggagtgttaaactgaccgacttcggtttttgcgctcagatcacccctgaacaaagtaagaggagtacaatggtgggcactccatactggatggcccctgaggtggtcacccgtaaggcctatggacctaaagttgacatttggagcttgggcatcatggcaattgaaatggtagagggggagcctccttatctgaacgagaaccctctgcgggcactgtacctgatcgccacaaatgggactcctgagttgcaaaaccctgagaaactttccccaatcttccgcgacttcctcaatcgatgcttagagatggacgtagagaaacgagggtccgccaaggagctcttacagcacccctttctgaagctagcgaaacctctgagcagcctcaccccactgattatggcggcaaaagaagcaatgaagtccaaccgctag

SEQ ID NO: 233829 - DNA, 1680 bp, synthetic construct
  misc_feature 1..1680: note = Description of Artificial Sequence: Synthetic coding sequence
  source 1..1680: mol_type = other DNA
atgtccgatgggctggataacgaagagaagccccctgctcctccgctcagaatgaacagtaacaatagggactccagtgctctgaaccattcatccaaacccttaccaatggcgcctgaggagaagaacaaaaaagcacgcctccgatccatttttccaggtggcggtgataagaccaacaagaaaaaagagaaggaaagaccagaaatctctctcccatccgactttgaacataccattcatgtcggcttcgacgctgtgacaggcgaatttacacctgacttatatggaagccagatgtgtcctggcaaactgccagaaggaattcctgagcaatgggccaggcttctgcaaaccagcaatattactaaactcgaacagaagaaaaacccgcaggctgttcttgacgtgctgaaattctacgattctaaagaaaccgtgaataatcagaagtacatgagtttcacatctggcgataagagcgcccacgggtacatcgctgcccacccctcctccacgaaaaccgccagcgaaccccctctagcccctcctgtgtcagaggaagaggacgaggaagaggaggaagaagaggacgaaaatgagccccctcccgttatcgccccacgtcccgagcacacaaagagtatctatacccgttctgtggttgaatcgattgcctccccagcagtgcccaataaggaggttacacccccttccgccgagaatgccaattcgtctaccctgtacaggaacacggaccggcagcggaagaaatctaaaatgactgacgaggaaatccttgagaaactgaggtcgatcgtgagtgtgggtgaccctaagaagaagtacacccgattcgagaagataggccaaggcgctagtggaacggtgtatactgcgctggacattgccaccggccaggaagtggcaatcaagcaaatgaatctgcagcagcagccgaaaaaagagctgatcattaatgagatactggtcatgcgcgagaataagaacccaaatatagttaactatctcgactcatacttggtaggagacgagctatgggtggtcatggagtacttagcgggaggcagcctgaccgatgtagtgactgagacttgcatggacgaaggccaaatagcagccgtgtgtagggagtgcctccaggccctggacttcttacacagcaatcaggtcatccatagagacattaaatctgataacatcctcctgggcatggacgggtctgtgaagctgaccgacttcggcttttgcgcacaaatcacacctgagcagtctaagcggtcaaccatggtcggtacaccatactggatggcccctgaggtagtcacacgtaaagcatacggcccaaaagtggacatctggtccctcgggattatggctatcgaaatggtcgaaggcgaacccccttaccttaatgagaatcctctacgggcactgtaccttatcgccaccaatgggaccccagagctccagaatcctgaacgattgtcggctgtgtttagagacttcttgaataggtgcctggaaatggatgtggatcgacgcggaagtgccaaggagctcctccagcacccgttcttgaagctagccaagccactgtcatccttaacccccttaattatcgccgctaaagaggctatcaaaaatagctcccggtag

SEQ ID NO: 233830 - DNA, 1743 bp, synthetic construct
  misc_feature 1..1743: note = Description of Artificial Sequence: Synthetic coding sequence
  source 1..1743: mol_type = other DNA
atgagtgatggacttgataacgaggagaagcctcccgcaccgcctctgagaatgaattccaacaaccgcgatagttcggcactgaatcatagttcaaagccacttcctatggcacctgaggaaaaaaacaagaaggcaagattgcgctcaatatttcccggaggcggtgataagacaaacaaaaagaaggaaaaagagaggcccgagatcagcctcccctcagatttcgaacataccattcacgtcggcttcgatgccgtgacaggtgagtttacgaactcgcctttccagacctctaggcccgttacagttgcctccagccagagtgaaggcaagatgccggatctgtatggaagccagatgtgcccaggcaaattacctgaggggatccctgagcagtgggctcgactgcttcagacctccaacattaccaaactggagcagaaaaaaaaccctcaggcggtgctcgatgttttaaagttctatgacagcaaggagactgtgaacaaccagaaatatatgagttttacttcaggtgataagtccgcacacggttacatcgccgcacatcccagcagcaccaagacggcttcggagcctcctttagcacctcctgtaagtgaggaagaggacgaggaggaagaggaagaagaagacgaaaacgaacctccaccagtgattgcaccgcgtcctgagcatacaaagagtatctataccaggtccgtcgtggagtctattgcatctccagcagtcccaaacaaggaggtgaccccaccgtccgccgagaacgctaatagctctactctgtatcggaacacggatagacaaaggaaaaaaagcaaaatgactgatgaagagatccttgagaaactcagaagtattgtttctgtcggcgacccaaaaaaaaagtacacaaggttcgagaaaatcggccagggcgcatcaggaactgtttacactgccctggacatcgccacgggtcaggaggtcgctattaaacagatgaatctccagcagcagccaaagaaggaattgatcatcaacgaaattttagtgatgagggagaacaagaaccctaatattgtcaactacttagactcttacttggtgggcgacgaattgtgggtggtgatggaatatctggctggcggatccctgaccgatgtcgttacggaaacctgtatggatgagggacagatagcagccgtttgtagggaatgccttcaggcgctggacttcttgcattccaatcaagtgattcatagggacatcaagtcagacaacattctgctggggatggatgggagcgtgaagctcaccgatttcggtttctgtgctcagatcacgcctgagcaatctaaaagaagtaccatggtgggcacaccctattggatggcgcctgaagtggtgaccaggaaggcttatggaccaaaagttgatatttggagtctagggatcatggccattgaaatggtcgagggggagcccccatatcttaatgagaatcccctgagggccctctatttgatagccacgaacgggacccccgaacttcagaaccccgagcggctctctgcagtgtttagggacttcttaaataggtgcctggagatggacgtagacagacgcggttcagcaaaggagctcctgcagcatccattcctgaaactggccaaacccctgtcctcgcttacaccactgataatagctgccaaagaggccataaagaatagctccagatag

SEQ ID NO: 233831 - DNA, 1635 bp, synthetic construct
  misc_feature 1..1635: note = Description of Artificial Sequence: Synthetic coding sequence
  source 1..1635: mol_type = other DNA
atgtccgacggcctggataacgaggagaaaccgcctgccccaccactgagaatgaactctaacaatcgcgactctagcgctctgaaccactcgtctaagcctctgcccatggccccagaagaaaagaacaaaaaggcccgactccggtccattttcccaggcggaggggacaagactaataagaagaaggaaaaagagagacccgagatctctctgccgtctgactttgagcataccattcatgtggggttcgacgccgtgactggagaattcactggaatccccgaacagtgggccagacttcttcagacaagcaatatcaccaagctagagcagaaaaaaaatcctcaggccgtcctcgatgtcctgaagttttatgacagcaaggaaaccgttaacaatcaaaagtacatgagttttacctcgggcgataaaagtgcgcacgggtacatcgctgcccaccccagtagtacaaagacggcttcggaacctcctctcgcacctccggtgagcgaagaggaagacgaggaagaagaggaggaagaggacgagaatgagccccctccagtcatcgctccccgtcccgaacacacgaagagcatatacactcgctcagtggtggagtcgattgcttcccccgctgtccccaataaagaggtgacccctcctagcgccgagaatgcaaactcgagtactctgtatcggaacacagaccgccagaggaaaaagagcaagatgactgacgaagaaatcttagagaaactccgctccatcgtgagtgtgggggaccctaaaaagaaatacacccggttcgagaaaattggtcagggagctagcggcaccgtctatactgctttggatattgccacaggacaagaggttgccataaaacagatgaatctgcagcagcagccaaagaaggagctgatcattaacgagatccttgtgatgcgcgagaataagaacccgaatatcgtcaattatctggactcttaccttgtcggagacgagctctgggtcgttatggagtatcttgctgggggatccttgacagatgtagtcacagaaacctgtatggacgaaggtcagatcgccgcagtgtgtagggagtgtttacaggccttggattttctgcacagcaatcaagtgatccatagggatatcaagtccgataacatcctcctcgggatggatggatctgtgaaactgactgatttcggattttgtgcccagattacaccagagcagtccaagagaagcaccatggtcggaaccccgtattggatggcccctgaggtagtcacgagaaaagcttatggtccgaaggtagatatttggtctctgggcatcatggccatcgagatggtagaaggggaacccccttacctgaatgagaatcctttaagagccctttatctgatcgcaacgaacggcaccccagaactccaaaatcccgagcgcctttccgcagtgtttagggattttcttaatcgttgtctagagatggacgtggatagacgcggaagtgcaaaagaattattgcagcatccatttttaaagttagccaagccactgtcatctctgacccccctgattattgctgcgaaggaggccatcaagaacagtagcagatag

SEQ ID NO: 233832 - DNA, 1680 bp, synthetic construct
  misc_feature 1..1680: note = Description of Artificial Sequence: Synthetic coding sequence
  source 1..1680: mol_type = other DNA
atgtcagatggattagacaacgaggagaagccacccgctccaccattacgcatgaattcgaataatcgcgactcctctgccctaaaccacagttcgaaacctctccctatggccccagaagagaaaaataagaaggcaagactgcgatcaatctttcctggcggaggtgataagactaacaagaaaaaggagaaggagcgtcccgaaatttctctcccttccgactttgagcacaccatccacgtgggcttcgacgcagtgaccggggagttcacacccgatctttacggatcacagatgtgccctggcaagctccctgaagggattcccgagcaatgggccaggctactgcaaacctccaatatcaccaagcttgagcagaagaagaacccacaagccgtgctggacgtgttaaagttttacgacagtaaggaaactgtaaacaatcagaaatatatgtcatttacgtccggggataaatccgcccacgggtacatcgctgcacacccgagctccacgaagacagctagtgaaccccctcttgctccccctgttagcgaggaggaagatgaggaagaagaagaagaggaggacgagaacgaacccccacctgtgatcgctcctagacccgaacacaccaaaagcatttacacgcgctctgtcgtcgaaagcatcgcctcacccgctgtccctaacaaagaagtcaccccaccatcggcagagaatgccaactcctccactctctatagaaacacggaccgacaacggaaaaagtcgaaaatgacagacgaggagatactggagaagcttcgcagtatagtgagtgtgggcgacccaaagaagaaatatactagattcgaaaagattggtcagggggcttccggcaccgtgtatacggcacttgatatcgctacgggtcaggaagtggccatcaagcagatgaatctgcaacagcagcccaagaaggagctcatcattaatgaaatcctcgtcatgagggagaacaagaacccgaacatcgtgaactatctggattcttacctggtgggagatgagttgtgggtggtgatggagtatctcgcgggtggtagcctgacagacgtggttaccgaaacctgcatggatgagggccagattgctgcggtttgccgggagtgcctgcaggcgttggactttctgcactcgaaccaagtcatacaccgggacataaagtcagacaacatcctgctggggatggatggatctgtgaagcttacagactttggattctgtgcccagattacacctgaacagtcaaaaagaagcacgatggtcggcacaccctattggatggctccggaggtcgtgaccaggaaagcctatggcccaaaagtggacatatggagtttgggtattatggcaatcgaaatggtcgagggagagcccccttatctgaacgagaatccgctgagggcattgtatctgatcgcaactaacggcacacccgagctacaaaaccctgagcggctcagcgccgtgttccgcgacttcttgaaccgctgcctcgaaatggatgtcgataggagaggttccgcaaaagaactgctccaacatccatttctgaaattagccaagcctctgtcaagcctgacaccactgattatcgctgccaaagaggccatcaaaaatagcagccggtag

SEQ ID NO: 233833 - DNA, 1698 bp, synthetic construct
  misc_feature 1..1698: note = Description of Artificial Sequence: Synthetic coding sequence
  source 1..1698: mol_type = other DNA
atgagtgacggcctcgacaatgaggaaaagcctcctgcgcctccacttagaatgaattcaaataacagggactcaagcgctctgaaccattccagtaaaccgctgcctatggccccagaggagaaaaacaagaaagcacggctacggtcaatcttcccaggcggaggagataagaccaacaagaaaaaagaaaaggagaggccagagatttccctcccctccgatttcgagcatactattcacgtaggcttcgatgctgtgacaggagaattcacgaattctccttttcagacttccagacctgtaaccgtcgcatcgagccagtcggagggtaagatgggcattcccgagcaatgggcgagactgctgcaaacaagtaacattactaagttggagcagaagaagaatccccaagccgtcttggacgtgctgaagttttacgactctaaagaaactgtgaacaaccagaagtatatgtcgtttaccagcggagacaaatccgcccacgggtacatcgctgcccaccctagctcaacaaaaaccgcctcagaaccaccactcgcacctcccgttagtgaagaagaggacgaggaggaggaggaagaagaagatgaaaacgagcctcccccagtaattgctcccaggcccgaacacaccaaatccatctacacaagatccgtcgtggagagtatcgcctctcctgccgtccccaacaaagaggtcacaccaccgagtgcagaaaatgcaaattctagtacactatacagaaatacagaccggcagagaaagaagagtaagatgactgacgaagagatcctggaaaaactaagaagtattgtatctgttggcgatccaaagaaaaagtacacccgattcgaaaaaatagggcagggggcatctggaaccgtttacaccgctctggacattgccacaggtcaggaagtggcgatcaaacaaatgaacctgcaacagcaacccaaaaaggagttgatcattaacgagatcctcgtgatgcgggagaataagaaccctaacatagtgaactacctcgatagctatctggtcggagatgaactgtgggttgtgatggagtatctcgccggaggatcgcttaccgacgtggtaacggagacttgcatggacgaggggcagattgccgctgtgtgcagggagtgtcttcaggcacttgacttcttacatagtaaccaagtcatccacagagatatcaagagcgacaatatcttgctcggcatggacgggtcggtgaaactgaccgatttcgggttctgtgcccagatcacacctgagcagagcaagcgcagcaccatggtcgggactccctactggatggcccctgaagtggtcacgcgtaaggcctacgggccaaaggtggacatatggtcattaggtattatggcaatcgagatggtagaaggcgaacctccctacttgaatgagaatcctctacgggcactgtacttgatagccaccaatgggacccccgagttgcaaaacccagaacgcctgtccgcagtgttccgcgattttctgaatcggtgccttgaaatggacgtggatcgccgaggtagcgcaaaggaactgttgcagcatcccttcctcaaactggctaagcctctatcctcactgacccctctcattatagccgctaaggaagccatcaaaaattcatccaggtag

SEQ ID NO: 233834 - DNA, 1635 bp, synthetic construct
  misc_feature 1..1635: note = Description of Artificial Sequence: Synthetic coding sequence
  source 1..1635: mol_type = other DNA
atgagcgatggcctggacaacgaagagaaaccaccagcgcctccgctgagaatgaattccaataatagagattcctctgcactgaaccacagttcaaagcctctccctatggctccagaagaaaaaaacaagaaggcgaggctgcgctccatatttcccggtggaggagataagacaaacaagaagaaagagaaagagcgaccagaaatttccctcccgtctgattttgagcatacaattcatgtaggctttgacgcagtcactggcgagtttactgggattccagagcaatgggctagattattgcagacgtctaatatcactaaactggagcaaaagaagaatccccaggccgtcctggatgtccttaaattctatgactccaaggagacggtcaataatcagaagtacatgagctttacctcgggagataaatcagcccacggctacattgccgcacacccctcttccaccaaaactgcatcagaaccaccgctggccccacctgtgtcagaggaagaagacgaggaggaagaggaagaggaagatgagaatgagcctccccctgtgatcgctccccgtcctgaacacacaaaatccatttacacgagaagtgtggtggagtccatagcaagtcctgccgttcctaataaagaagtgactcccccatcagctgagaacgccaactcttcaactctatacaggaacaccgaccgccagcggaagaagagtaaaatgacagacgaagagatcttagaaaagctgcgctcaatcgtgtcagttggcgaccccaagaagaaatacactagatttgaaaagatcggtcaaggtgccagtggcactgtttataccgccctggatatcgccacaggtcaggaggttgcaattaagcagatgaatctgcagcagcagccaaaaaaagaattgatcattaacgaaatcctggtcatgcgggagaacaagaacccgaatatcgttaactatttggattcctatctagttggcgacgaattatgggtggtgatggagtatcttgccggaggctcactgacagatgttgtcactgagacttgcatggacgagggtcagattgcggctgtctgccgcgaatgcctccaggctcttgactttctacattctaaccaggttatccatagagatattaaatcagataacattctgctgggcatggacggctctgtgaaattaaccgacttcgggttctgcgcacagataactcccgagcagtctaaacggtctaccatggtgggtactccatattggatggcccctgaggttgtcactaggaaggcctatgggcctaaagttgacatctggagcctgggcatcatggccatcgagatggtcgaaggcgaaccaccctacttgaatgaaaaccccctgcgagctctgtacttaattgccacaaatgggacgcccgaactgcagaacccggagcggctgtctgccgttttcagagattttctcaacaggtgcctagagatggacgtcgaccgcaggggcagcgctaaagagctattgcaacatccctttctcaagctcgccaagcctctgagcagcctcacaccattgataattgccgcaaaagaagcaattaagaactcgagccgttag

SEQ ID NO: 233835 - DNA, 546 bp, synthetic construct
  misc_feature 1..546: note = Description of Artificial Sequence: Synthetic coding sequence
  source 1..546: mol_type = other DNA
atgtcggatggcttggacaacgaagaaaagccgccagcgcctcctttgcggatgaacagcaataaccgcgactcttcggctctaaaccattcatcaaaacctcttccaatggctccagaagaaaagaataaaaaagccagattacggagcattttccccggtggcggagacaagacaaataaaaaaaaagagaaagagcggcctgaaatctctttacctagtgactttgagcataccatccacgtgggtttcgatgcggtcaccggagagtttactaattcccctttccagaccagcagacctgtgactgtggcaagctcccaaagcgaaggcaagatgcccgacctgtatggtagtcagatgtgtcctggcaaacttcctgagggaattcctgagcagtgggctagacttctgcaaaccagtaacatcacaaagctggagcagaaaaaaaacccacaggccgtgctggatgtgctgaagttttacgacagcaaagagacagtaaacaaccagaagtacatgtcgttcaccagtggggataaatag

SEQ ID NO: 233836 - DNA, 1635 bp, synthetic construct
  misc_feature 1..1635: note = Description of Artificial Sequence: Synthetic coding sequence
  source 1..1635: mol_type = other DNA
atgtctgacgggcttgacaatgaggaaaagccgcctgccccaccactgagaatgaacagcaataatcgagattccagcgctctgaaccactcatccaagcctctacccatggcccctgaggaaaaaaacaaaaaggccagactacggagcattttccccggtggaggtgataaaacaaataagaagaaggagaaggaacggcctgaaatatctttacccagcgattttgaacacaccatccacgtgggttttgatgcagtaactggagagtttactggcatccccgagcagtgggccaggttactgcagacaagcaacataacaaagcttgagcagaagaagaacccccaagctgtcctggacgttttgaagttctatgattctaaggaaactgtcaataatcagaagtacatgagcttcaccagcggagataaaagcgcccatggttacattgcagcacacccaagttctaccaaaacagcttccgagccccctctggcaccgccagtctctgaggaagaagacgaagaggaagaggaagaggaagacgagaatgagccccctcctgtcatcgcgccacgcccagaacataccaagtccatatacacccggagtgtcgtcgaatcaatcgcctcccctgccgtgccgaataaagaagtgactcccccaagcgctgagaacgctaatagttctacattataccggaataccgataggcagaggaaaaagtctaagatgactgatgaggagatcctggaaaagctcaggtccatcgtgtctgtgggcgatccaaagaaaaaatacacgcgcttcgagaagatcggccagggcgcatcagggacagtgtacacggccctggacatcgcgaccggccaggaagtcgctataaagcagatgaaccttcagcagcagccaaagaaggagttgatcattaacgagatactggtgatgagggagaataagaatccgaatattgtgaactacctggactcttaccttgtgggcgacgaactgtgggtagttatggaatacctggccggaggctcgctgacagatgttgtcaccgagacatgcatggatgagggccagatcgccgcagtgtgtagggaatgtctacaggccttagactttctccactctaaccaggtaatccatcgggacataaagtccgataacattctcctgggcatggatggctccgttaaactgacggactttggcttctgtgcgcaaatcaccccagaacagtctaaaaggtccacgatggtgggcaccccttattggatggcaccagaggtggttactagaaaagcctacgggcctaaagtcgatatctggtcactcggtatcatggctatagaaatggtggaaggtgagcccccatatctgaacgagaaccctctaagggccctgtatctgattgccacaaacggaactcccgagctgcagaaccccgagcgactgagcgcggtgttccgggatttcctcaatcggtgtctggaaatggacgtggaccggcgtggaagcgccaaggagctgttgcagcacccgttcctgaagcttgcaaagccactgtcaagcctaacgcctctgattatcgctgccaaagaagcgatcaagaattcctcaagatag

SEQ ID NO: 233837 - DNA, 1743 bp, synthetic construct
  misc_feature 1..1743: note = Description of Artificial Sequence: Synthetic coding sequence
  source 1..1743: mol_type = other DNA
atgtctgacggtctggacaatgaggagaaacccccagcccctcccctgcggatgaacagcaacaacagagattcatcggctctgaatcattcttcaaagcccctgcctatggcgcctgaggagaaaaataagaaagcgagactcagatctatcttccctggtggaggcgataagactaacaagaaaaaagaaaaagagaggccggagatcagcctgccctctgacttcgagcatactatacatgttgggtttgatgctgttactggcgaattcacaaactcccccttccagacatcaaggcctgtgacagttgcatccagccaatcagagggcaagatgcctgacttgtatggatcacagatgtgtccgggtaagctgcccgaaggaatccccgagcagtgggccaggctcttgcagacaagcaatataaccaaactagagcagaagaaaaatcctcaagccgttttagacgtcctgaaattttacgacagcaaggaaaccgtgaataatcagaaatatatgagtttcaccagtggggacaagagcgcacatggatacatcgccgctcatccatcatcaacaaagaccgcctctgagcctcctttggcgccaccagtgagtgaagaagaagacgaggaggaagaagaggaggaagacgagaatgagccccctcccgtcatagctccccgaccagagcacaccaagtcaatctacacccgaagcgtggtcgagagcattgccagtcctgccgttccaaacaaagaagtgacgccaccctcagcagaaaatgctaattcatccactctatatcggaacactgatcgtcaacggaaaaaatctaagatgacagatgaagaaatcttggaaaagctccgtagcatcgtctctgtgggagatcctaaaaagaagtacactcgatttgagaagatcgggcaaggtgcctctggtacagtctatacagctttggacattgccaccggccaggaagtggcgattaaacagatgaacctgcagcagcaacctaaaaaagagttaattatcaatgaaatcctcgtgatgagggaaaataaaaatcctaacatcgtgaactacttggacagctatcttgtcggcgatgagctgtgggtggtgatggagtaccttgctgggggaagtttgaccgacgtggtcaccgaaacctgcatggatgagggccagatcgccgcagtgtgccgggagtgcctccaggctctggactttttgcactcaaaccaggtgatccacagggacataaagtccgacaatatcctgctcggaatggacggttccgtcaagttgacagacttcgggttctgtgctcagattacccctgagcagtccaaaaggtcaactatggtcggcactccctactggatggcacccgaggttgttacccgaaaggcctatggaccaaaagtggacatttggagcctgggcatcatggcaattgaaatggtggagggggaaccgccataccttaatgagaaccctctgcgagcactttacctgattgctaccaatggcacccctgagctgcagaaccctgagcgccttagcgccgtgtttcgggactttctcaatcgctgcctagagatggacgtcgacaggaggggcagcgctaaagagcttcttcagcaccctttcttgaaactggccaagccactaagtagtctgaccccattgataatcgcggcaaaagaggccattaagaactctagtaggtag

SEQ ID NO: 233838 - DNA, 1698 bp, synthetic construct
  misc_feature 1..1698: note = Description of Artificial Sequence: Synthetic coding sequence
  source 1..1698: mol_type = other DNA
atgtcggatgggctggacaatgaggagaaacctccagcacctccgctgcgcatgaactcaaataatcgcgactcttcggccctcaatcacagctccaaacccctcccaatggctccagaggaaaagaataagaaggccagacttcggtccatctttccgggagggggtgacaagaccaacaagaaaaaagagaaggaacggcctgagatctccttgcctagtgattttgaacataccattcacgtcggatttgatgccgtgactggagaatttactaacagcccatttcagacctcgcgtccagttacagtcgcgtcatcgcaatctgagggcaaaatggggattcctgaacagtgggcacgtctgttgcagacttctaatattactaagctagagcagaaaaagaacccacaggccgtgttggatgtgctgaaattctacgatagtaaagaaaccgtaaacaaccagaagtatatgagctttaccagcggggacaagagtgcccacggctacatcgccgctcacccctcgtcgactaagaccgcctcagaacctccccttgctcccccagtgtctgaggaagaagatgaagaggaagaggaagaagaagatgaaaacgagcccccacccgtgatcgctccacggccagaacatacaaagtcaatctacacccggtcagtggtggagtcaattgctagccccgctgttcctaacaaagaagtgactccaccgtctgcggagaatgccaattcctctactctctataggaataccgaccgacaacgaaagaagtcaaaaatgacggacgaagagatcctggaaaaattacgcagtatcgtgtcggtgggagatccgaagaagaaatacactcgttttgagaaaatcgggcagggcgcttcaggaacggtatatacggcacttgacattgcgaccggccaggaggtcgccattaagcagatgaatctgcaacagcagcccaaaaaggagcttatcatcaatgagattttagtgatgcgtgaaaataagaacccaaatattgtgaactacctggacagctatctcgtgggagacgaactgtgggtggtgatggagtacctggccggtggcagcctgactgatgtcgttaccgaaacatgtatggacgaaggccaaatcgccgcagtctgtcgggaatgtctgcaggcactggatttcctgcacagtaaccaggtaattcaccgggatataaagtccgataatatcctcttgggaatggatgggtcggtgaagctcactgactttggcttctgtgcgcagattacaccagagcagtctaagcggagtacaatggtgggaaccccctactggatggcacccgaggtcgtaactagaaaggcctatgggccaaaagtagacatctggagcctcgggatcatggctattgagatggtggagggcgaaccgccatacttaaacgagaaccccctgcgggcactgtatctgattgccactaatggaactcctgagctccagaacccagaaaggctaagtgcggtgttcagggacttccttaatagatgtctagagatggacgtcgaccggagaggttcagccaaggagttactccagcacccattcctgaaactggcaaaacctctcagtagccttacacccttaatcatcgctgctaaagaagccataaagaattcctctagatag

SEQ ID NO: 233839 - DNA, 2046 bp, synthetic construct
  misc_feature 1..2046: note = Description of Artificial Sequence: Synthetic coding sequence
  source 1..2046: mol_type = other DNA
atgtttcgaaagaagaagaaaaagcggcctgaaatctctgcgcctcagaatttccagcaccgggttcacacctcctttgatccgaaggaaggcaagtttgtcgggctgccccctcagtggcagaatatactggacaccttgcggagacctaaacccgtggtcgatccttctaggatcaccagagttcaactccagcccatgaagacagtggtacggggtagcgccatgcccgtggatggatatataagcgggctgctcaatgatatccagaagctgtccgtgataagcagtaatacactgcgaggtcgttcacccaccagtcgcaggcgggctcagtcgcttggactgttgggtgacgaacattgggcaacagaccctgatatgtacttacagtcccctcaatcagaaaggaccgacccacacggactgtatctgtcttgcaacgggggaacgcccgcaggccataagcagatgccgtggcccgagccacaatcgccccgagtcctacccaacggtctggcagcaaaggcacagtctttaggtccagctgagttccagggcgcatcccagcggtgtcttcagctcggcgcttgtctccagtcatctcccccaggggctagccccccaacgggcacgaaccggcacggaatgaaagcagctaagcatgggagcgaggaagctcgaccccagagttgtctcgtgggaagtgcaactgggaggcctggcggagagggctcgcccagccctaagacacgggagagctcgctcaagcgtagacttttcagaagtatgttcctgtctactgccgctaccgccccaccatccagtagtaaacccggtccgcctccacagtcgaaaccaaatagttcctttagaccccctcagaaggacaatccgccaagtctggtggcgaaggcccagagtctcccctcagaccagccagtgggaacgttttcgccactgactacctcggatacatccagcccacagaaaagcctgagaaccgcacccgcaactggtcagctgccgggtaggagcagccctgccggatccccgagaacctggcatgcacagatctcaacgtcaaatctgtacctgccgcaggatccgacggtcgcgaaaggcgctctggcgggagaggacacaggtgtcgtcacccatgaacagtttaaggccgctctgcggatggtagtggatcagggggatcccagattgctcctggactcttatgttaagattggcgaaggcagtactggtattgtctgcctcgccagggagaagcacagtggtcgccaggtagctgtgaagatgatggacctcagaaagcagcaacgacgggagttgctgttcaacgaagtggtgatcatgcgcgactatcagcatttcaatgtggtggagatgtacaaatcctacttggtcggagaggaactctgggtgctgatggaatttcttcagggcggagccttgacggatatcgtctcccaagttcgccttaacgaggagcagatagctaccgtatgcgaagccgtcctgcaggcactggcctatctgcacgcgcagggtgttattcacagagacatcaaatctgacagcatcttattaacattagacggccgtgttaagttgtctgattttgggttttgcgctcagatatccaaagacgttccaaagcggaagagcttggtagggactccctactggatggcccctgaagtgatttcacgctctctgtatgccacagaggtagatatctggagcttagggatcatggttattgaaatggtggatggcgagccaccctacttctctgatagccccgtgcaagcgatgaaaagactgcgcgactcccctccccctaaacttaaaaactcacacaaggtgtcgcctgttctcagggatttcctggagcgcatgttagtccgggaccctcaggaaagagccactgcacaggagttgttggatcatccctttctcttgcagactggcttacctgagtgcctggtgcccctaatccagctgtacaggaaacagacctccacctgctag

SEQ ID NO: 233840 - DNA, 2046 bp, synthetic construct
  misc_feature 1..2046: note = Description of Artificial Sequence: Synthetic coding sequence
  source 1..2046: mol_type = other DNA
atgttccgcaagaagaagaaaaagcgacctgaaatttcagctccccagaacttccagcatagagttcatacatcttttgatccaaaggagggtaagttcgtggggcttccaccccagtggcagaacatcctggacactcttaggaggccaaagcctgtggttgatccaagccgaattacccgcgtgcagctccagccaatgaaaactgtcgtgagaggcagcgctatgcctgtagatggctacattagcgggctgctgaacgacattcaaaaactgtctgtgatttcgagcaatactcttaggggccgttcccctacctcgcggcgtagagcccagtctctcggcctgctcggcgatgaacactgggccacagaccccgatatgtacttacaatccccgcagtcagagaggactgatccacatgggctctatctgagctgcaatggaggaactcccgctggccataagcagatgccctggccagagccacagtccccaagggtccttcccaatggacttgccgctaaggcccagagcctcggccctgccgagtttcagggagcttctcagcggtgcctgcaactgggcgcttgtcttcagagcagtcctcctggagctagccctccaaccggaactaataggcacggaatgaaagcagccaagcatggctcggaggaagcacgtcctcagagttgtctggttggttccgctactggaaggcccggaggtgagggctcacctagtccaaagacgcgtgaaagttccctgaagcggagactatttcgctcaatgttcctgtctactgccgctaccgcccctccaagtagttccaagcccggtcccccaccccagagcaagcccaacagtagtttcaggccccctcagaaagacaatcccccaagcctcgtggctaaagcgcagagcctacccagcgaccagccggtcggcacattctcccccctcacaacttccgacacaagctctccccagaaaagtcttaggaccgcgccagctacgggtcaacttcccggacgctcctctcctgctgggagccctcgaacctggcatgcccagattagcacatccaacttgtatctgccacaggaccctacagtcgcaaagggagcactggctggtgaagacaccggcgtggtgactcatgagcagttcaaggccgcacttcgcatggtagtggatcaaggagatcccagacttctgctggacagttatgtgaagatcggggagggctccaccggcatcgtttgcctggcgagggagaaacacagtggcagacaagtcgcagtgaagatgatggacctaagaaagcagcaacgtagggaattgcttttcaatgaagtggtaattatgcgggattaccagcattttaacgtagttgaaatgtacaagtcttacctggtgggtgaggaactgtgggtgctgatggagttcctgcagggcggagcactaaccgacattgttagccaggtgagattgaatgaagagcaaatagcaactgtctgcgaggctgtgctgcaagctctggcgtacctgcatgcccagggtgtgatacaccgggatatcaaatccgactctatcttgcttacacttgacggcagggtaaagttgtctgacttcggtttttgtgcccaaattagtaaggatgtccctaaacgcaagtctttagtgggaaccccatactggatggccccagaagtgatctctaggtcactgtacgcaacggaagtcgatatctggtccctgggcattatggtgattgagatggtggatggtgaacccccatacttttcagatagtcccgtgcaggctatgaagcgactgcgcgatagtccacctcccaaactgaaaaactctcacaaagtatctcctgtcctccgtgactttctggagcgcatgcttgttcgcgacccacaggaacgcgctacagcacaggaactgttagatcacccatttctactccagaccggcctgcccgagtgcctggtgccccttattcagctttatagaaaacagacctcgacatgctag

SEQ ID NO: 233841 - DNA, 2046 bp, synthetic construct
  misc_feature 1..2046: note = Description of Artificial Sequence: Synthetic coding sequence
  source 1..2046: mol_type = other DNA
atgtttcgtaaaaagaagaagaaaaggcctgaaatttccgcccctcagaactttcagcacagagtacataccagtttcgacccaaaagagggcaagttcgtgggcttgcctccacagtggcaaaacattctcgacacactgaggcgtccaaagcccgtcgtggatccaagcaggatcacacgggtgcagttacagcccatgaagaccgtagtgagagggtccgccatgccagttgacgggtatattagcggacttctgaacgacatccagaagctcagcgtgatttcgtccaatacgttgcgtggacgatctcccacctctaggaggcgcgcacagagcctcggactcttgggggacgaacattgggctacagaccccgacatgtatctccagtcccctcagtctgaacggaccgacccacacggcctgtatctgtcttgtaatggtgggactcctgcaggccataaacagatgccatggcccgagccgcagtcacccagagtcttgccaaacgggctggcagccaaagctcaaagcttggggcctgccgagtttcaaggcgcttcccaacgctgcttgcagttgggagcctgtctccagtcgagccccccaggggctagccccccaacagggactaataggcacgggatgaaggcggctaagcatggatccgaggaggctagacctcagagctgtttagtgggtagtgctaccggcagaccgggtggcgagggatctccttcccctaaaacccgtgaatcttcgttaaaaaggcgcttgtttagaagcatgttcctgtccacggccgcaaccgcccctccctcctcttccaagccaggtcctccaccgcaaagtaaaccaaactccagtttcaggcctcctcaaaaggataacccaccgtccctagtggctaaagcacaaagcctgccctctgatcagcccgtaggcaccttttctcccctaactacctctgacacttctagtccgcaaaagtcgctgcggacggccccagccacaggccagctgccaggcaggtcctctcccgctgggtccccccgtacctggcacgcacagatctcaactagcaatctgtatttgccacaagaccctacagtggctaagggggctctggccggagaagacacgggcgttgtgacccacgagcaatttaaggctgccctgagaatggtcgttgaccagggcgatcccaggcttctgctggattcttacgtcaagatcggcgagggaagcaccggtattgtgtgtttggctcgggagaagcacagcggcaggcaggtcgccgtgaagatgatggatctgcggaagcagcagaggagagagctactcttcaatgaagtcgtcattatgcgagactatcaacactttaatgtcgtggagatgtacaaaagctacctggtcggtgaggagttatgggtcctgatggagtttctccaaggtggcgcattaacggatattgtctctcaggtgcggctgaacgaagagcagatcgccactgtatgcgaagcagtcctgcaggccctggcctatctgcatgcgcagggagtgatacaccgtgatattaaatccgattccatccttctcactttggatggaagagttaagctgagcgatttcggcttttgcgcacagataagcaaggatgttcccaaacgaaaatctctggttggaacaccgtactggatggcaccagaggtgatctctcgctccttgtacgctacagaggttgacatctggagtctgggcattatggttatcgagatggtagatggggaacctccctatttctctgattccccggtccaggcaatgaagaggctccgggattcccctcctcctaaactcaaaaactcccataaggtatcaccagtccttcgcgattttctggagaggatgctggtaagggaccctcaggagcgggcaaccgctcaggagctgcttgatcatccattcctgcttcagacgggactccctgagtgcctggtgccattgattcagctctacagaaaacagactagcacttgttag

SEQ ID NO: 233842 - DNA, 369 bp, synthetic construct
  misc_feature 1..369: note = Description of Artificial Sequence: Synthetic coding sequence
  source 1..369: mol_type = other DNA
atgttccgcaagaagaagaagaagcggcctgagatttccgcgccacagaatttccagcatagggttcatacgtcctttgacccaaaagagggcaagttcgtgggcctgcccccacagtggcagaacatcctggataccctgcgccgtcctaaacctgtggttgatccctcaagaatcacgagggtccaactccagcccatgaaaactgtggtgaggggcagcgcaatgccagtagacggttacatttctggactgttgaatgatattcagaagttgtctgtcatcagcagcaacaccctgcggggtagaagccccacgagtaggaggcgagcacaaagtctcggactgctcggcgacgagcattggtag

SEQ ID NO: 233843 - DNA, 372 bp, synthetic construct
  misc_feature 1..372: note = Description of Artificial Sequence: Synthetic coding sequence
  source 1..372: mol_type = other DNA
atgtttcgtaagaaaaaaaaaaagcgtccagaaatctcagcccctcagaacttccagcacagagtgcacacatcctttgatcctaaagagggaaaattcgtcggcctccccccacagtggcagaatatattggacactctcagaagaccgaaaccagtggtggatcctagccgcatcacccgtgtacaattgcagccaatgaaaactgtcgtcagggggagtgctatgccggtcgatggctatatttctggacttttgaacgatatccagaaattgtctgtgatctcgtctaacactttgagaggtaggagcccgacctccaggcgtagggcccagtccctggggctgttaggagacgaacattgggcttag

SEQ ID NO: 233844 - DNA, 330 bp, synthetic construct
  misc_feature 1..330: note = Description of Artificial Sequence: Synthetic coding sequence
  source 1..330: mol_type = other DNA
atgtttcgaaagaagaagaagaaacgtcccgagataagcgctccccaaaatttccagcatagagtccacactagcttcgacccaaaagaaggaaaatttgtgggacttcccccacagtggcagaacatcctcgacacactgagaagaccaaaacctgtagtcgatccatcgaggataacacgagttcaactgcagcctatgaagactgttgtacggggttctgctatgcctgtggatgggtatatttcagggctgctcaatgatattcagaagctcagcgtgatctccagtaataccctgagaggacgttctccaaccagtagacgctag

SEQ ID NO: 233845 - DNA, 339 bp, synthetic construct
  misc_feature 1..339: note = Description of Artificial Sequence: Synthetic coding sequence
  source 1..339: mol_type = other DNA
atgttccgtaaaaaaaagaagaagcggcctgagattagtgctccccagaattttcaacacagagtccataccagctttgatcccaaggaaggaaagtttgtggggctgccgccacagtggcagaatatccttgataccctccggaggcccaaaccagtggtggacccgtctcggattacaagggtccagttgcagcctatgaagacagtggtgagaggcagcgcaatgccagtcgacggttacattagtgggctcttgaacgatattcagaagctgtctgttatcagcagtaatactcttaggggtcgttccccaacttcgaggcgcagagctcagtag

SEQ ID NO: 233846 - DNA, 2046 bp, synthetic construct
  misc_feature 1..2046: note = Description of Artificial Sequence: Synthetic coding sequence
  source 1..2046: mol_type = other DNA
atgtttaggaagaagaaaaagaaacgaccagagatctcagcaccccagaacttccaacaccgcgtgcacacatcattcgatcctaaggaagggaaatttgttggtctccctcctcagtggcaaaatatcctggatactttaaggaggcctaagccggtggtggacccctcaaggattacacgggtgcagctgcagcccatgaaaacagtggtcagaggatccgccatgcccgttgatggttatattagtgggcttctcaacgacatccagaaattatccgtcatatccagcaataccttgcggggacgatccccaacatcaagaaggcgcgcacaatctctcgggctcttgggagacgaacactgggccaccgacccagatatgtacttgcagagtccccaaagcgagaggactgatccacatggtctatacctgagttgtaacggcggtacgccagctggccacaaacaaatgccatggcctgagccgcagtctcccagagtactccccaatggactagcggcaaaagctcagtcactgggtcccgctgagttccagggggcatctcagcgctgcctgcagctaggcgcatgtctccagtctagtccacctggcgcaagtccgcctaccgggaccaaccgacatggcatgaaggcagctaagcatggctccgaggaggcgaggccacaatcttgtctggtcggcagcgccactggccgtcccggtggagaaggctctcctagtcctaagactcgggagagttcccttaaacgacgactgtttcggagcatgtttctgtctacagcagccactgcacccccatcctccagtaaacccggtccgccacctcagtccaaaccgaattcctctttcaggcccccacagaaagacaatcccccttctctggtcgctaaagctcaatctctgccctccgatcaaccggtaggaaccttttcaccactgactacctccgatacatcatcccctcagaaatccctccgaacagcgccagccacgggacaattgcctggacggtcctccccggctggctcaccacggacctggcacgctcagatctctacctccaacctgtatctaccacaggatccaaccgtggccaaaggggctttggctggggaagacactggcgtggtgacacatgaacaatttaaagcagccctgaggatggtggtggatcaaggagaccccagactgctgctggactcgtacgtgaaaattggtgaaggttccacaggcattgtttgtcttgccagggaaaagcactcagggaggcaagtggctgtgaaaatgatggatctccggaaacaacaacgccgtgaactgctattcaacgaggttgtgattatgcgcgactaccagcacttcaatgttgttgagatgtacaaaagctatctcgttggggaggagctctgggttctcatggagtttcttcagggaggggctctaactgatatcgtgagtcaagttcgactgaacgaggagcagatcgcaacagtctgtgaagccgtcctgcaggcgttggcatatttacatgcccaaggagttattcacagggatattaaatccgactcgatcttgttgacactcgatggcagggtaaagctttctgactttggtttctgtgcgcaaatctctaaagacgttcccaagcggaagagtctggtaggcacaccttactggatggcacctgaggtgatctctcggtccctatacgccacagaagtggacatttggtcgctcggtatcatggtaattgagatggtggacggggagcccccttattttagtgactctcctgttcaggctatgaagcgtttgcgggacagccctccacctaagcttaagaactcccacaaagtttcgcccgtgttaagggatttcttggagcgcatgctggtgagggatccacaggagagagccaccgcacaggagttacttgaccacccattcctgctgcagaccgggcttcccgagtgtctggtgccattgattcagctctacaggaagcagacatcaacatgttag

SEQ ID NO: 233847 - DNA, 855 bp, synthetic construct
  misc_feature 1..855: note = Description of Artificial Sequence: Synthetic coding sequence
  source 1..855: mol_type = other DNA
atgttcagaaagaagaagaagaagcgacctgaaataagcgcccctcaaaacttccagcatagggtccatacttcattcgatcccaaggagggtaagttcgtgggccttcctccccagtggcagaatatcttggacacactgcggagacccaaacctgtggttgaccccagtcgaatcacaagggttcagctccaacccatgaagacggttgtgcggggatccgccatgcccgttgacgggtacatatcaggattgctaaatgatattcagaagcttagtgtcatcagttctaacaccttaagaggccgaagcccaacaagccggaggcgggctcagagtctcggattgctgggcgacgaacactgggctacagatcccgacatgtatttacagagcccacagagcgagagaactgacccgcacggactgtatttatcatgtaatggaggtacccctgccggtcacaaacaaatgccttggcctgaacctcagtcccctagagtgctgcctaatggcctggctgctaaagcacaatccttgggccctgcggaattccaaggtgcctcgcagagatgtcttcagttgggagcatgtctgcagtccagcccaccaggcgcttccccaccaaccggcaccaaccgtcacggcatgaaagctgctaaacatggttccgaagaagccagaccacagagctgtctcgtgggctctgccactggcagacctgggggtgaaggtagcccctcgccaaagaccagagagagtagcttgaagcgtagactctttcggtccatgtttctcagcaccgcagcaaccgccccaccctcctcatctaaaccgggtccgcctccccagtag

SEQ ID NO: 233848 - DNA, 318 bp, synthetic construct
  misc_feature 1..318: note = Description of Artificial Sequence: Synthetic coding sequence
  source 1..318: mol_type = other DNA
atgttcaggaaaaaaaagaagaaaagaccagaaatctcggcaccccagaacttccagcatagagtacatacctccttcgatccaaaggagggaaaatttgtggggctgcccccacaatggcagaacatccttgacaccctccggaggcctaaacctgtcgtggacccgtccaggatcaccagagttcaactacagcctatgaaaacagtcgtgcgcggttccgcaatgcctgtggacgggtacatctctgggctcctgaacgatattcagaaactgtctgtcattagttccaacaccctgagaggcagatcaccttag

SEQ ID NO: 233849 - DNA, 441 bp, synthetic construct
  misc_feature 1..441: note = Description of Artificial Sequence: Synthetic coding sequence
  source 1..441: mol_type = other DNA
atgattaatatgggggacagccatgtagataccagcagcacagtgagtgaggcagtggcggaggaggtaagccttttctcaatgactgatatgattctgtttagtctaattgtgggactcctgacgtactggttcctgttccgtaaaaaaaaggaggaggtgccagagttcaccaaaattcaaacattaacgagcagcgttagggagagttcattcgtagagaagatgaagaagaccgggcgtaacatcattgtcttctatgggtcccagacagggactgccgaagagttcgctaatcgcctgtctaaggacgcccatcgatacgggatgcggggtatgtctgcagacccagaagagtacgatttagccgatctgtctagcctgcctgagattgacaacgccctggtggtgttctgtatggcaacatacggggaaggctag

SEQ ID NO: 233850 - DNA, 519 bp, synthetic construct
  misc_feature 1..519: note = Description of Artificial Sequence: Synthetic coding sequence
  source 1..519: mol_type = other DNA
atgatcaacatgggcgacagtcacgtggatacaagttccaccgtctctgaagctgtggccgaagaggtgtctctgttctctatgaccgatatgatcctcttcagtttgatcgtgggcttgctgacctactggtttttgttccgaaagaaaaaagaagaggtccccgaattcaccaagatccagaccttaacttcatctgtgagggagagttccttcgtggagaagatgaagaaaactggtaggaatattattgtgttctacggcagccagacaggcactgctgaagagtttgcaaacagactctccaaggatgcacatcgatacggaatgcggggaatgagcgccgaccccgaggagtatgatctggccgacctctccagtcttccagagatcgacaatgccctcgttgtcttttgcatggctacctatggagaaggagatccaacggataatgctcaggacttctacgactggcttcaggagaccgacgttgatctctccggagtcaagtttgcttag

SEQ ID NO: 233851 - DNA, 189 bp, synthetic construct
  misc_feature 1..189: note = Description of Artificial Sequence: Synthetic coding sequence
  source 1..189: mol_type = other DNA
atgatcaacatgggcgactctcacgttgacacatcctccacggtgtccgaggccgtggctgaggaggtgagccttttttccatgactgacatgattctgttctccctcatcgttgggctcctaacttactggttccttttccgtaagaagaaggaagaagtacccgagttcactaaaattcagacttag

SEQ ID NO: 233852 - DNA, 1107 bp, synthetic construct
  misc_feature 1..1107: note = Description of Artificial Sequence: Synthetic coding sequence
  source 1..1107: mol_type = other DNA
atgggaaagtacgtcgataaaagactcgagcagttgggagctcaacggatctttgagctgggacttggcgatgacgacgggaatctggaggaagactttatcacatggagggaacaattttggccagccgtctgtgagcattttggggtggaggccaccggcgaagagtcctccatcagacagtacgaactagtcgtgcacactgatatcgacgcagcaaaggtatatatgggcgaaatgggtcgacttaagagctacgagaaccaaaagcctccttttgatgccaagaaccctttcctcgctgcagttacaaccaatcgaaagctgaaccagggcactgaaagacacctgatgcacttggagttagacatatctgactctaaaatacgatacgagagcggggaccacgttgccgtgtaccctgcaaatgactccgccctggtgaaccaactgggtaagatactgggcgcagacctcgatgtcgtaatgtcgctcaacaatctggacgaggagagtaacaaaaagcatccattcccatgccccacaagctacaggaccgctttgacgtattacttggacattacgaatccaccccgtaccaacgtactgtatgaactagcccagtacgcctctgagccaagcgagcaggaactattaaggaagatggcctcttccagcggcgaggggaaagagctctaccttagttgggtggtcgaagctcgcaggcatatactggctattttacaggactgtccaagcctaaggccgccaatcgaccacctgtgtgagctcctgcccagattgcaagctaggtattatagtattgcttcctcatctaaagtgcacccaaactcagttcatatctgcgccgtggtggtggagtacgaaaccaaagcaggtcggataaataaaggcgtggccactaattggttgagggccaaggagccagcaggcgaaaacgggggacgggcactcgcagtaccaacaagcaccagtgtgggcatgcatggaacctggccaggaatgtgcaggacccccagcacgacctcctggctgagttccggtccatggagtacccgtaggagatggactacctcccgcaattag

SEQ ID NO: 233853 - DNA, 120 bp, synthetic construct
  misc_feature 1..120: note = Description of Artificial Sequence: Synthetic coding sequence
  source 1..120: mol_type = other DNA
atgataaatatgggcgattcccatgttgacacatcatctacggtgagtgaagcggtcgcagaggaggtatccctttttagcatgacggatatgattctgttctccttaattgtgggatag

SEQ ID NO: 233854 - DNA, 501 bp, synthetic construct
  misc_feature 1..501: note = Description of Artificial Sequence: Synthetic coding sequence
  source 1..501: mol_type = other DNA
atgattaatatgggggattcacatgtggatacttcttctacagtctcggaagcagtcgccgaagaggtttctctgttttccatgaccgatatgatcctcttcagcctgatcgtgggcttgctgacttattggttcctgtttaggaaaaagaaagaggaggttcctgagtttaccaaaatccagactctgacctcgtctgtcagggagtcctctttcgtcgagaagatgaaaaaaacaggcagaaatatcatagtgttctatggcagtcaaactgggacagctgaggagttcgccaatagactgtcaaaagacgcacacaggtacgggatgagggggatgtccgccgaccctgaagagtacgaccttgcagatctgagtagccttccagagatcgataatgctctggtggtcttttgtatggccacctacggcgaaggcgatcctactgataacgcacaggacttctatgactggctacaggaaaccgacgtcgatctgtag

SEQ ID NO: 233855 - DNA, 567 bp, synthetic construct
  misc_feature 1..567: note = Description of Artificial Sequence: Synthetic coding sequence
  source 1..567: mol_type = other DNA
atgattaatatgggcgacagccacgtagatacctccagtaccgtaagcgaagccgttgcagaagaggttagcctgttcagcatgacagacatgattctcttcagtctgatcgtgggtctgcttacatattggtttctcttccggaaaaaaaaagaagaggtgcctgagttcaccaaaatccagacactgacaagctctgtgcgagaaagcagttttgtggagaagatgaagaagacaggaaggaatattatagtcttctatgggtctcagactggaaccgccgaggagtttgcaaatagactcagcaaggatgcacaccgttatggaatgcggggtatgtctgccgatcccgaggaatacgacttagcagatttgagttccctcccagagatagacaatgccttagtcgttttttgtatggctacgtatggagaaggagatcctactgataacgcacaggatttttacgattggctccaggaaaccgatgtcgatctgtcaggggtgaagttcgctgtgtttggtctagggaacaagacctacgagcattttaacgccatggggtag

SEQ ID NO: 233856 - DNA, 189 bp, synthetic construct
  misc_feature 1..189: note = Description of Artificial Sequence: Synthetic coding sequence
  source 1..189: mol_type = other DNA
atgatcaacatgggggatagccatgttgacacttcctctactgtctctgaagccgtggcggaagaggtgtctctgttctcgatgaccgatatgattttattttctcttatcgtggggttattaacctactggtttctgtttcgtaaaaagaaggaggaggtgcctgagttcaccaaaattcagacctag

SEQ ID NO: 233857 - DNA, 1722 bp, synthetic construct
  misc_feature 1..1722: note = Description of Artificial Sequence: Synthetic coding sequence
  source 1..1722: mol_type = other DNA
atgggaagcagatggccggcagttcctccttggggtttgcagatacacgtctcagagcgccaaccatcacgccctcctccttgtccccagcagccaggccaggctacttgcgaaacattgtcttccgcacctgaccctagcaccacaaggatgagcccaccttgtccgcagcctcagtctgctcccggaggtatcggctgttggagactgaaagtgttcgggctcggaaataaaacatacgaacatttcaatgccatggggaagtatgtggataaacgattagaacagcttggagctcagaggatattcgagctaggactgggagatgatgacggcaatctcgaagaggattttataacatggcgggagcaattttggcccgcagtctgcgaacattttggagtcgaagccactggcgaagagtcttccattcgacagtatgagcttgtggttcatactgacattgacgcagctaaggtgtatatgggagagatgggaagattgaagtcatacgaaaatcagaagccaccgttcgatgcaaagaacccctttctggcagctgttacgaccaatcgaaaacttaatcaggggactgaacggcatctgatgcacctggaactggatatctcagatagtaaaatccgatatgagagcggagaccacgtggccgtctacccggcaaacgattcagctcttgttaaccagctgggaaagatcctcggggctgaccttgacgtggtgatgtcattgaacaatctcgacgaagaatctaataaaaaacacccatttccctgtcctacctcgtataggactgccctaacctactacctagacataaccaatccacccaggacaaacgttttgtatgagctcgcacagtatgcctcagagccaagcgaacaagagctccttcgcaaaatggcgtctagctccggagaggggaaggagctgtacctaagctgggtggtggaggcgaggcgccatattttagctattttgcaggattgtccctctctgcgccctcccattgatcatctctgcgagctccttcccaggctgcaggcaaggtattattctatagccagttctagtaaagttcatcctaactctgtacatatctgtgccgtcgtggtggaatatgaaacgaaagcgggaaggatcaataaaggggtcgctaccaattggctgcgtgccaaggaaccagcaggcgagaacgggggtagggcactggtccccatgttcgtcaggaaatctcaattcaggcttccatttaaggccaccaccccagtcataatggtcggaccagggaccggagtggctccctttatcggattcattcaggagcgagcctggttacgacagcagggaaaggaagtcggagaaaccctcctgtattacggttgccgcaggtccgatgaagactatctgtacagggaggaactggcccagtttcatcgggatggagcactcactcagctcaatgtggccttttcaagagagcagtctcacaaggtttatgtgcagcacctgctcaagcaagaccgagaacacctctggaaactgattgaggggggtgcacacatatatgtatgcggaacaccctcttcttgtccaggtatgcacggaacctggccaggaatgtgccgcacaccctcaaccacttcctggctctcaagtggtccttggtccactcggaggaggtggacgacatctcggaattag

SEQ ID NO: 233858 - DNA, 423 bp, synthetic construct
  misc_feature 1..423: note = Description of Artificial Sequence: Synthetic coding sequence
  source 1..423: mol_type = other DNA
atgatcaatatgggtgactctcacgtcgacacaagcagcacggtgagcgaggccgtcgccgaggaggttagccttttctccatgacagacatgatactgttctcccttatcgtggggctgctgacttattggttcctctttcggaaaaagaaggaggaagtgcccgagtttacaaaaattcagacactcacatccagtgtgcgggagagcagcttcgtcgagaagatgaagaagacgggccgtaacatcatcgtcttctatggatcgcaaacgggaactgctgaagagttcgccaacagattgtccaaagatgcccatagatatgggatgcgtggaatgtccgccgaccctgaagagtatgacctggccgacttatcctctctgccagagatcgacaatgccctagtggttttctgtatgtag

SEQ ID NO: 233859 - DNA, 2043 bp, synthetic construct
  misc_feature 1..2043: note = Description of Artificial Sequence: Synthetic coding sequence
  source 1..2043: mol_type = other DNA
atgattaatatgggtgatagccacgtcgacacgtccagcactgtgagcgaggctgtcgctgaagaagtgagcctattctctatgacagacatgatactgttttctctgattgtgggactactgacatattggtttctgtttcgaaaaaaaaaagaagaagtgcctgaatttactaaaattcagacccttacatcgagcgtgcgcgagtctagtttcgtggagaagatgaaaaagacgggacgcaatatcattgtattctatgggagtcagaccggaaccgccgaggagtttgccaacagacttagcaaagatgcccacaggtacggcatgcggggtatgtcggccgatcccgaggagtacgacctggcggatctctcttctctccccgaaattgataatgccctggtcgttttttgcatggctacttacggggagggcgaccccacagataatgcccaggacttctatgactggttacaggagactgacgttgacctgagcggcgtgaagtttgctgtgtttgggctgggaaataagacgtacgagcactttaatgcaatgggcaagtatgtggacaagcgcttagagcaactgggagctcagcggattttcgaactcggccttggagacgacgatggcaacctagaggaggacttcattacgtggcgggagcagttctggccagccgtttgtgagcacttcggggtggaggctacaggggaggagagctcaattcgtcagtacgagctcgttgtgcacactgacatagatgcggcaaaggtgtatatgggcgaaatgggtcgactgaagtcctatgagaaccaaaaaccacccttcgatgccaagaatccatttctcgcagctgtgaccactaatcgcaaactgaaccaaggtaccgagaggcacttaatgcatctcgagctggatatctccgactccaagatccggtacgaaagcggcgatcatgtagcggtttacccagcaaacgattccgcccttgtgaaccagctcggaaaaatcctgggtgctgatctggacgttgtcatgtcgctgaacaatctggatgaggagtccaacaaaaaacacccctttccttgccctacctcctacagaacggcccttacttactatctggatattactaatccccctaggactaacgtattatatgagctggcccagtatgcctcagaaccctccgaacaggagctgctgaggaaaatggcctccagttcaggtgagggaaaagagctgtacttatcttgggtggtagaggccagacggcacattttggcaatcctacaggactgtccttcactgcgtcccccaatcgaccatctgtgcgagttgctgcctcgcttacaggcacgttattatagtatcgcttccagctctaaggttcacccaaactccgtgcacatatgcgcagttgtggtggaatacgaaaccaaggctggtagaatcaataagggagtcgcaacaaattggctacgggctaaggagccggcaggggagaacgggggaagggcactggttcccatgtttgtaagaaaatcccagtttcgattgccttttaaggcaacaactccggtaatcatggttggaccaggtacaggcgtcgccccattcatagggttcattcaggagagggcctggcttagacagcagggcaaagaagtgggagagacattgctctactatggctgtaggcgcagtgacgaagattatctatatagggaagaactggcgcaatttcatagggatggggctttgacacagctgaatgtagccttctcacgggaacagtcacataaagtgtacgtccagcacctactcaagcaggatagagaacatctctggaagctcattgagggtggggctcatatctatgtctgtggcgatgccaggaacatggccagggacgtgcagaatacattctacgatatcgtcgccgaattgggggctatggagcatgcgcaagcagtggattatatcaaaaagctgatgaccaagggcaggtatagcctggacgtttggtcctag

SEQ ID NO: 233860 - DNA, 1467 bp, synthetic construct
  misc_feature 1..1467: note = Description of Artificial Sequence: Synthetic coding sequence
  source 1..1467: mol_type = other DNA
atgcccaggacatctacaactggttgccgcaggcagacttggatttccctggggtcatcatcacggctggaagaagacttcatcacgtggagagagcaattttggccagctgtgtgcgagcacttcggggtggaggcaacgggagaagaatccagcatacggcagtacgagctggttgtccacaccgacatcgacgccgctaaggtttacatgggagagatgggccgactgaagagctacgagaatcagaagccaccgttcgatgccaaaaatccttttttggccgctgtcacgacaaacagaaagcttaatcagggtaccgaacgccacctgatgcacctcgaattggatatcagcgatagtaagatcagatatgagagcggagaccatgtcgctgtttaccccgctaatgactcggccctggtcaaccagctggggaagattctcggagcagatctcgacgtcgtcatgagcctgaataacctggatgaggagagcaataagaagcatccattcccttgtcctacctcgtacagaaccgctcttacctattacctggatattactaaccccccaaggaccaatgtgctgtacgagctcgctcagtacgcatccgaaccctctgaacaggagttgctcagaaagatggccagcagtagcggagaaggaaaagagctgtacttatcatgggtggtcgaggccaggcgccatatcctagcaatcttgcaggactgccccagtctccgcccacctattgatcacctttgtgaactgctcccacggctgcaggctaggtactactctattgccagcagctctaaagtccaccccaacagcgtccacatttgcgctgttgttgtggagtacgagaccaaggctggcagaattaataagggtgtcgcaacgaattggctccgtgccaaggagcccgcaggcgagaatggcggacgcgcattggttccaatgtttgtgaggaagagccagtttcggctcccgttcaaggctacaactcccgtgataatggtgggtcctgggacgggagtggcacctttcattggcttcatacaggagagagcatggcttaggcagcagggcaaggaggtgggcgagactcttctgtattatgggtgtcggcgttccgatgaggattacctttaccgggaagaattggcccagtttcaccgcgacggcgctctcacgcaactcaatgtagctttctcaagggaacagtcccacaaagtgtatgtacaacacctcctgaaacaggaccgggaacatctatggaagctaattgaagggggagcccacatatacgtgtgcggcgatgccaggaacatggctcgtgacgtgcaaaacacgttctacgacatagtagccgagctgggcgctatggagcatgctcaagctgttgactacattaaaaagctgatgaccaaggggagatattctctggacgtgtggagttag

SEQ ID NO: 233861 - DNA, 402 bp, synthetic construct
  misc_feature 1..402: note = Description of Artificial Sequence: Synthetic coding sequence
  source 1..402: mol_type = other DNA
atgttgtctccggaagcggagagggtgttgaggtacctggtggaggtggaagaattggcggaagaagtgttagccgataagaggcaaatagtcgatctggatacgaagaggaatcagaaccgcgagggcctgagggctctgcagaaggacctatcattgagcgaggatgtaatggtttgtttcggaaacatgttcatcaaaatgccccatcctgaaacgaaagaaatgatagaaaaagaccaggaccatctggacaaagagatcgaaaagctcaggaagcaattgaaagtgaaagtgaaccgtctgttcgaggcccaagggaaacccgaattgaaaggctttaatctcaaccctttgaaccaggatgagcttaaggctctcaaggttattttgaagggctag

SEQ ID NO: 233862 - DNA, 1605 bp, synthetic construct
  misc_feature 1..1605: note = Description of Artificial Sequence: Synthetic coding sequence
  source 1..1605: mol_type = other DNA
atgaagtttacactgggcctcgggtcccgggcttggcgggtgagttgggagggggcagccgcagccgcagcgggacctggggctggaggaagcgctctacgatgcagggctcagcgcgtgagtagccccagactcggccgaagaggatcccgcctgagtggcgctctcccactatgcttatctcggggagggggaggcgctcaagcacttccagattgtgctggacccagtccaggacaccctgggcaccctggagctaggcagttggctggacctttagccatggagcagacgtatggcgaagtgaatcagcttggcggtgtttttgtgaacgggcgtccactacctaacgcaattaggctgaggatcgtggagcttgcgcagctgggcatccggccatgcgatatctcccgccagctacgagtcagccacgggtgcgtgtctaagatacttgctcgatataacgaaactggaagtatcctgcctggtgcaattgggggttcaaagccacgggttacaactccaaacgttgtgaaacatattagagattacaaacagggcgaccccggaatctttgcttgggagattcgggatagactgttggccgatggagtgtgtgacaagtacaacgtgcctagtgtttcttcaatcagtcggatactgagaaataaaattggctccctggcccagcccggtccttacgaggcttctaagcaaccacctagccagcccaccctgccttacaaccacatctaccaatacccttacccttctccggtttctcccaccggagccaaaatggggtctcatcctggagtcccaggtacagccggacacgtttcaattccaagatcatggcccagtgcacacagtgtttcaaacatcctgggcatccgaacattcatggagcaaacaggggctcttgccggttccgagggcacggcatattcccccaagatggaggactgggcgggagttaatagaactgcctttccagcgaccccggctgtcaatggccttgagaagccagcattggaggccgatattaagtacactcagtctgcgtcaacattaagcgccgtcggcggttttttaccagcatgcgcctatcccgcaagtaaccaacacggcgtatactcagcacccggtggtgggtaccttgcgccaggtccaccctggcccccagcccaggggccacctctggctcctccaggcgctggcgttgccgtgcacggtggcgaattagctgcagctatgacatttaagcaccccagcagggaaggttccctgcctgctccagccgcaagaccccgaactccaagcgtagcctataccgattgtccttcacgcccacggccaccaaggggatcctctccacgtactagggccagaagagagcggcaggcagaccccggtgcccaggtttgtgccgcagctcccgctatagggaccggtagaattggaggcctggctgaggaagaggcaagtgcgggaccccgtggcgctcggcctgcctctccccaggcgcagccctgcctctggccagatccgccacatttcctctactggagtggcttcctcggcttttccgagctggggttctag

SEQ ID NO: 233863 - DNA, 1185 bp, synthetic construct
  misc_feature 1..1185: note = Description of Artificial Sequence: Synthetic coding sequence
  source 1..1185: mol_type = other DNA
atggatatgcactgcaaggccgatcctttttctgccatgcatcctggtcatggcggtgtgaatcaactgggcggtgtgttcgtaaatggcaggccgcttcccgacgtggttcgacagcgaattgttgagctggcacaccagggagtgcggccatgcgacatcagcagacaactcagagtttcacacggttgcgtgtcaaagattttgggaagatattacgagaccggatcgatcaagcccggagttatcgggggttctaagcccaaggttgcaacgcccaaagtagtggataagatcgctgaatataagcgccaaaatcccaccatgtttgcttgggaaattagggaccggttactggccgaaggcatctgcgacaatgacaccgtgcccagcgtgagtagcatcaacaggatcattcggactaaagtccagcaacctttccacccgacacccgatggggcaggaactggcgtgacagctccaggccacacaattgtgccctctacagcgtctcccccagtgtcgagtgcttcaaacgatccagtgggaagttactccatcaacgggattctgggaatccccaggtcaaatggagaaaagagaaaaagggacgaggacgtatctgaaggttcagtgccgaacggagatagccagtccggggttgattccctgcgcaagcatctgcgggcagacacgttcacccagcagcagctggaagccctggaccgcgtgttcgagcgcccttcgtaccctgacgtgtttcaggctagtgagcacattaaaagtgaacaaggtaatgagtactccctgccagcacttacccccggtctggacgaggtcaagagctccctgtctgccagcaccaatcccgagcttggcagtaatgtgagtgggacacagacctacccggtcgtgacggggagggacatggcatccacaaccctgcccggatatcccccacacgtcccgccaacaggccagggtagctaccccaccagtacattagctggtatggttccagggagcgagttctccggcaacccctattctcatccccaatacacagcgtacaacgaggcgtggagattctcaaatccggctttgctgagcagtccatactactactcagctgcccctaggggatctgcaccggctgctgccgctgcagcatatgaccggcattag

SEQ ID NO: 233864 - DNA, 1191 bp, synthetic construct
  misc_feature 1..1191: note = Description of Artificial Sequence: Synthetic coding sequence
  source 1..1191: mol_type = other DNA
atggacatgcactgtaaggctgacccttttagtgccatgcatcctggccacgggggagtcaatcagcttggcggtgtgttcgtgaatggtcgcccactcccagacgtagtacgacagcggatcgtggagctggcccatcagggtgtgcggccttgcgatattagcaggcagctcagagtcagtcacggctgcgtgagcaagattctgggcaggtactacgagacagggtctattaaaccaggtgtgattgggggtagcaagcccaaggtggcgacccctaaggtagtggacaaaatcgccgagtataaaagacaaaatccaaccatgttcgcctgggaaatccgagatcggttgttagccgagggcatttgcgacaacgacacagtgccttcggtctcatctatcaatcgcatcattcgcacaaaggtgcagcaaccctttcaccctacacctgatggtgccggaaccggcgtgacagcccctgggcataccattgtacccagcacggcctctcctcctgtctcttcggctagcaacgatccagtcgggtcctatagtatcaacgggattcttggaattcctcgtagcaatggagaaaagcgaaagagagacgaggacgtcagcgagggctccgttcctaatggcgattcacaaagtggagttgactcattgagaaagcatcttcgtgccgacacgttcacacagcaacagttggaagccctggacagagtgttcgagcgcccttcatatcccgatgtgtttcaagcctctgaacacataaaaagcgagcagggaaatgagtacagcctgccggcactcacacccggtttggatgaggtcaagagtagcctcagcgcgagtactaatcctgaacttggatcaaatgtgtcaggtacacagacttaccccgttgtaaccgggagagatatggcttctactaccctgcctggctatcctccccatgtgccgccaacaggacaaggcagttaccccacatccactctggcaggcatggtgcccgaggccgctgttgggccaagttcctccctcatgtcaaagcctggccgaaagcttgccgaggtcccaccatgcgtacaaccaactggagccagcagtccggctacccgcacagccacaccaagcaccagacctacaactaggctaggagattcggccactcccccttactag

SEQ ID NO: 233865 - DNA, 990 bp, synthetic construct
  misc_feature 1..990: note = Description of Artificial Sequence: Synthetic coding sequence
  source 1..990: mol_type = other DNA
atgttcgcctgggagatcagggatcggctcctagccgagggaatttgcgacaacgatactgtgcccagtgtgagcagcattaataggatcatccggacaaaggttcagcagccgttccacccaacacctgacggcgctgggacaggcgtgaccgcacccggtcatactatcgtcccatcaaccgcctcaccacccgtgtcctcagccagtaacgatcccgtcggctcctattctatcaacggcattctgggaatcccaagaagcaatggagagaagagaaagcgcgatgaggtggaggtgtacactgatcccgctcacatccgtggaggaggcggattgcaccttgtctggactttgagagacgtgtccgaggggtcagtcccaaatggggacagccagtccggagtggacagccttcgtaaacatttgagagcagacacattcacacaacaacagctggaggctttggacagggtgtttgaacggccttcttacccagacgtgttccaggcctctgagcatataaagagcgagcaaggaaatgaatattccctgccagcccttacaccaggattagatgaagttaaatcaagtttgtcggcaagcacaaatccagaactgggcagtaacgtgagcggaactcagacataccctgtggttacgggcagggatatggccagcaccactctgcccggttacccaccccatgtgcctccgacgggccaaggatcctatccaacatccacattggcaggtatggtgccgggaagcgagttctccgggaacccctactctcatcctcagtatactgcatacaatgaagcatggaggttctccaatcccgctctgctctcgtctccttattattactctgcagctccgagagggtcacttccattgcttcccctgcctatgaccgcgaccagctataggggcgatcatatcaagttgcaagccgattcatttggcttacacatcgtgcccgtatag

SEQ ID NO: 233866 - DNA, 1260 bp, synthetic construct
  misc_feature 1..1260: note = Description of Artificial Sequence: Synthetic coding sequence
  source 1..1260: mol_type = other DNA
atggatatgcactgcaaagccgatccattcagcgcaatgcatcccggtcacggaggcgtgaaccagctgggaggcgtgttcgttaatggaaggcccctccctgacgtagtgcggcagaggattgttgagttggcacaccagggtgtgcgaccctgcgacatcagtcggcagctgagagtaagccacggctgtgtctcgaaaatcttaggcagatattacgaaacgggaagtattaagcccggtgttatcggaggttccaaaccaaaagtggcaactcccaaggttgtcgacaagatagcagaatacaagcgacagaatccaactatgtttgcttgggaaattcgcgaccgcctactagccgagggaatctgtgataacgataccgtccctagtgtctcgtccattaacaggataatacggacgaaagttcaacaaccgttccatcccactcctgacggtgccggtacaggtgtgaccgcaccagggcataccattgttccaagcacagcctcgccaccggtatccagcgcgtctaacgatcccgtgggctcttacagcattaacggtattttaggtatcccaagatctaatggagagaagcggaagcgcgacgaggtggaggtgtacaccgatcctgcacatatcaggggcggaggtggactacatctggtgtggacactgcgagatgtgagtgagggcagcgtacctaacggcgattctcaatcaggcgtggactcattacgcaagcatctcagagccgacaccttcacacagcagcagctcgaagcgttggacagagtcttcgagcgtccctcgtatccggacgtttttcaggcaagcgagcatataaaaagcgagcaaggcaatgagtatagcctaccggctttaacaccgggtctcgatgaagttaagtctagtctgagtgcatccacaaatccagagctgggcagtaacgtgagcggtacccagacgtatcccgtagttactggaagagacatggcaagcacgaccctgccaggatatcctcctcatgttccccctaccggacaaggaagctatcctacttcgaccttggccggaatggtacccgaggcggctgttggccctagcagctccttgatgagcaaaccaggacgtaaactcgctgaggtgcctccttgcgtgcaacctaccggtgccagctcccctgcaacacggacagccaccccttccactcgtcccaccactagactgggtgattctgccacacccccatactag

SEQ ID NO: 233867 - DNA, 645 bp, synthetic construct
  misc_feature 1..645: note = Description of Artificial Sequence: Synthetic coding sequence
  source 1..645: mol_type = other DNA
atggatatgcattgcaaagctgatcctttctctgcaatgcacccaggtcatgggggtgtcaaccaactggggggagttttcgttaatggaagaccgctgcctgacgtggttcgacagcggatagtggaactcgcgcaccagggcgtacggccttgcgatatttccaggcagcttagagtgtcacatggctgcgtcagcaaaatcctgggaagatactacgagaccggcagtattaagccaggcgtaatcggaggctctaagccaaaagtcgcgacccctaaggtcgtcgacaagattgcggagtacaagaggcagaaccctaccatgttcgcatgggagatccgcgacaggctgctggcggaagggatttgcgataatgacaccgtcccgtctgtgagttctatcaataggatcatccgaactaaggtgcagcaacccttccaccctacaccggacggggctggcaccggggtgaccgcccctggtcataccatcgtgccttctaccgctagtccccctgtgtcaagtgcctctaacgacccagtggggtcttatagtattaacggcattctggggattccccgatcaaacggggaaaagagaaaacgtgacgaggtggaagtctataccgatccagcgcattag

SEQ ID NO: 233868 - DNA, 1254 bp, synthetic construct
  misc_feature 1..1254: note = Description of Artificial Sequence: Synthetic coding sequence
  source 1..1254: mol_type = other DNA
atggatatgcattgtaaggcagatccgttctctgccatgcatccaggccacggcggagtgaatcagttgggcggagtctttgttaatggcaggcccctccccgatgtggttagacagcggatagtggagctcgctcatcaaggcgtcagaccttgtgatattagtagacaattaagggtctctcacggttgcgtgtcaaagatacttgggcgatactacgagactgggtccataaagcccggtgtcatcggcggatccaagccaaaggtggctacacccaaggtggtggataaaatcgccgaatataagaggcaaaatcctaccatgttcgcttgggagattagggatcgacttctggcggaaggaatttgcgacaatgacaccgtgccttcagtgagcagcattaatcgaataatccggacgaaggttcagcagcccttccatcctactcccgacggcgcagggaccggtgtgaccgctcccggtcacaccattgtgccctcaaccgccagccctcccgtatcttccgcttcaaacgatccagttggctcatatagtattaacggaattctcggtatcccacgtagcaacggggagaaaagaaagagagacgaggtggaggtctatacagatcccgctcacatcagggggggtggtggcctgcacctagtgtggacactgagggacgtgtctgagggaagcgtccccaatggcgacagccagtcaggtgtagatagccttcgtaaacacctgcgagccgacacgtttactcagcagcaattggaagccctagatcgcgtatttgaaagaccgtcttacccagatgtcttccaggcgtccgagcatatcaagagcgagcaagggaatgagtactcgctgcccgctctgactcccggactggatgaagtgaagtcgagcttatctgcctctactaaccctgaactgggttcaaatgtgagcggcacacagacttaccccgttgtgactggacgcgatatggcatctaccaccctgcccggttacccccctcatgtgcctcccacaggccagggttcataccccacctccacccttgctggaatggtgcccggatcagagttctccggaaatccctactcacatccccagtacactgcctataacgaggcctggagatttagcaacccagcattgctctcaagtccatactactactctgccgcacctagaggctctgcaccagccgcagcagctgcagcatacgacaggcactag

SEQ ID NO: 233869 - DNA, 621 bp, synthetic construct
  misc_feature 1..621: note = Description of Artificial Sequence: Synthetic coding sequence
  source 1..621: mol_type = other DNA
atgactacgttggctggggcagtgcctcgtatgatgcggccaggcccaggccaaaattatcctagaagtggctttccactggaagtcagcacacctctaggacaaggccgagtaaaccagctgggtggagtttttatcaacggcagacccctgcctaaccacattcgacacaaaatagttgagatggcccatcacggcatccgcccatgcgtgatatcacgtcaacttcgcgtttcccatggatgtgtttcaaagattctatgcagataccaagagaccggctcaatccgccctggcgcaataggcggaagcaagccaaaacaggtgacaacccctgacgttgagaagaaaatagaggagtacaaacgtgagaatcccggaatgttttcctgggagatccgggacaaacttctcaaagacgcagtctgcgatcgtaatacagtaccatctgtcagcagcatttctcgcatccttcgcagcaagtttggcaagggagaggaggaggaggccgatttggagaggaaggaggccgaggagagcgagaaaaaggcgaagcactcaatcgatggaattttgtcagagcggggaaaagcccttgtctccggcgtcagtagtcattag

SEQ ID NO: 233870 - DNA, 1224 bp, synthetic construct
  misc_feature 1..1224: note = Description of Artificial Sequence: Synthetic coding sequence
  source 1..1224: mol_type = other DNA
atgactacgttggctggggctgtgcccaggatgatgcgcccagggcctgggcagaactatccccgttccgggtttccattggaggtgagcaccccactgggtcaggggagggtgaaccagctcggaggagtatttattaacgggcgaccactgccaaatcacatacgccacaagatcgttgagatggcccaccacggtatcagaccttgtgtgatttcccgccagctccgggtctctcatggctgtgtcagtaagattctgtgtcggtaccaggagaccgggtccatccgtccaggagcgattggcggatcaaagccaaagcaagtcactacgcctgatgtggaaaaaaagattgaagagtataagcgcgagaacccgggtatgtttagctgggaaatccgggacaaactgttaaaagatgccgtttgcgaccggaacactgtgccatccgtctccagtatcagccgcatccttcgcagcaaattcggcaagggtgaggaagaagaggcagacctcgaaaggaaggaggcggaagagagtgaaaaaaaagctaaacatagtattgacggcatccttagtgaacgagcctctgcccctcagtctgacgagggctccgatattgatagtgagccagacctgcctctgaaaaggaaacaacggagatctcgcaccacattcaccgctgaacagctagaagagctcgaacgcgcttttgagagaactcactatccggacatatacacccgtgaggaactggcccagagagctaaactcaccgaggcacgagtacaggtgtggttctctaaccggagagccaggtggaggaaacaggcgggtgccaaccagctcatggcttttaatcacctgattcctggaggctttcctcccacagcaatgccgactctgccaacctaccagttgtcggaaactagttaccaaccgactagtatcccccaagcggtgtcagatccctcctccaccgtccataggcctcagccactgccgccatcaaccgtacaccaatctactatacccagcaaccctgattcatcctccgcttactgccttccttcgacaagacacggtttttcatcttacactgatagctttgtcccaccatccggcccatcgaatccaatgaatccaaccataggcaacggattgtctcctcaggtcccatttattatctcatcccagatctcacttggtttcaaatccttctag

SEQ ID NO: 233871 - DNA, 1212 bp, synthetic construct
  misc_feature 1..1212: note = Description of Artificial Sequence: Synthetic coding sequence
  source 1..1212: mol_type = other DNA
atgactactctggccggagccgtgcccagaatgatgagacctggccctggtcaaaattaccctcgctcgggcttccccttggaagtgtccacacctctcggccagggccgagtcaatcagcttgggggagtcttcataaacgggcgtccccttcccaaccatattcgccacaaaattgtggaaatggcccaccacggtatccgcccatgtgtgatttcccgacaactcagggtctcacacggttgtgtgtccaagatcctctgcagatatcaggagaccggctccatccgtccgggagccatcggaggctctaagcctaagcaggtgacaactcctgatgtggagaaaaaaatcgaggagtacaagcgcgagaatcctggcatgttcagttgggagattcgtgacaaactcctgaaagacgcggtgtgtgatagaaacactgttccctctgtgtcttcaatctctagaattctccgcagcaagttcggcaaaggcgaggaggaggaggcggacctcgagcgtaaagaggcagaagagtccgaaaagaaggcaaaacactccatcgatggcatcctgtccgaaagagcaagcgcacctcagtctgatgagggatccgatatcgatagcgagccagatctcccactcaagaggaagcagaggaggtctcgcaccaccttcactgccgaacaactggaagagttagaacgcgcttttgaacgaacacattacccagacatctatacccgcgaagagcttgctcagcgggctaaactgacagaggcccgtgttcaagtatggttctccaacagacgcgcacggtggcggaagcaggctggcgctaaccaactgatggccttcaatcatcttattcccggtggcttccccccaaccgcaatgcccaccttaccaacatatcaattgtccgagacaagttatcagcccacttccattccgcaggcagtatcagacccaagctcaacagtgcaccgcccacaaccgctgcctccatcaactgtccaccagtcgactattcccagcaatcccgattcatcttctgcttattgtcttccatctacacgccacgggttcagtagttatacggactctttcgtcccccctagtggcccatccaatcctatgaatccaacaatcgggaatggtctgagcccacaggtgcccttcatcatctcatcacaaattagccgcaaatag

SEQ ID NO: 233872 - DNA, 1440 bp, synthetic construct
  misc_feature 1..1440: note = Description of Artificial Sequence: Synthetic coding sequence
  source 1..1440: mol_type = other DNA
atgacgacactcgccggtgccgtgcctagaatgatgcggcctggccctggtcagaattacccacggtccgggtttcccttagaggtgagcacccctttaggacagggacgtgtaaatcagctggggggagtctttatcaacggaagaccgttacctaatcacatccgccataaaattgttgaaatggcccaccatgggatccgcccatgcgtgattagtcggcagttgagagtaagtcacggatgcgtcagcaagatactttgcagatatcaggaaacaggctcaattcggcctggggcaatcggagggtctaagcctaagcaggtgacgaccccggatgttgagaaaaagatagaagaatacaagcgcgagaacccaggcatgttttcctgggaaatccgcgataagctgttgaaagatgctgtgtgcgaccggaataccgtccctagcgtgagctcaatcagcagaatcctgaggagcaaattcggtaagggggaggaagaagaagccgatcttgaacggaaagaagccgaggaaagcgagaaaaaggctaaacacagcattgatggaattctctctgaaagagcttccgcaccacagtctgacgagggttccgacattgattctgaaccagatctgccactgaagcgaaagcagcgcagatcaaggacaaccttcacagcagagcagctggaggagttagagcgcgcatttgagagaacacattatcccgatatctatactcgcgaggagcttgctcagcgagccaagctgaccgaagcccgtgtacaggtctggttttctaaccgcagggccagatggcgcaagcaagccggagccaaccaattaatggcattcaatcatctcatccctggcggtttcccaccgacggctatgcccaccctgccaacctatcagctcagtgaaacatcataccagcccacctctatcccccaggcagtgagtgacccgagtagtactgtgcatagacctcagcccttgcctccttcaacagtacatcagagcaccatcccttcgaacccagacagttcgtctgcatactgtctaccatctacaagacatggcttcagctcctacaccgactcattcgtccctccaagcggcccatcaaatcccatgaaccccaccattggaaacggcctgtctccacaggttatgggcctcctgactaaccacgggggtgtccctcaccagccccagacggattacgccctctcaccactcacaggcggactggagccgacaacgaccgtatcggcatcttgttcgcaacgcctagatcatatgaaatctcttgactctctcccaacctcacagtcttattgtccgcctacatattcaactaccggctattcgatggaccccgttacaggatatcagtacggacaatatggccagagcaagccctggaccttctag

SEQ ID NO: 233873 - DNA, 1518 bp, synthetic construct
  misc_feature 1..1518: note = Description of Artificial Sequence: Synthetic coding sequence
  source 1..1518: mol_type = other DNA
atgacaacacttgccggagcagtgcctcgaatgatgcgcccaggtcccggtcagaattacccgagatctggtttccccctggaagtgtccacacccttgggtcagggacgagtcaaccagctcggaggcgtattcattaacgggagaccccttcccaatcatattcgtcataagattgtggagatggctcatcatggtattagaccttgcgtaatttcccgccagcttcgcgtatcacatggatgcgtaagcaagatcctttgtcgatatcaggagacagggtcgatccgacctggagcgataggcggttctaagccaaaacaggtaacaaccccagatgtcgagaaaaaaatcgaggaatataagagggagaacccgggtatgttctcctgggagatcagggacaaattgctgaaggatgccgtgtgtgaccggaatacagtgccaagtgtgagcagcatttctcgtatcctccggagtaagttcggaaagggcgaggaagaagaggcagacctggagcggaaggaggctgaggagtccgagaaaaaagctaagcattcaatcgatggaatcttgtctgagagggcctccgcacctcagagtgacgagggctctgatatcgactcggaacccgaccttcctttgaagcgaaaacagaggcggtcccgcacaaccttcacagccgagcaattggaagaactcgaaagggctttcgaaagaacacattacccagacatttacactagagaggagctggcacagcgcgcaaagttaacagaagcaagagttcaggtgtggttttccaatcgcagagccagatggaggaagcaggccggagccaatcagttgatggccttcaatcacctcataccgggtgggttccctcctacagctatgcctactctgccgacataccagctgtctgagacttcttaccagcctacttcaatcccacaggccgtttcagaccctagctctacagtgcaccgccctcagcctctgcccccaagcactgtacaccagtccactataccttccaatcccgactcctcgagcgcgtattgtttgccatccacaaggcatggctttagctcatataccgactcgttcgttccaccatcgggcccatctaaccctatgaacccaaccatcggtaatggtctgagtccccaggttatgggcttgctgacaaaccatgggggagtgccacaccagccccagacagattatgccttgtccccattaactggtggcctggaacctactaccaccgtgtcggcctcttgttcacagcggctggaccatatgaagtccctcgacagcctgcccaccagtcagtcttattgccctcccacatactctacgaccggatattccatggatcctgtaactggttatcaatacggtcagtatggacagagcgccttccattatttgaaacccgatattgcttggttccaaattttgctgaatacctttgacaaatcaagcggtgaggaggaggacctggagcagtag

SEQ ID NO: 233874 - DNA, 1455 bp, synthetic construct
  misc_feature 1..1455: note = Description of Artificial Sequence: Synthetic coding sequence
  source 1..1455: mol_type = other DNA
atgactaccctcgccggagccgtccctcggatgatgcggcctgggccagggcaaaactatccgcgtagtggattccctttggaggtgtctactccactcgggcaaggtcgggtgaaccagctgggaggggtgttcatcaacggcaggcccttaccgaatcatattcggcacaaaatcgttgagatggcccaccatggcattagaccttgcgtgatcagccgccagttgcgcgtgtcccacggttgtgtgtccaagatcctctgccgataccaggagaccgggtccattcggccaggcgctattggtggctctaagccaaagcaggttactactccagacgttgagaagaaaatcgaagaatacaagcgggagaatcctggcatgttcagctgggagattcgggacaagctgctaaaggatgcagtatgcgacaggaataccgtaccctcagtgagcagtatctcccgaattctgaggtcaaagttcggcaaaggggaggaggaggaagccgacttggaaaggaaggaagcagaggagagcgagaagaaagcaaagcacagcatcgacggtattctcagcgagagagccagtgccccacagagcgatgagggctctgatattgatagtgagcctgacctaccactgaagcgtaagcaacggcgatcgcgcaccactttcacagccgagcagttggaggaattggagcgagcatttgaaaggacccactaccctgatatctacactcgggaagaactggcccagcgggcaaagctcacagaagccagggtccaggtgtggttctctaatcgcagagccaggtggcgtaagcaggctggcgcaaatcaactgatggcctttaatcacttgataccagggggtttcccaccgaccgctatgcccacactgcccacgtaccagctgtcagagacctcctaccagcccactagcatcccacaggctgtttctgatccatcttccacagtgcatcgaccccagcctctaccacctagcacagtccatcaatcaacaatcccgagcaatccggatagttctagcgcctattgtctcccttccactcgccatgggttctccagctatactgatagtttcgtcccacccagtggacccagtaacccaatgaacccaaccatcggaaatgggctctccccacaggtcatgggactcctgaccaaccacggcggtgtaccccaccagccgcagactgactacgcactgtcccctctgactggaggattggaacccactactacagtgtctgccagttgtagccagcgattggatcatatgaaaagtctggactctctccctacatcgcagagctattgccccccaacgtattctacaaccgggtattctatggaccccgttaccggatatcagtacgggcagtatggccagagcgctttccattacctgaaaccagacattgcatag

SEQ ID NO: 233875 - DNA, 1452 bp, synthetic construct
  misc_feature 1..1452: note = Description of Artificial Sequence: Synthetic coding sequence
  source 1..1452: mol_type = other DNA
atgacaactctggcaggagctgttccgaggatgatgcgccctggtccaggccaaaactaccctaggagcggattcccacttgaagtctccacaccgttggggcagggcagagttaaccagctgggaggggtttttatcaatggaaggccactgccaaaccacattcgacacaagatcgtagagatggcacaccacggtatccgaccttgcgtgatcagcagacagcttagggtcagtcatgggtgcgtgagcaaaattctatgcagatatcaggaaactggctctatacggcctggggcaatcggtggctctaagcccaaggtgacaacccccgacgtggagaagaaaatcgaggagtacaaacgagagaatccgggtatgttctcctgggagatacgcgataaactgttaaaggacgctgtgtgcgacaggaatacagtacccagtgtgagcagcatctcccgcatactgaggagcaagttcggcaaaggagaggaggaggaggcagacctggaacggaaggaggctgaggagtccgaaaagaaggccaaacatagtatagatggcattctcagtgagagagcgtctgcgccacagtcagatgagggcagcgacatcgacagcgagcccgacttgcctttgaaacggaagcagcgcaggtctcgaacgactttcaccgctgagcagctggaagaacttgagagggccttcgagaggacccattaccccgatatctacacacgggaagaactcgcccagcgcgctaaactgactgaagcgagagtgcaggtctggttttctaatcggagggctcgctggcgtaagcaggcaggcgcaaaccagcttatggcgtttaatcacctcatacccggaggctttcccccaactgctatgccaaccctgcctacataccagttaagtgaaacatcgtatcagcccacctcaatcccacaggccgtctccgacccatccagcaccgtgcatcgcccacaacccctccctccaagcactgtgcatcagtccaccattcctagcaatccagattctagctctgcctactgccttcccagtacccgccacggattctcttcctataccgattcatttgtgccaccttcaggtccctccaacccaatgaatcctacaattggtaacggattgtcgcctcaggtcatgggtctgctcaccaatcatggcggtgttccacatcagcctcagaccgattacgccctctcccccctgacggggggactggaaccaaccaccactgtgtcagcctcctgcagccagcggctagatcatatgaagtcactggatagtcttcctacaagtcaatcttattgtcctccgacctactctacgaccggatacagcatggaccccgtgactggttaccagtacgggcagtatgggcagtctgctttccattacctgaagcctgacatagcgtag

SEQ ID NO: 233876 - DNA, 648 bp, synthetic construct
  misc_feature 1..648: note = Description of Artificial Sequence: Synthetic coding sequence
  source 1..648: mol_type = other DNA
atgaccacactggctggagcggtaccacgaatgatgcgtcctggccctgggcagaactaccccagatctggattcccattggaggtatccacgcctctcggacaggggcgagtaaaccagctcggtggcgtttttatcaacgggaggccgctgccaaatcacattcgccacaaaatcgtggagatggcacatcacggtatcagaccttgtgtgatctctaggcaactgagggtgtctcacgggtgcgtttccaaaatcctatgccgctaccaggaaaccggatctatccgcccaggtgctataggcggaagtaagcctaaacaagtgacaaccccagatgtggagaagaagattgaagaatataagagagagaatcccggtatgttttcctgggaaattcgggataagttgctcaaagatgccgtgtgtgaccgcaacacagttccctccgtgtcatctatcagcaggatccttcggagtaaatttggaaaaggcgaggaggaggaagccgatcttgaaaggaaggaagcggaggaatccgagaaaaaagcaaagcacagcattgacgggattttaagcgagagaggtaagaggtggaggctgggcagacggacttgctgggtgacttggagggctagtgcgtcatag

SEQ ID NO: 233877 - DNA, 822 bp, synthetic construct
  misc_feature 1..822: note = Description of Artificial Sequence: Synthetic coding sequence
  source 1..822: mol_type = other DNA
atgcatcaggacggaattagttcaatgaaccagctgggtggcctgtttgttaatggcagaccactccccctggatacccgtcagcagatcgtccggctggctgtgagcggtatgcgtccgtgcgacatctcccgcattttgaaggtgagtaatgggtgtgtgtcaaagatcctcggtcggtactatcgcactggggtgctggaacccaaaggaattggcggaagtaagccgcgtctcgccacccctccggttgttgccaggatcgcgcagctgaagggcgagtgccccgcactgttcgcctgggagatacagcgccaactgtgcgctgagggtctgtgtacccaggataaaacaccgtcggtctccagtatcaacagagtgcttcgcgcactgcaggaagatcaaggcctcccttgtaccaggctaagaagtcctgccgtattagccccagccgttctcacaccgcattcaggatccgaaacccctagggggactcatcccggaacaggccatcgcaatagaactatctttagcccatctcaggcggaagcccttgaaaaagaattccagcgaggccaataccctgacagcgtggcaagggggaagctggccaccgccacgagccttcctgaagacacggtgagagtatggttcagcaacagacgcgcaaagtggcggaggcaggaaaagctgaagtgggaaatgcagttgcccgctgtcccctggcagtgcgcacacagctcccctgcctgccctgggaccactggttctctcctgttgagtgcagtcctgggaaattctacccggaaggtcagcgaatag

SEQ ID NO: 233878 - DNA, 1032 bp, synthetic construct
  misc_feature 1..1032: note = Description of Artificial Sequence: Synthetic coding sequence
  source 1..1032: mol_type = other DNA
atgaaccagttgggcggactgttcgtaaacggtcgacccctcccgttagacactaggcagcagatcgtgaggcttgccgtgtctggcatgagaccgtgcgatattagcaggatcttgaaagtctctaatggctgcgtgtccaagatactcggccgttactatcgtaccggggtcctcgaacctaagggcataggaggatctaaaccaagactggcaaccccgcctgtggtggcaagaatcgcgcagttgaagggggagtgccctgccctcttcgcatgggagatacagagacagctctgcgcagaggggctctgcacacaggataaaactcctagcgtaagctctatcaaccgggtgctgcgagctctccaggaggatcaaggacttccctgtactcgcctgagatcccctgcagttttagcgccagctgtgctgaccccacattctggctctgagacgcctagaggcacacaccccggtacaggtcaccgtaaccggaccattttctcaccatcccaagctgaggctctggaaaaagaatttcagcgtggacagtatcccgattcagttgcaagaggaaaactggctactgctacaagcctgcccgaagatacagtgcgcgtgtggttctctaatcgacgggctaagtggcggaggcaggaaaagctaaagtgggaaatgcaactgccaggagctagccaaggtctgactgtacccagagtcgcccctggtatcatcagtgctcaacaatcccccggatccgtgccgactgctgctctccctgccctggaacccctcggaccatcctgttaccagctgtgttgggccactgctcccgagagatgcctctctgatacccccccaaaagcgtgcctgaagccttgttgggggcatctgccgccacagcccaatagtctggattccgggcttttgtgcctgccttgtccatcatctcactgccacctcgcaagtctgtctggatcccaggccctactgtggccaggctgtcctcttttgtatggcctggagtag

SEQ ID NO: 233879 - DNA, 1047 bp, synthetic construct
  misc_feature 1..1047: note = Description of Artificial Sequence: Synthetic coding sequence
  source 1..1047: mol_type = other DNA
atgcaccaggatggcatctcgtctatgaaccagttaggaggcttgtttgtgaatggacgccctctcccattggatacacggcagcagattgtgcggctggcagtgtccggtatgcgcccttgtgatatctccaggatcctcaaagtctcaaacggatgcgtttccaaaatcctcggccgatactatcgcaccggcgttctcgagcctaaggggatcggcggttccaagcccaggttagctacgcccccagtggtggcaaggattgcacagctgaaaggcgagtgccccgctttgtttgcatgggagattcagaggcagctgtgcgcagaagggctctgtactcaggacaagacccctagcgttagctcgattaacagagttctgagggctctccaggaggaccagggcctaccatgcactaggctcaggagtcctgccgtgctggcacccgcagtgcttacaccgcattccgggagcgagacacctcgaggcacacatcctggaacaggccacagaaacagaacgattttcagtccctcacaggccgaggcactggaaaaggagtttcagagaggtcagtaccccgattcggttgcccgtggaaagttggcaacagctacgtcactgccagaagataccgtgcgtgtgtggttttccaaccgacgggctaaatggcgcaggcaagagaaactgaaatgggaaatgcagttacctggggcatcccagggtctcactgttccaagagtggcccctggcattatttctgcacaacagtctcctgggtctgttccgacagcggctttacctgccttagaacctttgggcccttcgtgctatcaattgtgctgggcaactgccccagagcgctgcctgtcagacacgcctccaaaggcctgtctcaaaccttgctgggactgcggctctttcctacttcccgtaatcgcaccctcctgcgtcgacgtcgcctggccctgcttggatgcatccctggcgcaccatttgatcggcggtgccggtaaagctaccccgactcacttttcccattag

SEQ ID NO: 233880 - DNA, 1563 bp, synthetic construct
  misc_feature 1..1563: note = Description of Artificial Sequence: Synthetic coding sequence
  source 1..1563: mol_type = other DNA
atggctgcactccccggaaccgtacctcgcatgatgcggccagctcctggccagaattatccaaggacgggctttcctctggaagtgagtacacccttaggacagggccgagtaaaccagttaggcggtgtattcatcaatggaagaccactgcctaatcacatccgacataagattgtagagatggctcaccacggtattcgaccttgtgtgatctctcgccagttgagagtctcacacggatgtgtgtctaaaatcctttgtaggtaccaagagactggttctatcaggcccggagctattggtgggtctaaaccccgacaggtggccaccccagacgttgaaaaaaaaattgaggagtacaagcgagaaaatcctggcatgtttagttgggagattagagacagattactgaaggacgggcactgcgatcgaagtaccgtcccttctgggctggttagctccatcagccgtgtattgcgaatcaagttcgggaagaaagaggaagaagatgaggctgacaagaaagaggacgatggcgagaagaaagcgaagcactcaatcgatgggattctcggggacaaaggcaatcgcctggatgagggctctgatgtagaatcagaaccagatcttccattaaagagaaagcagcgacggtccagaactacatttactgcagagcaattagaagaactcgaaaaagcctttgagcgcacccactaccccgatatctacactagagaggagctggcccagcgcaccaaacttacagaagcaagagtgcaagtgtggtttagcaacaggcgggctcgctggaggaaacaggccggagctaaccagctggccgcatttaaccacttactccccggtggattccctcccacaggcatgcccactctcccaccctaccaactgcccgactccacttaccccacgacaactatcagtcaggacggcggtagtaccgtgcatcggcctcaacccctacctccttccactatgcatcaaggcggacttgctgccgcagcagctgccgctgataccagtagcgcttacggcgcaagacacagcttttcttcatacagcgatagcttcatgaatccggctgctccaagcaaccatatgaatcccgtctccaacggactgtccccccaggtgatgagcattctggggaatcctagtgccgtgccaccacaacctcaagcagatttcagcataagtcctcttcatggcggtctcgacagtgctacctcaatcagcgcgtcctgttctcagagggcggatagcattaaaccgggtgatagcctcccaactagccaggcctactgcccaccaacctactccacaaccggctattccgtcgaccccgttgctggctaccaatatggacaatacggtcaatccgaatgtcttgtcccctgggcatcacctgtgcctattccctctcccaccccgagagcctcttgcctatttatggagtcgtacaaagtagtcagcggctgggggatgagcatttcacaaatggagaaattaaagtccagccagatggagcagttcacctag

SEQ ID NO: 233881 - DNA, 1557 bp, synthetic construct
  misc_feature 1..1557: note = Description of Artificial Sequence: Synthetic coding sequence
  source 1..1557: mol_type = other DNA
atggcagccctgcctggtaccgtccctcggatgatgcggcctgcccctggccaaaactatccccgaacagggttcccactggaagtgtccacgcctttggggcaggggagagttaaccaactgggaggggtgttcattaacgggagacctctgcccaatcacattcggcacaaaattgtggaaatggcccatcacggcattcggccatgtgtgatcagccgccagttgcgagtgtctcatgggtgtgtgagcaagattctgtgtagatatcaggagactggaagcatccggcctggagccatcgggggatcaaagccacggcaagtcgctacccctgacgtggaaaagaagatcgaggaatataagagggagaatcccggtatgttctcatgggaaatccgcgatagacttctgaaagacgggcattgcgaccgatccaccgtcccttctgtgtcctctatttccagggtgctacggatcaagttcggtaagaaagaggaggaagatgaggccgacaaaaaggaagacgacggggagaagaaggccaagcattccattgatggtatacttggcgataagggtaatcgtctcgacgagggtagcgatgtggaatcggaaccggatctacctttaaaaaggaagcaacggcgaagcagaactacctttaccgccgaacaactcgaggaactggaaaaggctttcgagaggacccactaccccgatatctacacccgggaggagctggcccagcggactaagttgactgaagccagagtccaagtctggttctcaaatcgaagggcacgatggcggaagcaggctggcgctaatcagttggccgcttttaaccatttgctgccaggaggcttcccccctactgggatgccgacgcttccgccataccagctaccagactctacttaccctacaacgacaattagccaggatggcggttcaacggtccatcggcctcagccccttccaccttctacaatgcaccagggtggtctcgccgcagcggcagccgctgccgacactagctccgcttatggggcaaggcactctttctcatcttactctgatagttttatgaaccctgctgcccctagtaaccatatgaacccagttagcaatggactgtcaccacaggtgatgagtatcctgggtaatcctagcgccgtccctcctcagccacaggcggatttttccatatctcccctccatgggggtctggactccgccaccagtatctcagcaagttgtagccagagagccgatagcatcaagcctggtgattcccttccaacttcccaggcctactgcccacccacctatagcaccacgggatatagtgtggaccctgtggctggttatcagtacggccaatatggacagtcagagtgcctcgtcccgtgggcctcacctgtacctattcctagtccgactccaagggcttcttgcctgtttatggagagctataaagtggtgtccggttggggaatgtcgatctctcagatggagaagttaaaatcttcgcagatggagcagttcacatag

SEQ ID NO: 233882 - DNA, 1518 bp, synthetic construct
  misc_feature 1..1518: note = Description of Artificial Sequence: Synthetic coding sequence
  source 1..1518: mol_type = other DNA
atggctgccttgcctggaacagtgcccaggatgatgaggccagcaccgggacagaattatcccaggacgggttttcccctggaagtctccacacctctcggtcagggacgcgtaaatcaattgggtggtgtctttattaacggcaggcccttaccgaaccacattcgccacaagatcgttgaaatggcccatcacggtatccgcccatgtgtaatctcccgacaattacgggtgtctcacggttgcgtgtccaaaatcctgtgccgataccaggaaaccggtagtattagacccggagcaatagggggttccaaacctcgacaggtcgctacccccgacgttgagaagaagatcgaagagtacaagagagaaaaccccggtatgttctcatgggagatccgtgatagactcctgaaagacgggcattgtgacagatccactgtgccatctggtttagtctcatctatatctagggtgttgaggatcaagtttggaaaaaaagaagaggaggacgaggcagataagaaagaagacgacggggaaaaaaaggcaaagcactcaatcgatgggattctcggcgataagggaaacagactcgacgagggttccgatgtggagagcgagcccgacctgccactcaaaaggaagcagcgacggagccggaccacattcacagcggagcagttggaagagctcgagaaagcttttgagcggacacactaccccgatatctatactcgcgaagaactggcccagaggaccaagctgaccgaggcccgtgtgcaggtctggtttagcaaccggagagcaagatggcgcaaacaggctggcgctaaccagctggctgcttttaatcatctgttacctggcggattcccccctacagggatgcccactttacccccatatcaactgcctgactcaacttatcccacaacaaccatctctcaggacggtggaagcactgttcacagaccgcagccgcttccaccttccactatgcaccaggggggtctggccgctgcagcagccgctgcagatacgtcctctgcctatggtgcccgacattcctttagctcttacagtgattccttcatgaatccagccgcaccatccaaccacatgaatcctgtgtccaatggtctctcacctcaggtcatgagtattcttgggaatccttctgctgttcctccgcagccccaggccgattttagcattagtcctctccacggcggattggatagtgctacctctatcagtgctagctgttcccaaagggcagattcaatcaaaccaggggattccttacctacctctcaagcctactgcccccctacctacagcactacggggtattctgtcgatccggtcgctggctatcagtacggccagtatggccaaacggccgtggattacttggctaaaaatgtgagtctgtctacccaacggcgaatgaaattgggggagcactctgcggttctggggctgctgcccgttgaaaccgggcaagcgtactag

SEQ ID NO: 233883 - DNA, 1026 bp, synthetic construct
  misc_feature 1..1026: note = Description of Artificial Sequence: Synthetic coding sequence
  source 1..1026: mol_type = other DNA
atggagcctgctttcggtgaggttaatcagttgggtggcgtgtttgttaacgggcgaccactcccgaacgctatccggttacgaatcgtggaactggctcagttggggataaggccgtgcgatatcagtcgccagctgagagtgagccacggttgcgtttccaaaatactagcgagatacaatgaaactgggtcaattctgccgggtgcgattggaggatccaagcctagagtgaccacccccacagtggtcaagcacatccgaacttacaaacagagggacccaggcatcttcgcctgggaaattagagatcgtttgctagctgatggggtgtgcgataaatacaacgttcctagcgtatcgtcaataagccgaatattgcgcaataagatcggcaatctcgcccagcagggacactatgatagctataagcaacatcaacccactccacagccagctctcccctataaccacatttacagttacccctcacccattacagcagccgctgccaaagtcccaactccccctggcgtgcccgctatccctggctccgttgctatgccgaggacctggcctagctcccacagcgtgacagacattctgggcattcgctccataactgatcaggtctcagactccagcccttatcattccccgaaggttgaggagtggtcttctttggggcgaaacaacttccctgcagccgctcctcacgctgtgaacgggctggagaagggcgctcttgagcaggaggccaagtatggtcaggctcctaatggtttgccagcggtgggtagctttgtttctgccagtagcatggccccatatcctaccccagcacaggtgtctccttacatgacttatagcgccgcaccgagcggatatgtggcaggccacggttggcagcatgcgggtggtacctcccttagcccacacaactgtgatatcccagcttcactggccttcaaaggaatgcaggctgctcgcgaaggctctcattcagttactgcctcagccctctag

SEQ ID NO: 233884 - DNA, 1026 bp, synthetic construct
  misc_feature 1..1026: note = Description of Artificial Sequence: Synthetic coding sequence
  source 1..1026: mol_type = other DNA
atggagccagccttcggagaggtgaaccagttgggaggagtgttcgtaaatggaagacctctgcccaatgctatccgcctgaggatcgtggaactggcccagcttggcatccgcccttgcgacatttctagacagttgagggtcagtcacggttgtgttagtaagatccttgctagatacaacgagacgggctccatattacccggtgcaattggtggaagcaagccaagagtgacaactccaacggtcgtcaagcatatcagaacatacaagcagcgcgaccccggaatatttgcttgggaaatccgggacaggctgttggctgacggcgtttgtgacaaatacaacgtgccatcagtatcaagcatcagccgcatcctaaggaataaaatcggtaacctggcacagcagggccactatgattcgtacaagcagcatcagccaacaccacagccagccctgccatacaaccatatatacagctacccttctcctattaccgctgccgcagcaaaggttccgacacccccaggagtccccgcaattccagggagcgtcgccatgccacggacttggccctcgtcccattccgttactgacattctgggcatccgctctatcaccgaccaggtgagtgattcttcaccttaccattcacctaaagtggaggaatggtcctcactgggtagaaataatttccccgctgccgcaccccatgctgtgaacggcttagaaaagggggctctcgagcaagaggccaaatacggccaagcccctaatggcctacccgctgttggttcgttcgtgtcagcatcttcaatggctccttaccctacacccgctcaggtttcaccctatatgacttattccgccgcacctagtgggtatgtggccggacacgggtggcagcatgctggagggacttctctctctcctcataactgcgacattccggcttccctagcattcaaagggatgcaggctgctcgtgagggtagccattcggtaacagcctccgcactgtag

SEQ ID NO: 233885 - DNA, 183 bp, synthetic construct
  misc_feature 1..183: note = Description of Artificial Sequence: Synthetic coding sequence
  source 1..183: mol_type = other DNA
agcgattccagtccgtaccacagccccaaagtcgaagaatggtccagcctcgggagaaacaattttcctgcagccgctccacacgccgtgaatggcctagaaaagggcgctctggagcaggaggccaagtacggacagatccaaaacttctttttgctgatgatatctcgcctgaagttttag

SEQ ID NO: 233886 - DNA, 912 bp, synthetic construct
  misc_feature 1..912: note = Description of Artificial Sequence: Synthetic coding sequence
  source 1..912: mol_type = other DNA
atgggtcgaccgcttctgctgcctctgcttcccttactgctcccgccagcctttttacagcctagtggttctaccggaagtgggcctagttacctgtacggagtcacccagcccaaacatctgtctgcttcaatgggcggttcagtggagatccccttttctttctattacccgtgggagctcgccactgcccctgatgtgagaatttcttggcgccgtgggcactttcatcgtcagagcttttactcaacccgacctccctctatacacaaggactatgtgaaccgcctgtttttgaactggacagagggtcagaagtcagggtttttgcggatatctaatcttcagaaacaggatcagagtgtttacttctgtagggtggagctagatacacggtcaagtggcaggcaacagtggcagagcattgaagggacaaagctgagtataactcaggccgtcaccaccaccactcagcggccatcaagcatgacaactacttggcggctttcttctacgactacaaccacaggactgcgcgtcacgcagggcaaacgaagatctgattcttggcacatttctctggaaactgccgtgggggtggccgttgctgtaaccgttcttgggatcatgatcctgggactgatatgtctcctgcggtggcggcgacgcaagggtcagcagagaacaaaggcaacaactcccgctcgcgaaccattccaaaatacggaggagccctatgagaacatccggaatgaaggtcaaaataccgacccaaaacttaacccaaaggacgatgggatcgtctatgcatctcttgccttgtcgtccagcacgtccccgagagctccacccagccatcggcctctgaagtcgcctcaaaatgagaccttgtatagtgtgttgaaagcctag

SEQ ID NO: 233887 - DNA, 693 bp, synthetic construct
  misc_feature 1..693: note = Description of Artificial Sequence: Synthetic coding sequence
  source 1..693: mol_type = other DNA
atggggcgacctctattgttgcccttattgcctctcctgttgccaccagcgttcctgcagccatccggctctactggctctggtccctcctacctttatggtgttactcagccaaagcacctctctgcctccatggggggatctgtggaaatccccttttccttctactatccctgggagttagctaccgcgcctgatgtgaggatatcctggaggcggggtcactttcacaggcagagtttctattccacaaggccgccatctatccacaaagactacgttaatcgattatttcttaactggacggaggggcagaagtcaggattccttcggatttctaacctccagaaacaagatcagtctgtgtatttctgtagggttgaactggatacgcgcagttccggcaggcagcagtggcagtctattgaaggaaccaaactgtctattacccagggacaacaaaggaccaaggcaaccacccctgcccgagaaccgtttcaaaatacagaggagccttatgagaatattcgcaatgagggtcaaaataccgatcctaagcttaaccctaaagacgatggtatcgtgtacgcctcgctcgcgctgtcttcaagcactagtccaagggcaccacctagccacagacctctgaagtccccccaaaatgagacactatacagcgtactgaaggcatag

SEQ ID NO: 233888 - DNA, 528 bp, synthetic construct
  misc_feature 1..528: note = Description of Artificial Sequence: Synthetic coding sequence
  source 1..528: mol_type = other DNA
atgggcaggccattgcttcttcccttgttgccactcctcctccctcccgctttcctgcagcccagtggcagcaccgggtctggcccttcctacctgtatggtgtcacccaacctaaacacctgagcgctagcatgggaggatcagtggaaattccttttagcttttactacccgtgggagctcgctacagccccagacgtgagaatatcatggcgacggggacactttcataggcagtctttctactcaaccaggcctccttctatccacaaagactacgtgaatcgtctgttcctgaattggactgaagggcagaagtccggattcctgaggatcagcaacttgcagaaacaggaccaatcggtgtacttttgcagagtggagctggacacaaggtcatcaggtcggcagcagtggcaaagtattgagggcactaaactgtcaataacccagggaaacccctcaaaaactcagcggtcccacatgcgcatttcgggaatgaaagacaagatccagattcccagttag

SEQ ID NO: 233889 - DNA, 492 bp, synthetic construct
  misc_feature 1..492: note = Description of Artificial Sequence: Synthetic coding sequence
  source 1..492: mol_type = other DNA
atgggtcgcccactgttgcttccattgttacccctgctgctgccacctgcgttcttacagccgtctggaagcaccggatcgggaccttcatacctgtatggcgttacccagccaaaacatcttagtgcgagcatgggcggaagcgtggaaatccccttctcattctactacccctgggaactggccaccgccccagacgtgcgcatctcttggcgacggggtcactttcaccggcagtctttttattctacccgcccaccgagtatccacaaggactacgttaaccgcctttttctgaattggacagagggccagaagagcggctttttacgtatcagcaacttacagaagcaggaccaatctgtttacttttgcagagtcgaactggatacccgttccagcggcagacagcaatggcaaagcattgagggcactaagctgtccatcactcaagggcagcagaggaccaaggccaccaccccagctagatag

SEQ ID NO: 233890 - DNA, 684 bp, synthetic construct
  misc_feature 1..684: note = Description of Artificial Sequence: Synthetic coding sequence
  source 1..684: mol_type = other DNA
atgggacgccctctgcttctccccctgctgttactgctgcaaccgccagcattcctgcagcctgggggatcgactggaagcggacccagttacctttatggcgtcacacagcccaagcatctttccgcttccatgggcggatcagtagagatcccgttcagcttctactatccatgggagcttgccatcgtcccaaatgtccgaatttcttggcgacgcggtcacttccacggacagagtttttacagtactagacctccttccatccacaaagactatgttaaccgcctgtttctcaattggactgagggccaggaatcggggttccttcggatttccaatttgcggaaggaagatcagtctgtctacttttgccgagttgagctggacaccagacgttccgggcgacagcagcttcaatcaattaagggtaccaaactgactatcactcaggccgttactacaaccactacttggaggccatccagcaccactacaattgctgggctgcgggtaacagaatccaagggtcacagtgagtcctggcacctgtccctcgatactgcaattagagtggccctggcagtcgctgttctgaaaaccgtgattttggggttgctgtgcttgctcctgctgtggtggagacgtaggaaggggtctcgggctccctccagtgacttctag

SEQ ID NO: 233891 - DNA, 999 bp, synthetic construct
  misc_feature 1..999: note = Description of Artificial Sequence: Synthetic coding sequence
  source 1..999: mol_type = other DNA
atgggaagagctagctatggcggttcccctgtgggccatcagtcatcatccgaccaccctcgagctaaaacctgcaggagccccgttcgagacggtcccaggacactgtgcggcgtcccaactgtagcccttagtctgcattttctgagagaagccagctccggctcacggacctgtggccgacgaacttcactgtgcacttcagccaagagtagctggacataccggagcgcactacggcaaccactccaccgcgcaccccttttgcctggccagctttgctggtcaccccgacctttggagaagaataaagctatgggacgccctctgctcctgcccctcttgttgttattgcagccccctgcctttctgcagcccggaggcagcactggctcagggccatcttacctgtacggggtgactcagccaaaacacttgagcgcaagtatgggtggaagcgtcgagatccccttttcgttttattacccctgggaactcgccatcgtacccaatgtgagaatctcgtggcgcagaggacacttccacggccagtcattttacagcacacgacccccaagcatccacaaggattacgtaaataggttattcctgaattggactgaaggtcaggaaagtggttttttgcgaattagcaatctgaggaaagaggatcaaagcgtttacttttgccgagtggaattagatacaagacgaagtggtagacagcagctgcagagcattaagggtactaagctgacaattacacaggccgtgaccacaaccactacttggagaccatcctctaccactacaattgccggactccgcgtgacggagagcaaaggccactcagagagttggcacctctctctcgacaccgcgatacgggttgcactcgctgttgccgtattgaaaacagtaatcctgggtctcctgtgcctcttactgctgtggtggagacggcgtaagggtagcagagctcctagctctgacttctag

SEQ ID NO: 233892 - DNA, 384 bp, synthetic construct
  misc_feature 1..384: note = Description of Artificial Sequence: Synthetic coding sequence
  source 1..384: mol_type = other DNA
atggggaggcccttactcctacctctgctgctcctgttgcagccccctgccttccttcaacccggtggtagtacagggagcggccctagttacctgtatggagtgactcagcccaagcaccttagcgcttcgatgggcggttccgttgagatacctttttctttctactatccatgggaactggctatcgtcccaaacgtcaggatatcctggcgcagaggtcattttcatggccagtcattttattccacaagacccccatccattcacaaagattacgtgaatcggctgttcttgaactggacggaaggccaggaaagtggtttcctgcggatttcaaaccttaggaaggaggaccagagtgtctacttctgccgggtttag

SEQ ID NO: 233893 - DNA, 684 bp, synthetic construct
  misc_feature 1..684: note = Description of Artificial Sequence: Synthetic coding sequence
  source 1..684: mol_type = other DNA
atgggcaggccccttcttctgccactactgttactactacagcctcccgcattcctgcaaccgggaggttctacaggcagtggtccatcttacctgtatggagtcacccagcctaagcacctctctgcatccatgggtgggtctgtggagattcccttttcattttactacccctgggaattggcgattgtgcccaacgttcgaatatcttggagacgcggacatttccatggacagtctttttactcaacgaggccaccgagcattcacaaagattatgtgaaccggctgttcctgaactggactgaggggcaggaatctggctttctgcgtatttccaatctacggaaagaagaccagtcagtatacttttgcagggtggaattagacacaagacggagtgggagacagcagctgcagagcatcaaaggaaccaagctgaccattacacaggccgtgacaaccaccaccacctggcggccaagctccacaacaactatcgccggactgcgagtgaccgagagcaagggacacagtgagtcatggcacctttccttggatacggccatcagggtcgccctggcagtcgctgttctgaagactgtgattctgggcttattgtgtttattactgttgtggtggagacgacgtaagggatctcgcgctccttcctctgacttctag

SEQ ID NO: 233894 - DNA, 384 bp, synthetic construct
  misc_feature 1..384: note = Description of Artificial Sequence: Synthetic coding sequence
  source 1..384: mol_type = other DNA
atgggcaggccccttctgctccctctgctcttattgctccaaccacctgccttcctgcagccagggggaagcaccggatctggtccatcctacctttatggagtgacacagcctaaacaccttagcgcttccatgggaggtagtgttgaaatccctttctccttctattatccgtgggagctcgccattgtgcccaacgtgaggatcagctggcggaggggacattttcacggacaatctttctactccacaagacctccttccatccacaaagattacgtcaatagactgttcttaaactggactgaaggacaggagtctggctttctacgaattagcaacttacgtaaggaagaccagagtgtgtacttttgtagagtctag

SEQ ID NO: 233895 - DNA, 183 bp, synthetic construct
  misc_feature 1..183: note = Description of Artificial Sequence: Synthetic coding sequence
  source 1..183: mol_type = other DNA
atgggacgacctctcctcttgcccctgctgcttctgctgcagccacctgcctttttgcaaccgggtttatgtgagcctgcgctttccgaactcgaccggggtagcggcgaacgattaccccaagatctaaaaccggctgaaggtgggcctgtttgcgtgtttctgccgtcccgtgcaggctag

SEQ ID NO: 233896 - DNA, 366 bp, synthetic construct
  misc_feature 1..366: note = Description of Artificial Sequence: Synthetic coding sequence
  source 1..366: mol_type = other DNA
atgggtcggccacttctgcttccacttctcctcctccttcagcccccagcatttctgcaacccggaggttccactggctctggtccttcatacctgtacggggtcacgcagcccaagcacctttctgctagcatgggaggatctgtcgagattcctttctcattctattatccctgggagttagccatagtgccaaatgtgcgaatctcctggcggagaggccattttcatggacaatccttctactctaccagacccccttcaattcacaaagactacgtcaataggttgttccttaattggacggaggggcaagagtctggattcttacgaattagtaaccttagaaaagaagaccagagctag

SEQ ID NO: 233897 - DNA, 384 bp, synthetic construct
  misc_feature 1..384: note = Description of Artificial Sequence: Synthetic coding sequence
  source 1..384: mol_type = other DNA
atgggtcgaccactgcttctgccgttgttactactcttacagcccccagctttcctgcagccaggcggatcaacagggagcggcccttcatatctctacggagtcactcagcccaaacacctttccgcttctatgggcggaagcgtggagattccattcagcttctattatccgtgggagctagctatagtacccaatgtgcggatcagctggcggcgagggcacttccacgggcagtctttttatagtacacgtcccccttccatccacaaggactatgttaaccgcctgtttctcaactggactgaaggccaggaatccggctttttgcgtatcagcaacttgaggaaagaggatcagtctgtgtacttctgtcgcgtgtag

SEQ ID NO: 233898 - DNA, 684 bp, synthetic construct
  misc_feature 1..684: note = Description of Artificial Sequence: Synthetic coding sequence
  source 1..684: mol_type = other DNA
atgggacgtccacttttgctgcctctgctcttgctgctgcagccgccagcctttcttcaaccaggaggatccactggctctggcccaagctatctatatggagtcacgcagcccaagcatctgagcgcatccatgggtggttccgtagagatccccttttcattttactatccttgggagctggctatcgtgccaaatgtgcgaatttcgtggcgcagggggcactttcatggccagtccttttattccacacgcccaccgtctatacacaaggactatgtaaatagactgttcttgaactggaccgagggccaggagtccgggttcctccggatcagtaacctaaggaaagaagaccagtccgtctacttttgccgagtggagctagacacaagaaggagtggacggcaacaactgcaatcgattaagggaacaaagttaactatcacacaggcggtgactaccaccaccacctggaggcccagctcaacgactaccatcgcaggcctgagggttactgagagcaaaggccattcagagagttggcacctctcattggatactgccatcagggttgctctggccgtggccgtgctgaagaccgtgatcctcggcctcttgtgcttgctactgctttggtggcgcaggaggaagggttcacgcgctccttcatctgacttctag

SEQ ID NO: 233899 - DNA, 450 bp, synthetic construct
  misc_feature 1..450: note = Description of Artificial Sequence: Synthetic coding sequence
  source 1..450: mol_type = other DNA
atgggtcggcctctgctgctacctttgctcctcctattacaaccccctgcttttctgcagccaggactctgcgagcctgccttgtcagagcttgatcgagggtccggcgagaggcttccccaggacctgaagccggcagagggagggccagtgtgcgtgttcttgccttcacgagccggtcatcccgagatccgagaggcagccgtggcggttcatcagggtgatcagacacatcatcatcctggctgtcacaatcaccaccacttggaagctcagcaacacaaccaccattcccgtccccaaggacatagaaaacagagagctttaaggattatggcccctaagagtgggcattgtcaccagggctgcattgggtgcagatgcgcgcagaactgccacttcggcacagccgttccccctcctcctgtcgtagaagaaaaggagcggtag

SEQ ID NO: 233900 - DNA, 816 bp, synthetic construct
  misc_feature 1..816: note = Description of Artificial Sequence: Synthetic coding sequence
  source 1..816: mol_type = other DNA
atgggacgggcttcttacggtgggtctcctgtggggcaccagtcgtcatcagaccatcccagagccaagacctgtcgaagccccgtaagggacggacccagaaccctctgtggggttccgacggttgcgttatcgctgcactttttgcgcgaggcttcttcagggtcccgtacctgtggcaggcgcaccagcttatgcacctcagcaaagagttcttggacatacaggtccgggcgtctgagctggcagtcaatcaaaggaactcatcttaccatcacccaggcgcttagacaaccactgcacagagccccactgctccctggccaactgtgctggtctccgaggcctctcgagaagaacaaggcaatggggagaccactgttgcttccgctgttactgttactccaaccaccggcttttctgcaacctggcctgtgtgaacccgcattgtcagaactggataggggttcgggtgagaggctcccccaagatctgaaacccgctgaaggcggtcctgtgtgtgttttcctaccctcccgggctggacatcctgagatcagggaagccgcagtcgctgtgcatcagggggaccagactcaccatcacccaggctgtcacaatcaccatcatctcgaggcgcagcaacacaaccaccattctagaccccagggtcaccggaagcagagagccctgcggattatggctcccaaaagcggccattgccatcaagggtgcatagggtgtcggtgcgctcaaaactgccactttggcactgccgtaccccctcctccagttgtagaggaaaaagaaagatag

SEQ ID NO: 233901 - DNA, 684 bp, synthetic construct
  misc_feature 1..684: note = Description of Artificial Sequence: Synthetic coding sequence
  source 1..684: mol_type = other DNA
atgggaaggccactgcttttgcccttactcctgctgctccagccccctgccttcctccagcctgggggatccaccggatcaggcccttcctacctctacggcgtgacccagcctaaacatctgtcagcctcaatgggcggatccgtggagattcccttctcattttattacccgtgggagttggccatcgtgcccaacgtgcgtatttcctggagaagggggcatttccacggacagagcttttactctacacggcctccatccattcacaaagactatgtgaaccgcttgtttcttaactggactgagggccaggagtctggcttccttaggattagtaacttacgaaaggaggaccagagtgtctatttctgcagagtcgagttggatactcggagatccggtcgccagcagctgcagtctatcaaaggaactaagctgaccatcacccaagctgtcacaaccaccactacctggcgacccagctctacaacaacaattgccggtctgcgagtgacggagtcaaaaggtcactcagagtcatggcacctatctctggatacagctatccgggtggcgttggccgtggctgtgttgaaaaccgtgatactgggcctgctttgcctactgctgctgtggtggcggagacgaaaaggctctcgggctcctagctccgacttctag

SEQ ID NO: 233902 - DNA, 327 bp, synthetic construct
  misc_feature 1..327: note = Description of Artificial Sequence: Synthetic coding sequence
  source 1..327: mol_type = other DNA
atgggaagagcttcatatggagggtccccggtgggccaccaatctagtagtgatcatcctcgagctaagacctgcaggagccccgtgagggatggacccagaaccctgtgtggagtaccaacggttgcgctctccttgcacttcttgagggaggcaagctccgggtcccgaacatgtgggagacgcaccagcctgtgtacttccgcaaagtccagctggacatacaggagcggacggttgtcttggcagagcatcaagggaactcacctcacgatcacacaagccctccggcagcctcttcaccgggctcctctacttcctggatag

SEQ ID NO: 233903 - DNA, 384 bp, synthetic construct
  misc_feature 1..384: note = Description of Artificial Sequence: Synthetic coding sequence
  source 1..384: mol_type = other DNA
atgggtcggccactgttgctccccctgctcctgttactccagccacccgcttttttgcagcccggtggatctacaggctcaggcccatcctacttgtatggcgtgacccagcccaaacatttgagtgcgtctatgggcggttctgtggagattccattcagtttctactatccgtgggagctggcaattgtgccaaatgtcaggattagctggcgaaggggccactttcacggccagagcttttactctacgcggccaccctcaatacataaagattatgtcaatcgtctctttctgaattggacagagggacaggaaagtgggttccttcggatttctaacctaaggaaagaggatcagtctgtatacttttgtagagtttag

SEQ ID NO: 233904 - DNA, 738 bp, synthetic construct
  misc_feature 1..738: note = Description of Artificial Sequence: Synthetic coding sequence
  source 1..738: mol_type = other DNA
atgacctcgtcatatggccatgtattagaacgccagccagccctagggggtcgtctcgactccccaggcaacttagacacactgcaggctaaaaaaaatttctccgtttcacacttacttgacctagaagaagctggtgacatggtcgccgctcaggccgacgagaatgtcggagaggccggacgctccctgctcgaatctcctgggcttacatccggatcggatactcctcagcaggacaatgaccagcttaatagtgaggagaaaaagaaaaggaaacaaaggaggaataggacaacgtttaatagcagtcagctgcaagccctcgaaagagtgttcgagcgcacccattatcccgacgcctttgtccgggaggacctggctcggcgtgtgaaccttacagaggctcgcgttcaagtatggttccagaatcgacgcgctaagttccgacggaacgagagggcaatgctcgccaacaagaacgccagcttgctcaagtcatactcaggcgatgtaacagccgttgaacaacctattgtacctagacccgcaccaaggccaactgattaccttagctgggggactgcatctccttactcagctatggccacatacagcgcaacatgtgcgaacaatagccccgctcagggcatcaatatggctaatagtatcgccaacctgcggctgaaggctaaagaatactctctgcagagaaaccaagtgcctactgtgaattag

SEQ ID NO: 233905 - DNA, 654 bp, synthetic construct
  misc_feature 1..654: note = Description of Artificial Sequence: Synthetic coding sequence
  source 1..654: mol_type = other DNA
atgactagcagctatggacatgtgctcgaaagacagcccgcattagggggacggctcgacagtcccggaaatcttgacacactgcaagccaaaaagaacttttccgtcagccacctcctcgatctggaggaagccggtgacatggtcgcagcccaggccgatgaaaacgttggggaagctggccgatccctcctcgagagtcccggtctgacctccggatcagacacccctcaacaagataatgatcaactgaacagcgaggagaagaagaagcgcaagcagcgaagaaatcggactactttcaacagctctcagctgcaagccctcgagcgcgtctttgagcgcacacactatccagatgcttttgtccgggaagatctcgctcggagggtgaacctaacggaggcaagggttcaggtgtggttccagaaccgcagagccaagttccggcgtaacgaacgcgcaatgttggcaaacaagaacgcctctttgctcaaaagctatagtggcgatgtgactgccgtggaacagcctatcgttccgagacctgccccacggccaacagactatctcagctggggcacagcttcaccctatagaagtagcagcctaccaagatgttgtttacatgaaggactacacaacgggttttag

SEQ ID NO: 233906 - DNA, 762 bp, synthetic construct
  misc_feature 1..762: note = Description of Artificial Sequence: Synthetic coding sequence
  source 1..762: mol_type = other DNA
atggacagcgctgccgctgcttttgcccttgataagccagccctcggccctggaccaccaccaccaccacccgctctcggacccggagactgcgcccaggctaggaagaatttttccgtatcccatctattggatcttgaggaagtggctgctgccggacgcctggcagcgaggcctggcgcacgcgcagaggccagggaaggagccgctagagagccatctggcggatcttctggctcggaagccgctcctcaggacggtgaatgcccatctcccggaaggggctccgccgcaaagagaaagaagaagcagcgaaggaacaggaccacattcaacagctcccaactgcaagcgttggagcgggtcttcgagcggacacactatcccgatgccttcgttcgagaagagctggcaagaagagtgaatctgtccgaggccagggtgcaggtgtggtttcaaaacagacgggcaaaattcagaagaaatgaacgagcaatgctggccagtaggagtgctagccttttgaagtcatactcgcaggaagcagccatagagcaaccagtggcccctcgcccaactgcgctcagtcctgattacctaagctggaccgctagctccccatactccacggtgcccccttacagcccaggaagtagtggccctgccactccaggagtgaacatggcgaatagtattgcttccctgagactgaaggccaaggagttttccttacaccacagccaagtgcctaccgtgaactag

SEQ ID NO: 233907 - DNA, 855 bp, synthetic construct
  misc_feature 1..855: note = Description of Artificial Sequence: Synthetic coding sequence
  source 1..855: mol_type = other DNA
atggactacagctaccttaattcatatgacagttgcgtagcagcgatggaagccagtgcatatggggattttggggcatgcagccagcccggaggttttcagtattccccactcaggcctgcctttcccgctgcagggcctccttgtcctgcccttgggtcctcgaattgcgccctgggagctctaagggatcaccagccggcaccctattctgccgttccttacaaatttttcccagagccgtcaggcttacacgaaaagcgaaagcaaagacgtatacggacaacttttacgtcagctcagttaaaagaactggagcgggtgtttgccgaaacccactaccctgacatctatacccgagaagagctggcgcttaaaatcgacctgacagaggcgcgagtacaagtgtggttccagaataggcgcgcaaagtttagaaagcaagaaagagccgcttctgccaagggggctgccggagcggctggtgcgaagaagggcgaggctcggtgcagctccgaggatgacgactccaaggagtcaacctgctccccaactcctgacagcacagcaagcctaccccctccaccagcacccggactggccagccctaggctgtctccctcacccctgccagtcgccctcggatcgggcccagggccaggcccagggccacagccactgaaaggggcactctgggcaggagtggctggcggtggaggcggtgggccaggagctggagcagccgagttgctgaaggcttggcagcccgctgaatccggcccaggcccattttccggggtgctgagttcttttcatcggaagcctggcccagcccttaagacaaacctcttttag

SEQ ID NO: 233908 - DNA, 1800 bp, synthetic construct
  misc_feature 1..1800: note = Description of Artificial Sequence: Synthetic coding sequence
  source 1..1800: mol_type = other DNA
atgaaactgttaaaactgacgggttttatcttctttctcttcttccttactgagtctctgacactcccaactcagcctcgggacatcgagaacttcaattcaactcagaaattcattgaggataatatcgagtacatcactattatagcctttgcacagtatgtccaggaggccactttcgaggagatggaaaagctggtcaaggacatggtggaatataaggatcgatgcatggctgacaagacccttcccgaatgctcgaaactacccaataacgtcctgcaagaaaagatttgcgccatggagggtcttcctcagaaacataatttctcgcattgctgttccaaagttgatgcccagcggagattgtgctttttttacaacaaaaagtccgacgtcggattcctgccccctttccctaccctggaccccgaagagaaatgtcaggcatatgagtcaaacagagagtcccttctgaatcacttcctgtacgaggtggcgagacgcaatcctttcgtttttgcacccaccctcctaaccgtagccgttcactttgaggaggttgccaaaagttgctgtgaggaacaaaataaagtaaactgcctccagacacgggctatcccagtcacgcagtacttgaaagccttttccagctatcagaaacacgtgtgtggggcactcttgaaattcggaacaaaagtggttcattttatttatatcgctattctgagccagaagttcccaaaaatcgagttcaaagaattgatttcactggtggaggacgtgtcaagcaattacgacggctgctgtgagggggatgtcgtgcagtgcatccgtgacaccagcaaggtgatgaaccacatctgcagtaagcaggactccatttcgtccaagatcaaagaatgctgcgagaagaaaattcccgaaagggggcaatgtattatcaactctaacaaagatgatcgcccaaaagacctgtcgttgagagaaggcaagttcactgatagtgaaaacgtgtgtcaggaacgggacgccgaccccgacactttttttgccaaattcacattcgagtattctcgacggcacccagacctcagtatccctgagttgctaagaattgtccaaatctataaagatctgctacggaattgctgcaatacagagaatcctcctggatgctacaggtacgctgaggataaattcaatgagacaactgagaagagcttaaaaatggtacaacaagaatgcaagcacttccaaaacctgggcaaggacggtctgaagtaccactatctcattcgactcacgaagatcgccccacaactctcaaccgaggagctcgtgtcattgggtgagaagatggttacagctttcaccacttgctgcactctatctgaggagttcgcctgcgttgacaacctagcggacctggtcttcggcgagctctgcggggtgaatgagaatagaacgatcaatcccgctgtggaccattgttgcaaaaccaattttgcctttcgcaggccatgctttgagtccctgaaggccgacaagacgtatgttcctcccccatttagtcaggatttattcacattccatgctgacatgtgccagagccagaacgaggagctgcaaagaaagactgaccgcttccttgtcaatctggtcaaactcaagcacgagctcaccgatgaggagctgcagtctctcttcaccaattttgcaaatgttgtggataaatgctgcaaagcggaaagccctgaggtctgctttaacgaggaaagccccaagatcggcaactag

SEQ ID NO: 233909 - DNA, 945 bp, synthetic construct
  misc_feature 1..945: note = Description of Artificial Sequence: Synthetic coding sequence
  source 1..945: mol_type = other DNA
atggatgctttcaaggggggaatgtccctggaacgtctccccgaaggcctccgccctcccccaccgccacctcacgatatgggtcccgcttttcacttggctcgaccagccgatccaagagagcccttggagaacagcgcctcagaatcctcagacacagaactgcccgagaaagaacgcggaggcgaaccgaagggcccagaagactctggcgcaggcggaacaggatgcgggggagctgacgaccctgcaaaaaaaaagaagcagcgcaggcagagaacacactttaccagccagcagttgcaggaactcgaggccacctttcagcgcaatcggtacccagacatgagcatgcgcgaggaaattgctgtttggactaacctcaccgagcccagagtgcgcgtttggttcaagaaccgcagagccaagtggcgcaaacgcgagcggaaccaacagttggatttgtgtaagggtggctacgtaccgcagttttccggtcttgtgcagccctacgaggatgtttacgcagccggttactcttataataactgggccgctaaatctttggctccggcacctcttagcactaaaagtttcactttcttcaattctatgtcaccactgtcatctcagagcatgttctccgctcccagcagtatatcttcgatgaccatgccatcaagcatgggcccaggtgctgtccccggtatgcccaacagtggattgaataatatcaacaacctgacaggtagctcgttgaattctgccatgtcccctggtgcgtgcccttatggaactcccgcttccccatattccgtctacagggacacctgtaattcttccttggcttcccttcgactgaaaagcaaacaacactcaagttttggctacggtggtttgcaagggcctgccagtgggctcaacgcgtgccagtacaattcatag

SEQ ID NO: 233910 - DNA, 345 bp, synthetic construct
  misc_feature 1..345: note = Description of Artificial Sequence: Synthetic coding sequence
  source 1..345: mol_type = other DNA
atggacgcttttaagggcggaatgagtctcgaaagactccccgagggactacgcccaccgccacctccccctcatgatatgggaccagcattccatctggcaagaccagccgaccctagagagccgctggaaaattccgcgagtgagagttcagatacagaactgcctgagaaagagcgtgggggagagccgaaggggccagaggacagcggggctggaggtaccggatgcgggggtgccgacgaccctgccaaaaagaagaagcaacgccgacaaaggacccacttcacctcacagcaactccaagaattagaggcaactttccagcgaaatcgatatccctag

SEQ ID NO: 233911 - DNA, 945 bp, synthetic construct
  misc_feature 1..945: note = Description of Artificial Sequence: Synthetic coding sequence
  source 1..945: mol_type = other DNA
atggacgccttcaaaggcggtatgtctttagagaggttgccagagggccttcggcctccgccacccccaccacacgatatgggccctgcatttcatcttgcccgtccagccgatcccagagagccactggagaactctgcgagcgaatcaagtgacactgagctcccggagaaagagcgtggtggggaaccgaagggtcccgaagattctggagctggtggcaccggctgcggcggtgcagacgatcccgcaaagaaaaaaaaacagagaagacagcgaacccatttcacttctcagcaactccaggaacttgaggcaacttttcaacgcaatcgctatcctgacatgtctatgagagaggagatcgcagtctggaccaacctcacggagccacgtgtaagggtatggttcaagaacaggcgggctaaatggcggaagcgggagagaaatcagcagctggacctgtgtaaggggggatacgtgcctcaattcagcgggctagttcaaccctacgaggatgtgtacgccgcaggttactcatacaacaactgggctgcaaagtctctggccccagcccctctgtccaccaaaagctttaccttctttaattcaatgtctcctttgagttctcagagcatgttctcagccccttccagcatctccagtatgaccatgcctagcagtatggggccaggtgctgtgcctggaatgcctaacagcggtttaaacaacatcaataatcttacaggttcatccttgaacagtgctatgagtcccggagcctgtccgtacggcacaccagcctccccatactctgtttatagggatacatgcaacagctcattggcctcgctgaggctcaaaagtaaacaacacagcagttttggatatggcggactgcagggaccagcttctgggctgaatgcctgtcagtacaactcatag

SEQ ID NO: 233912 - DNA, 396 bp, synthetic construct
  misc_feature 1..396: note = Description of Artificial Sequence: Synthetic coding sequence
  source 1..396: mol_type = other DNA
atggacgctttcaaagggggaatgtcattagagaggctgcccgaagggctgcgcccacctccacctcccccacatgatatgggtccagcttttcatctcgcccgacccgctgacccacgcgagcccttagagaattcagctagtgagtcgtccgataccgagctacccgagaaggaaagaggtggcgaacctaagggccctgaagattcaggggcagggggaacgggatgtggcggagccgacgatcccgcaaagaagaaaaaacagcgcagacagcggacacacttcacttcccagcagctccaggagctggaagccactttccagcgcaatcgttatcctgatatgtcaatgagggaggagattgcagtttggaccaacctcaccgagccctag

SEQ ID NO: 233913 - DNA, 975 bp, synthetic construct
  misc_feature 1..975: note = Description of Artificial Sequence: Synthetic coding sequence
  source 1..975: mol_type = other DNA
atgaactgcatgaaagggcctctgcacttggaacaccgcgctgctggcaccaaactctctgctgtgtccagctcttcatgccaccacccacaaccactggcgatggcatccgtcctggcccctggccaacctcggagtctggactcttctaagcatcgcttggaggtacatacaatttcggacacaagctccccagaggccgctgagaaggataagtctcagcagggaaaaaatgaagatgtcggggctgaagacccatccaaaaaaaaaagacagcggagacaaaggactcattttacatctcagcaactgcaggaactcgaggccactttccaacggaacaggtatcctgatatgtcgaccagagaagaaatagccgtgtggactaacctgaccgaggcccgagtgcgagtctggtttaagaataggcgggctaagtggaggaagagggagcgcaatcaacaggccgagctgtgtaagaacggctttggtccccaattcaatgggttaatgcaaccgtatgacgatatgtacccaggatacagctataacaactgggcggcaaaaggcctgacgagtgcttcactgtcaacaaagagtttcccttttttcaattctatgaatgtgaatccgttaagctcacagagtatgtttagtcctccaaacagtatttcctctatgagcatgtcaagctccatggtgccatcagccgtgaccggagtacccggtagcagccttaacagtctgaacaatctcaataacctgtctagcccttctcttaacagtgccgtacctacgcctgcctgcccttacgcgccacctacacctccctacgtgtaccgggatacctgcaattctagtctggctagcctgagactgaaggctaaacagcactcctcatttggctacgcatcagttcaaaaccctgcgagtaacctctcagcctgccagtatgctgtggaccgccctgtttag

SEQ ID NO: 233914 - DNA, 954 bp, synthetic construct
  misc_feature 1..954: note = Description of Artificial Sequence: Synthetic coding sequence
  source 1..954: mol_type = other DNA
atggagacgaattgtagaaagttagttagtgcatgtgtccagttgggcgtccagccagctgctgtggagtgtctgttttctaaagattccgagatcaagaaagtcgagttcactgatagtcctgagagtaggaaagaagctgcctccagcaaattcttcccccgtcagcatccaggggcaaacgagaaagacaagagtcagcaggggaaaaatgaggacgtgggcgcagaagatcccagcaagaagaagagacagaggaggcagcggacccattttactagccaacagttgcaagagctggaggcaacttttcagcggaatcggtatccggacatgagtacaagagaggaaattgctgtatggacgaacttgacggaggccagagtcagagtgtggttcaaaaatagacgcgctaaatggcggaaacgtgaacggaaccagcaggccgagttgtgcaagaatggcttcggcccacagtttaatggcctgatgcaaccatatgatgacatgtatcccggatatagttacaacaactgggctgcaaagggtctgacatcagcatccttgtcaaccaaaagctttcctttctttaactctatgaacgtaaatcccctatcttcccagtctatgttttcgccacccaactccatctcttctatgtcaatgagctcgagcatggtcccgtccgccgtgacaggcgtgcctggttctagcctcaactcccttaataacctgaataacctctccagcccttccctcaactccgcagtcccaactcctgcctgcccatatgcaccccctaccccaccgtacgtttacagagatacctgtaactcctcgttggcctccctgagacttaaggctaaacaacattcctcatttgggtacgcttcagtgcagaatcctgcgtctaacctcagcgcttgccagtacgccgtcgatcggcctgtatag

SEQ ID NO: 233915 - DNA, 816 bp, synthetic construct
  misc_feature 1..816: note = Description of Artificial Sequence: Synthetic coding sequence
  source 1..816: mol_type = other DNA
atggagaccaattgtagaaagctcgtcagcgcatgtgtacagctggaaaaagacaagtcgcagcaagggaagaacgaagatgtgggcgctgaggacccctctaagaaaaagaggcagcgcaggcagagaacacacttcacaagccagcaactgcaggagttggaggccacatttcaacgcaaccgctacccagacatgagcacgcgggaagagattgcagtgtggaccaatttgacagaggctcgagtaagggtgtggtttaagaatcggagagcgaagtggcgaaagcgggaacgcaatcagcaagcagaactctgcaagaacggattcggaccacagttcaacgggcttatgcagccttacgacgacatgtatcccggttactcatataacaattgggccgcaaagggattgacaagtgcgtctctgtctactaagtcattccccttcttcaactctatgaacgtaaatccgctcagctctcagtctatgtttagcccgccaaatagtatctcctccatgtctatgtcgtcctctatggtgccatccgcagtaacgggagtgccaggaagcagcttaaattcactgaataaccttaataacctgagctccccgagcctcaactccgccgttccgacgcccgcttgtccatatgctccccctaccccaccttatgtttacagagacacatgcaactccagcttggctagtctcagacttaaagctaagcagcactctagttttgggtacgcctcagtgcaaaaccccgcaagtaaccttagcgcatgccagtacgcggtcgacaggcccgtatag

SEQ ID NO: 233916 - DNA, 954 bp, synthetic construct
  misc_feature 1..954: note = Description of Artificial Sequence: Synthetic coding sequence
  source 1..954: mol_type = other DNA
atggaaaccaattgcaggaaattggtcagtgcttgtgtacaattgggagtgcagccggcagcggtcgaatgtttgttctcaaaagattccgaaataaagaaggtcgagtttacggactcgcccgagagccgcaaagaagccgcatcctccaaatttttcccacgacagcaccccggagctaatgagaaagataaaagtcaacagggtaaaaacgaggacgttggggcagaagatccctctaagaagaagcgtcagcgcagacagcgtacccatttcacttcacaacaactgcaggaactcgaagcaacctttcagaggaatcgataccccgacatgagtacgagggaggagatagccgtgtggaccaacctgacagaggcccgagtacgggtctggttcaaaaaccgcagggccaagtggagaaagcgcgaaaggaatcaacaagctgaattgtgtaagaacggttttggtcctcagttcaatggactgatgcagccctacgatgacatgtaccctgggtactcttacaacaactgggccgctaagggcctgacctccgcgagcctatctactaagagtttccccttcttcaatagcatgaatgtaaatcctctcagctcccaatccatgttttcgcctccaaactctatcagctctatgtcaatgagttcgtccatggtgcccagcgctgtgaccggagttcctggaagttctctgaattctctcaataatctaaacaacttgtctagccccagcttaaactctgctgtgcctacaccagcctgtccatatgcccctcccaccccaccatacgtctacagagacacatgcaattcttctctggcatcccttcgcctcaaggcaaaacagcacagctcttttggatatgcttccgtccagaatccggcttctaatttgagtgcctgccagtacgcagtcgacaggcccgtgtag

SEQ ID NO: 233917 - DNA, 873 bp, synthetic construct
  misc_feature 1..873: note = Description of Artificial Sequence: Synthetic coding sequence
  source 1..873: mol_type = other DNA
atggaaacaaattgtcggaagctggtttccgcttgcgtacaactcggggttcagccagccgcagtcgagtgtctcttcagcaaggactccgaaatcaagaaagtcgagttcacggactcccctgaatctaggaaagaagccgctagctctaagttctttcctcgccaacaccccggtgccaatgaaaaagacaaaagccagcaggggaaaaacgaggacgttggcgctgaagatccatccaagaagaaaaggcagaggcggcagcggactcactttacaagccagcagttgcaggaactcgaggcaactttccagaggaacaggtatccagacatgagcacacgggaggagattgccgtctggacgaatcttactgaggccagagttagagtttggttcaaaaaccggcgtgccaaatggagaaaaagggagcgcaaccagcaggctgagctgtgtaaaaacgggtttggccctcagttcaatggactgatgcagccatatgatgacatgtacccagggtattcttataataactgggcggcaaaggggctgacctccgcctccttgtccactaagtccttcccttttttcaactctatgaatgtcaacccgctgtctagccagagcatgttcagcccgccaaactccatatcgagcatgtctatgtcctcttccatggttcctagcgccgttacaggcgtccccggatcgagcctgaactccctcaataaccttaacaatctgagttctcccagccttaactccgcagtgccaacacccgcatgcccatacgccccacctaccccaccttatgtgtatagagatacttgcaatagctcactggcttcccttcggctcaaggccaaacaatag

SEQ ID NO: 233918 - DNA, 357 bp, synthetic construct
  misc_feature 1..357: note = Description of Artificial Sequence: Synthetic coding sequence
  source 1..357: mol_type = other DNA
atggagaccaattgtcgaaagctggttagcgcgtgcgtccagctggagaaggataagtcccagcagggcaaaaatgaggatgtgggtgctgaggacccctctaagaaaaagcgccagcggagacaaaggacccattttacctctcagcagttgcaagagttggaagctactttccagcggaaccgttatcccgatatgtccacccgcgaggaaatcgctgtgtggaccaacctgaccgaagcaagagtcagggtctggttcaaaaacagaagggccaagtggagaaaacgcgaaagaaatcagcaggccgagttgtgtaaaaatggctttggccctcaattcaacgggttgatgtag

SEQ ID NO: 233919 - DNA, 909 bp, synthetic construct
  misc_feature 1..909: note = Description of Artificial Sequence: Synthetic coding sequence
  source 1..909: mol_type = other DNA
atggagtttgggctacttagcgaggcggaagctcgttctccagcgctatcgctgtctgatgccggtactcctcacccgcagctccctgagcacggttgcaagggtcaggaacatagcgattccgagaaagccagcgcaagccttccaggcggatctcctgaagatggaagtctcaaaaagaagcagcggaggcaacgcacacattttacaagccaacagctgcaggagcttgaggcgactttccagaggaaccggtatcctgacatgtccactagggaggagattgcagtctggacaaatctgaccgaggcccgtgtgcgggtgtggttcaagaacaggcgcgctaaatggcgcaaacgcgagagatcgcagcaggccgaactgtgtaaggggtccttcgcagcccctctcggaggtttggtacccccatacgaggaagtttacccagggtacagctacgggaactggccacctaaggccctggcaccacccctcgctgcgaaaacttttccgttcgcttttaactcagtcaatgttggacccttggcttctcagccagtcttcagcccaccttcctctatcgcggcaagcatggtacctagtgcggctgcggcaccagggaccgtaccaggtcccggtgcgctgcaggggcttgggggtggcccaccaggtctcgcccctgctgcagtcagctctggagccgtgagttgtccatacgcctctgccgctgcggctgcagctgccgctgcttcgtcaccatacgtgtacagggatccttgcaattcatccctcgcatcactgagacttaaagccaagcaacacgcttccttctcgtatccagctgtgcacggtcctccccctgctgcaaacctgagcccctgccaatatgccgtagagaggcctgtctag

SEQ ID NO: 233920 - DNA, 909 bp, synthetic construct
  misc_feature 1..909: note = Description of Artificial Sequence: Synthetic coding sequence
  source 1..909: mol_type = other DNA
atggagtttggacttttatctgaagcggaggccagatcccccgctttatcactgtcagacgccggaacccctcatcctcagctacccgagcacggttgcaagggccaagagcacagcgactcagagaaagcctctgctagcttgcccggtgggagccccgaggatgggtccctaaaaaagaagcagcgacggcaacgaactcactttacttctcagcagctccaggagctcgaggctacatttcaaaggaaccgctaccccgatatgtctactcgtgaggaaattgcggtatggacaaacttgacagaggcacgggttagggtctggttcaagaaccggagagccaagtggcgcaagagggagagatcccaacaagcagagctgtgcaaaggatctttcgcagctccccttggcggtctggtgcctccctacgaggaggtgtatccaggatacagctacggaaactggccacctaaggccctcgcaccacccctcgcggcaaagaccttccccttcgcgtttaactccgtgaatgtggggcctctcgcgtctcagccggtattcagccccccatccagcattgccgcttccatggttccaagcgcagcggctgcccctggaaccgtgcctggcccaggtgcattacaaggactaggaggtggaccaccgggactggcaccagccgctgtctcctccggcgctgtgtcatgcccatacgctagtgccgctgccgctgccgcagccgctgcttcttcaccttacgtttacagagatccatgtaactccagcctggcttcgctgagactgaaagccaagcagcacgcctctttttcctatccggctgtgcatggccctccccctgcagcaaacctcagtccttgtcagtatgctgtagagagacccgtgtag

SEQ ID NO: 233921 - DNA, 1179 bp, synthetic construct
  misc_feature 1..1179: note = Description of Artificial Sequence: Synthetic coding sequence
  source 1..1179: mol_type = other DNA
atggagctcgtggccggttgttacgaacaagtgctgttcggattcgcagtgcacccagaacccgaagcatgcggcgaccacgaacaatggaccctggttgccgatttcactcatcacgcacacactgcttccctgagtgcagtagctgtgaacagtcgcttcgtagtcacgggcagcaaggatgagaccatccacatctatgacatgaagaagaagatcgagcacggggctctggtgcaccatagtgggaccatcacatgtctgaagttctacggcaataggcatctaatctcaggtgccgaggacgggttaatttgcatttgggacgcaaagaagtgggaatgcctgaagtctattaaagctcacaagggccaggtgacattcttatccatccatcccagcggcaaactggccctatcggtgggcacagataagactctgcgcacatggaatcttgtcgaaggaagatctgcctttattaagaacattaaacagaacgcacatatagtcgaatggtcacctaggggggagcagtacgtcgtcattattcagaataaaatcgacatatatcaattggatacagcctctataagtggcactatcaccaacgaaaagagaatcagcagtgttaaattcctgtcagagtccgtgctggccgtggctggcgacgaagaagtgatccggttctttgattgtgatagcctggtatgcctgtgcgaattcaaagcgcacgagaatagagtcaaggacatgttctcattcgaaatcccagagcaccacgtcatcgtgagtgcctcgtctgatggcttcattaaaatgtggaaactcaagcaggataaaaaagtgccaccctcattgctgtgtgagatcaacaccaatgccaggctgacatgcttgggagtgtggttggacaaggtggctgatatgaaggagagtctgccccctgccgctgaacccagccctgtgagcaaggagcagtcaaaaattggcaagaaagaacctggggatactgtccacaaagaagaaaagaggagcaagcctaataccaagaaacgcggtctgactggtgatagtaaaaaggctacaaaagaatccggccttatctcaactaagaagcgcaaaatggtggagatgctggagaagaaacgaaaaaaaaagaagataaagactatgcagtag

SEQ ID NO: 233922 - DNA, 3372 bp, synthetic construct
  misc_feature 1..3372: note = Description of Artificial Sequence: Synthetic coding sequence
  source 1..3372: mol_type = other DNA
atgtccggcaccagctcacacgagagtttttatgactccctgtcagacatgcaggaagagagtaagaatacagatttttttcctggactttccgcctttctctcacaggaggagatcaataagtcactggacctagctcggcgtgctattgcggactcagagacggaagactttgactcagagaaggaaatcagccagattttttcaacctcccccgcatcactctgtgagcatccctcacacaaggagactaagctgggcgagcatgccagtcgaaggcctcaagataatcgttccactccagttcagccacttgccgagaaacagactaagagcattagcagtccggtgagtaagaggaagcctgccatgagccccctgctcactaggccctcctacatacggagcctgcgcaaggccgagaaacgtggtgccaagacaccaagtaccaacgttaagccaaaaacccctcaccagcgcaaaggtggacctcagtctcagctatgtgacaaggccgctaacctgatcgaggagctcacatcaatatttaaggcagccaaacctagaaaccgctctccaaatggcgaaagctcatcaccagattctggctacctgagccccaagaatcagccaagcgctcttctctccgcctcagcatctcagtcgccaatggaagatcagggggaaatggagcgggaagtgaaatcccccggagcgaggcattgctaccaagataatcaggatttagccgtgccgcacaataggaagtcccatccacaaccgcacagtgcgttgcactttcccgcagccccacggttcatccagaagctcaggagccaggaggtcgccgaaggaagccgggtttacctagagtgtcgcgtcaccgggaatcccaccccgagagtaagatggttttgtgaaggcaaagagctccataacaccccagacatacagatccattgcgagggaggcgacctccatactctgataatcgcagaggccttcgaggacgataccgggaggtatacatgtttggctaccaaccctagcggatcggacaccactagcgccgaggtcttcatcgagggcgcttctagcactgatagcgattctgaatcccttgcatttaagtcccgggcaggcgcaatgccccaggcacaaaagaaaaccacctctgtcagtttgactataggaagcagcagtcccaagacaggcgtgaccacagcagtcatccagcctttgagtgtgcctgtgcaacaggtgcacagccccacatcatacctctgtcggcctgatggaaccacgaccgcttatttcccacccgtgtttacaaaagagctccaaaataccgccgttgcagaagggcaggtcgtagtgctcgaatgtagagttcgcggtgccccacctttgcaagtgcagtggtttcgccaaggttctgaaatacaagacagcccggatttccggattctgcaaaaaaagcccagatccaccgctgaaccagaggaaatttgtacactggtgatcgctgagaccttcccggaggacgccggaatatttacatgctccgccagaaatgactacggaagtgcaacatccacagcccaattagtggtgacctcggctaataccgagaactgctcctacgagagcatgggcgaaagcaacaacgaccactttcagcatttcccaccacctccaccaattctggaaactagctcactggaactggcctcaaaaaagccttccgagatccagcaggtgaacaaccctgagctgggtttgtcacgggctgccttacaaatgcagttcaatgcggctgaacgcgaaactaatggagtgcacccgagccggggtgtgaatggcttgataaacggcaaggccaattcgaataagagtctgccaacccccgcagtgctgctgagtcctacaaaagaacccccaccgttgcttgccaagcctaaattggggttccctaaaaaggcatctaggactgccaggatcgcaagcgacgaggagatccaggggactaaggacgccgtcatacaggaccttgaacgcaagcttcggtttaaggaagatcttctgaacaatggccagcctaggctaacttacgaggaaagaatggctaggcgtctgctgggtgcagattccgccactgtgttcaacatccaggagccggaggaggagactgcaaaccaagatatcggctctcctcacgccagtgtggggtcaccattggacggccagaaggaatacaaggtttcaagttgcgaacagaggctgatctccgaaattgagtacagactagagcggagcccagttgatgagagtggcgacgaggttcaatatggtgatgtgcctgtggagaacgggatggcacccttttttgaaatgaaactgaaacattacaaaatcttcgagggcatgccagttacatttacctgcagggtagctgggaacccgaagcccaagatttactggtttaaagatggtaaacaaatatcccctaaaagcgaccattatacgatccagcgagacctggacggaacatgctctctccacaccactgcctctactctcgatgacgacggaaattataccatcatggccgctaatcctcagggtaggatcagctgcactggacggctcatggtgcaggcggttaaccaaagaggcagatcacccaggagtccaagtggccacccacacgtccggagacccaggtccaggagcagagactccggagacgagaacgagcccatccaggagcgattctttcggccacatttccttcaggctcccggagaccttaccgtccaggagggcaaattgtgtcgtatggactgcaaggtttccggtctgccaacaccagatctttcatggcaactggacgggaaaccggttcgaccagacagcgcccacaagatgcttgtgagggaaaatggtgtgcattctttgatcatagagcccgtgacatcaagggacgccggaatatatacctgtattgccacgaatagggcaggacaaaatagtttttctctcgaactggtcgtggctgctaaggaagcccataaacctcccgtgttcatcgagaaactgcagaatacaggggtcgccgatgggtaccctgtcaggttggaatgtcgggttctcggagtccctccacctcaaatcttttggaagaaagaaaatgagagcttgacacacagtaccgacagggtctctatgcaccaagataatcacggctacatctgtttgctgatccaaggggctactaaagaagacgctggatggtataccgtgtccgccaagaatgaagcaggaattgtgtcttgcaccgcaaggctcgacgtttacatctcgcgccactag

SEQ ID NO: 233923 - DNA, 2019 bp, synthetic construct
  misc_feature 1..2019: note = Description of Artificial Sequence: Synthetic coding sequence
  source 1..2019: mol_type = other DNA
atgagcgccctcgctagtaggtccgctcctgctatgcaaagttcagggtcgttcaattatgccaggccaaagcagttcatcgctgcccagaatctgggacctgcctctggccacggcaccccagcatccagcccctctagctccagccttccttcccccatgtctcctacccctaggcagtttggcagagcccctgtgccaccatttgctcagccgtttggggctgagccggaggccccatggggaagctcaagccccagcccccctcctcctcctccgcctgttttttcacctacagcagcattcccggttcctgatgtttttccgctgccccctcctccacctcctcttccatcccccggacaggcctcacattgcagcagcccagcgacccggtttggccactcacagacccccgctgcgttcctgtcggcgctgctcccttcgcagcctcctcctgctgcagtcaatgccctggggttaccaaaaggggttacacctgcaggattcccgaaaaaggcctcccgcacggcgaggattgcctctgatgaagaaatccaggggacgaaagacgctgtcatccaggatttggaaaggaagctccggttcaaggaggatttactgaacaatggccaacccagattaacctacgaggaacggatggctcggagactgttgggagcagatagtgctactgtgtttaacatccaggagccagaagaagaaacagccaaccaggagtacaaggtctcttcgtgcgaacagcgcttgatcagtgagattgagtatcgcctagagcggagtcccgtcgatgaatcaggggacgaagtgcagtatggcgacgtacccgtcgaaaacggcatggccccattctttgaaatgaagttaaagcactataaaatttttgaaggcatgcccgtcacctttacgtgccgtgttgccggaaacccgaagcctaagatctactggtttaaggacggaaagcagatatctcccaaatccgatcactatacaatacagagggacctcgatggaacttgctccttgcatactaccgcttcgacactagatgacgacgggaactacaccatcatggccgcaaacccgcagggcagaatttcttgcaccggtcgccttatggtccaggccgtaaatcagaggggcagatctcccaggtctccctcaggacaccctcatgtgcggagaccacgatcacggagtagagacagcggtgacgagaacgaaccaatacaagagcgatttttccgtcctcattttttgcaggccccaggcgatctcactgtgcaggaaggtaaattatgtcggatggactgcaaggttagcggtctgcctacccctgacctcagctggcagctggacggaaagccagtgagacccgattctgcccataagatgttagtgcgcgaaaacggagtccatagcctgattattgaaccagtgaccagtcgtgatgctggaatatatacatgcatcgcgactaatcgtgctggccagaactccttctcattagagctagtggtggccgctaaggaggctcacaaaccacctgtgtttattgagaagctccaaaatacgggcgtggccgatgggtacccggtacggctagaatgcagggtccttggcgtccccccaccacagattttttggaagaaagagaacgagtctcttacccattcgacagacagagtctcaatgcatcaggataatcacggctacatctgcctgctcatccagggcgcaacaaaagaagatgccggatggtacacagtcagcgcaaaaaacgaggcagggatagtctcctgtacggcacggctcgacgtatatacccagtggcaccagcagtctcagtcgacgaaacctaagaaggtgagaccatccgcctcacgctacgctgcactgagcgaccaaggtctggatatcaaagccgcattccagccggaagcaaaccctagccacttgactctcaacactgccctcgtcgaatctgaggacctgtag

SEQ ID NO: 233924 - DNA, 2334 bp, synthetic construct
  misc_feature 1..2334: note = Description of Artificial Sequence: Synthetic coding sequence
  source 1..2334: mol_type = other DNA
atgccacaagctcaaaagaaaaccacctccgttagtctgactattggcagcagctcacctaaaaccggggtgactacagccgtcatccaaccactgagcgtgccggtgcagcaggtgcatagtcccacgtcatacttgtgtcgtcctgacggcactaccacagcatactttcctccagtctttacaaaggagttgcagaacacagccgtagccgaaggccaggtggtggttttagaatgccgggttagaggcgctccccctctccaggtacagtggttcagacaaggctccgagattcaggactctcccgattttcgcatcctgcagaagaagcccaggtccacagcagagcctgaggaaatctgcactctggtcattgcagagactttcccagaggacgctggtatttttacatgttcagccagaaatgattatggcagcgccacgagtacggcacaactggtcgtcactagcgctaatacagagaactgctcttatgagtccatgggcgagtctaacaatgaccacttccaacactttccacctcctccgcctattctcgaaacatcttcgctggagctggccagcaagaaaccctcagagattcagcaggtgaacaatcccgagttgggcctgtctcgagccgcactgcagatgcagtttaatgctgctgagcgcgagaccaatggcgtgcacccctcaagaggcgtgaatggattaatcaacggtaaggctaattcaaacaagagccttcccaccccagcagtgctgctatctcccacaaaggaaccacccccacttctcgccaaaccaaaattggggtttcctaaaaaagctagcaggacagccagaattgcctcagatgaagagatacagggcacgaaagatgcggtcattcaggacttggagaggaagctgaggttcaaggaggatctccttaataatggtcaacctcgtctgacttatgaagagagaatggcaaggaggcttctgggtgcggactccgcgacagtcttcaatatacaagaaccagaagaagaaacggctaaccaggaatacaaagtttcaagctgcgagcaaaggctcatctccgagattgagtacaggctcgaacgatccccagtcgatgaatcaggggatgaggtgcagtatggcgacgttcccgtagagaatgggatggccccatttttcgagatgaagctcaaacactataaaatttttgagggtatgcctgtcaccttcacgtgtcgcgtggccggaaatccaaaaccaaaaatctattggtttaaggacggcaagcagatttcaccgaaaagtgaccattatactattcagcgtgatctggatggaacttgtagcttacatacaaccgcctcgacccttgatgatgacggcaactacactattatggcagccaaccctcaggggcgaatttcctgtactggtagattaatggtccaggcggtcaaccagcggggacggtctcctcgatcccctagcggacacccacatgttcggagacctcgcagtcggtcccgagactctggcgacgaaaacgagcctattcaggaacggttctttcgcccacattttctccaagcgcctggagatttgaccgtgcaggaaggcaaactctgcagaatggattgtaaagtctctggtttgccaacccccgacctctcctggcaactggatggcaaacctgtgcgcccagatagtgctcataagatgctggtgagggagaatggtgtccactcactcatcattgagcctgtgacatcacgtgacgctggcatctatacctgcatcgccacaaaccgagcaggccagaactccttttcactcgagctcgtcgttgcagcaaaagaagctcacaagccacctgtctttatagagaagcttcagaacaccggagtggccgatgggtaccccgtgaggcttgaatgccgcgtgctcggtgtgccgcctccccagattttctggaagaaggagaatgagtctctgacccatagtactgacagggtatctatgcaccaggacaaccatggctacatctgtctcttgatccagggagcaaccaaggaagacgctgggtggtacacggtaagcgcaaagaatgaggccggaattgtctcctgcacggcaaggctggacgtgtacacccagtggcatcaacagtcacagtctactaagcccaagaaggtgaggcccagcgccagccggtatgccgcactttccgaccagggactcgacataaaagctgctttccagcccgaggccaatccttcccacctgactctgaacactgctctggtggaatccgaagacctatag

SEQ ID NO: 233925 - DNA, 3321 bp, synthetic construct
  misc_feature 1..3321: note = Description of Artificial Sequence: Synthetic coding sequence
  source 1..3321: mol_type = other DNA
atgtccgggacttccagccacgagtcgttttacgactctctgagcgatatgcaggaggagtccaaaaacaccgatttcttcccagggctgtctgcctttttgtcacaggaggagattaataagtcattggatctcgcacgacgggcaatcgccgatagcgagaccgaagattttgatagtgagaaggaaatcagccagattttctcaacgagtccagcaagtctatgcgagcacccgtctcacaaggaaactaagctcggggagcacgccagtcgcagacctcaagataacagaagcacgccagtgcagcccttggcagagaaacagactaagagtatcagtagtccggtgagcaagagaaaacctgcaatgtcaccactgctcactaggccatcctatattaggtcacttcgaaaggctgagaaacgcggtgcaaaaaccccgagcacaaacgtgaaacccaaaacaccacaccagagaaagggaggcccacaaagccaattgtgtgataaggcagcgaatttgatcgaggagctcacctcaatcttcaaagccgctaagcctcgcaacagatctccaaacggggaatccagctcccccgactctggctacctgtcacctaaaaatcagccatctgctctcctcagtgcctccgcatctcagagtcctatggaggatcagggggagatggaacgtgaagtaaagagcccaggcgcacggcactgttaccaagacaatcaggacttggctgttccccacaaccggaagagccacccccagccccattcggctctgcactttccagcagcgccaagattcatacagaagcttagatctcaagaagtggctgagggctcacgggtttacctggagtgtagggttactggcaaccctacgcctcgcgtgaggtggttttgcgagggtaaagagttgcacaatacaccagatattcagatccactgtgaaggtggagaccttcatacgctgatcattgcggaagcattcgaggacgataccggaaggtacacttgtctggccacaaacccttcgggatctgacaccacatccgccgaggtttttatcgaaggcgcaagctctactgattccgattccgaaagtcttgcgttcaagagccgcgctggagctatgcctcaggctcaaaagaagaccacatctgtcagtttgaccattggttcaagctctccaaaaactggcgtaactactgccgtcatacagccacttagcgtgcctgtgcaacaggtgcattctcctacctcttatctgtgtaggcccgatgggaccactaccgcatacttcccccctgtctttaccaaggaactccagaacaccgccgtcgccgaagggcaagtcgtcgtgctggagtgtagagttaggggcgctccacctttacaggtccagtggtttagacaagggtcagaaattcaagatagcccagacttccgcattctacagaaaaagccgaggtctacggctgaaccagaggagatatgtactctggtgatagccgaaaccttcccagaagacgcaggaattttcacctgttccgcgaggaatgattacggtagcgccacttcaaccgcgcaactcgtggttaccagcgccaacacagagaattgctcttacgaaagtatgggcgagtcaaataacgaccatttccagcacttcccccctcctccacctatcttggaaacaagttcactggagttagctagcaaaaagccaagcgaaatccagcaggttaataacccagagctgggattatcccgggctgccttgcagatgcagtttaatgctgcagagagagaaacaaatggggtacaccctagcaggggcgttaacggcttaatcaacggtaaagcgaacagcaataagagcctgcccacccctgccgtgctactgagcccaacaaaagagcctccccctctgctggctaaacccaagctgggctttccaaaaaaggcttcccgaaccgctaggatcgctagtgacgaggaaatccaaggcacaaaagatgcagtcatccaggatttagagcggaagctgcgttttaaggaagacctccttaacaacggccagcctcgactgacttatgaagagcgaatggcccgtaggttactcggggcagatagcgctacagtgtttaatattcaggagcccgaggaggagaccgctaatcaagaatacaaagtatcttcatgtgagcagagactcatctctgagatcgagtatagactggaaaggagtccagtcgacgaaagcggggatgaggtccagtacggcgatgtccctgtggaaaacggaatggcaccatttttcgaaatgaagctgaagcattataagattttcgagggaatgcccgtcactttcacctgccgtgtagcaggaaacccgaagccaaaaatatactggttcaaagatggcaagcaaatctccccaaagagtgatcattacacaattcagagagatcttgacggcacctgctcactgcacaccaccgcctctacactggatgatgacggtaactataccatcatggcagcaaacccacagggccgaatcagttgcaccggcaggctgatggtgcaagccgtcaaccagaggggtaggagccccaggagcccaagtgggcatccacacgtgcgcagacctcgtagcaggagtagggactctggggacgaaaacgagcctatacaagagcggttctttcggcctcactttctgcaggctccaggagacctcaccgtgcaggaagggaaattgtgcaggatggattgtaaggttagcggtctgccaacccctgatcttagctggcagctcgatggcaagcccgttagacccgactcagctcacaaaatgctggtgcgcgaaaatggcgtccacagtttgatcattgagccagtcacgagtcgggacgccggtatatacacatgtattgctacgaacagagccggtcagaacagcttctcgctggaactggtagttgctgccaaggaggcacataagcctccagttttcatcgaaaagttgcaaaacacgggagtggctgatggatacccagtccgattggagtgcagggttctgggcgtaccaccaccacaaattttttggaagaaggagaacgaaagtttgacccacagtactgaccgcgtgagtatgcaccaggataatcatgggtatatatgcctactaattcaaggagcgaccaaagaggacgccggatggtacactgttagcgcaaagaatgaagcaggcatcgtcagctgcaccgccagacttgacgtttacatatcaaggcactag

SEQ ID NO: 233926 - DNA, 1233 bp, synthetic construct
  misc_feature 1..1233: note = Description of Artificial Sequence: Synthetic coding sequence
  source 1..1233: mol_type = other DNA
atgtcaccgcttctgacacgaccttcctacataaggtcactgagaaaagccgagaaaagaggagccaaaactccctccacgaacgtcaagccgaagacaccacatcagagaaagggcggacctcagagccaactttgcgacaaggcagccaatctgatcgaagagcttacatcaatctttaaagctgcaaagcccaggaaccgcagtcctaatggcgagagcagttctccagacagcggttacctgtcaccaaagaaccagccaagcgcactgctttccgctagcgcgagccagtcccctatggaggaccagggcgagatggagagagaagttaagagccccggagcgcgtcactgctatcaggataaccaggacctagccgttcctcacaatcggaaatcccacccgcaaccccactcggctctgcatttcccggctgcacctaggttcatacagaaacttcggagccaggaagtcgcagaaggctcaagagtgtatctcgaatgtcgcgtgactggcaatccaaccccccgtgtcaggtggttctgcgaaggcaaggaactgcataacacacccgatatccaaattcactgtgaagggggagacttacatactttgattattgctgaagccttcgaggacgatacaggacggtatacttgtctcgccaccaatccgtccggctccgacaccacatcagcagaagtatttatcgagggggcatcctccacagattcagacagtgaatccctcgctttcaaatcccgggctggcgcaatgccccaggcacaaaagaaaactacctccgtgtccttgaccataggaagctcttctccgaaaacgggcgtaaccacagctgtaatccagccgctgtcagtgcccgtccaacaggtgcactcgcctacctcctacctgtgccgtccagatggaacaacaacagcctactttccccctgtgtttacaaaagagctgcagaatacggcagtcgctgagggccaggtcgtcgtgcttgaatgtcgagttcgcggtgccccacccctgcaggtgcaatggttcaggcagggctccgagattcaagacagccccgattttcgcattctgcagaagaagccaagaagcactgccgaaccagacgtgctctacgtcttcgtgagggtgcgttgtcaccagatgaagatacaatattataacctggcacacctgatctcgagctggctgagctcattcctgtag

SEQ ID NO: 233927 - DNA, 3006 bp, synthetic construct
  misc_feature 1..3006: note = Description of Artificial Sequence: Synthetic coding sequence
  source 1..3006: mol_type = other DNA
atgccgcaggcacaaaagaagacgaccagtgtatctctgaccatcgggagctcatcccctaagacaggtgtgacaaccgccgtgatccagccgctcagtgttcccgtccaacaagtacacagtccaaccagttatctgtgccggcctgacgggacaactactgcttactttccaccagtcttcaccaaggagctccaaaacaccgcggtcgctgaaggccaggtggtggtcctggaatgcagagttcgcggtgcacctcccttgcaggtgcaatggtttcggcagggaagcgagatccaggatagtcccgatttcagaattctgcaaaagaaaccaagaagtaccgcagagccagaggagatttgtaccttagtgatagccgagacctttccagaggacgcagggatctttacctgtagtgccagaaacgactacgggagtgccacaagcactgcgcagttggtggtcacttctgccaataccgaaaattgttcctatgaaagcatgggcgaaagcaataatgaccatttccaacactttccaccccctccacccatactggaaacgtcttctttggagcttgcttcgaagaagccgagcgagatccagcaggtcaataaccctgaacttggattatctagagctgctctccagatgcagttcaacgctgccgagcgcgagactaacggggtgcacccaagccgaggtgttaacggtctgattaacggcaaagctaattcgaacaaaagcctgcccaccccagccgtgctactgtcccccactaaagagcccccaccacttctcgctaagccaaaactggatcccctgaaactgcagcagctgcagaaccagataaggctggagcaggaggccggtgccagacagcctcccccagctcccagatccgcgcctccatcaccccctttccctccccctccggcatttcccgagctggccgcttgcactccacccgcaagccccgaacctatgtccgccctggcatcacggtctgccccagccatgcaatcctctggcagttttaattacgcacggccaaagcaatttatcgcagctcaaaacttagggcctgcttcagggcacggcacaccagccagttcccccagcagttcgagcctaccaagccctatgagccccacacctcgacagttcggaagagctccggtacccccatttgcccagcccttcggagcagagcccgaggccccatggggttcaagcagcccaagccccccaccccctcctccccctgtcttttctcccacagctgcttttcctgtaccggatgtgtttccccttcctccaccacctccccctctaccttctcccggtcaagcctcacattgcagcagtccagctacaaggttcggccatagtcagacaccagccgcttttctgtctgctctattacccagtcagccaccacccgctgcagttaacgcactgggactgcccaagggggtcacccccgcaggtttccctaaaaaagcctccagaactgctaggattgcttccgacgaagagatccagggtacaaaagatgcggtcatccaggacctagagagaaaactgagattcaaagaggaccttctcaacaacggccagccccgacttacgtacgaagaacggatggcaagaaggctcctcggggcagactctgcgactgtattcaacatccaggagcccgaagaagaaacagcaaatcaggagtataaagtgagttcttgcgagcagaggctgatatctgagatagagtatcgtttggaacgtagtccagtcgatgaaagcggcgacgaggtccagtatggcgatgtaccggtggaaaatggaatggccccatttttcgagatgaaactaaaacactataagatcttcgagggcatgcccgtaacctttacatgtcgggttgccggaaaccctaagccaaagatttactggtttaaggacggaaagcaaatctcccccaagtctgatcattacaccatccagcgggacctcgatggcacatgttctttgcatacaaccgcctcaaccctggacgatgatggaaattatactattatggccgctaacccccagggccgaatctcttgcaccgggaggctaatggtccaagcagtgaaccagagaggaagaagtccgagatcacccagcggccacccacacgtgcgcagaccaaggagccggtctcgagatagtggtgacgaaaacgagcccattcaagagaggttctttcggcctcattttctgcaggctccgggtgacctgacagtgcaggagggaaaactctgtaggatggactgtaaggtgtctggcttgccaaccccagatttgagctggcagctagatggcaaacccgtgcgtcctgattctgcccataaaatgctggtcagggaaaacggagtccactcattaattatcgaacctgttacttcgcgggacgctggtatctacacgtgtatagcaactaaccgggctgggcaaaactccttctcgctggagctcgttgtcgccgcaaaggaggctcacaaaccaccagtcttcattgaaaaactgcagaatactggcgtcgctgacggatacccagtgcggctcgaatgtcgagtcctgggagtgcctccacctcagattttttggaagaaggagaacgagagcctcacccactccactgaccgggtgtccatgcatcaagataatcacggttatatttgtctgctaatccagggagctaccaaggaggacgccggatggtacaccgtgtctgctaagaatgaggccggaatagtatcgtgtacagccagactcgacgtttacactcagtggcaccagcagagtcagagcacaaagccgaagaaggtgaggcccagtgcctctcgctacgccgctctttctgaccaggggttggacattaaggccgctttccaaccagaggctaacccttcccacctaacacttaatacggctctggtggagtccgaagatttgtag

SEQ ID NO: 233928 - DNA, 483 bp, synthetic construct
  misc_feature 1..483: note = Description of Artificial Sequence: Synthetic coding sequence
  source 1..483: mol_type = other DNA
taagggaaacccgtgcgacctgattccgctcacaagatgctggtgagagagaatggcgtccatagcctcatcatagagccggtgacatcacgcgatgcgggaatttacacctgtatagctactaatagggctggccaaaactctttcagtctggagctcgtcgtcgcagctaaagaggcccacaagcctccagtgtttattgaaaagctgcagaacactggcgtggctgatggctatcctgtccgccttgagtgcagagtgctgggcgttcccccaccacagattttctggaagaaagagaacgagagtctcacacactccacggaccgtgtgtccatgcatcaggacaaccacggttacatctgcctgctgatccagggcgcaacgaaagaagacgccggttggtacacagtatctgctaagaatgaggctggcatcgtatcttgcaccgcccgactcgacgtgtatatcagcaggcactag

SEQ ID NO: 233929 - DNA, 1539 bp, synthetic construct
  misc_feature 1..1539: note = Description of Artificial Sequence: Synthetic coding sequence
  source 1..1539: mol_type = other DNA
aaaaacactgacttttttcctggcctgtccgctttcctttcccaggaggagataaacaagagccttgatctggcgcgacgcgctattgctgatagcgaaactgaggatttcgattctgagaaggagatctcacagattttctccacctcccccgcttctttatgcgaacacccctcccataaggaaactaagcttggcgagcacgcgtccaggcgccctcaggataaccgatccacccccgtgcaacccctggccgagaaacagactaagagtatttccagcccggtcagtaaaaggaagcccgcaatgagccccctcctgactcgaccctcgtacattcgttccctaaggaaggcggagaagagaggagcgaagactcccagcacaaacgttaagccaaagacacctcaccagcgcaaggggggtccacagtcccagctctgcgataaagccgctaaccttattgaggaactcacatccatttttaaggccgctaaaccccgtaacaggtccccaaacggcgagtcctccagtccagattccggctatttgtctccaaagaaccagccgtccgccttgctgtctgcttcggcatctcaaagcccaatggaggatcaaggagaaatggaaagggaggtgaagagcccaggagccagacattgctatcaggataaccaggatctagcagtgccccacaataggaagagccaccctcagcctcactccgctctgcacttccctgccgcacccaggttcatccagaagcttaggagccaagaggtggctgagggatctcgtgtgtacctggaatgtagggttactggcaaccctacacccagggtaaggtggttttgcgaaggaaaagagctccataacacacctgatattcagatacattgtgaggggggtgacctgcatacgctgattattgccgaagcgttcgaagacgacaccggccgttacacttgcctcgccaccaatccgtctggctcagataccacctccgccgaagtgtttatcgagggcgcatcatccacggactctgattctgagagcctcgcctttaaatcacgagccggagcaatgccccaagcgcaaaaaaagaccacaagcgtgtccctgacgataggctctagttcccctaaaactggcgtgactacagccgtcatccagcccctttccgttcctgttcaacaggttcatagcccaacctcctatctgtgccgccctgatgggacaaccaccgcatactttcccccagttttcaccaaagagctccagaatacggctgtcgctgagggtcaggtggtggtgctggagtgtcgagtcagaggcgctcccccactgcaggtgcagtggttcagacagggaagcgagattcaggatagcccagattttagaattttacagaagaaacccaggtccacggccgaacctgacgttctctacgtcttcgtcagggtgcggtgccatcagatgaagattcagtactacaatctggcacatcttatctcttcttggctgtcgagcttcctgtag

SEQ ID NO: 233930 - DNA, 87 bp, synthetic construct
  misc_feature 1..87: note = Description of Artificial Sequence: Synthetic coding sequence
  source 1..87: mol_type = other DNA
atgagtggtacgtccagtcatgaatcgttctacgacagcctttccgatatgcaggaagagtcaaagaatactgatttctttccatag

SEQ ID NO: 233931 - DNA, 690 bp, synthetic construct
  misc_feature 1..690: note = Description of Artificial Sequence: Synthetic coding sequence
  source 1..690: mol_type = other DNA
atggcggcacagccattgaggcatagaagcaggtgcgctacgccaccacgcggagatttctgcggcggaaccgaacgggcaatcgaccaagccagctttacgaccagcatggaatgggatacccaggttgtgaaaggatcctcgcctttagggcctgccggattaggcgcagaagagcctgccgcagggccacagctgccttcctggctgcaacctgaaaggtgtgccgtgtttcagtgtgcacagtgccatgcagtattggctgattctgtgcatcttgcctgggacctgtctcggagtctgggagccgtggtcttcagtcgggttacaaacaacgttgtcctcgaggcgccatttctcgttggcatagagggttccttaaaagggagcacgtacaaccttcttttctgtgggagctgtggtatccctgtgggattccatttgtactctacacacgctgccctggccgctctgcgcggacacttctgcctgagtagcgataagatggtgtgttatctgctgaaaactaaagctatcgttaacgctagcgagatggatattcagaacgtccccttgtctgaaaagattgctgaactgaaagaaaagatcgtgctcacccataacaggctgaagtctttaatgaagattctgagcgaagtaacgcccgatcaatcgaagcctgaaaactag

SEQ ID NO: 233932 - DNA, 816 bp, synthetic construct
  misc_feature 1..816: note = Description of Artificial Sequence: Synthetic coding sequence
  source 1..816: mol_type = other DNA
atggcgtcacctgggtgcttgtggctgctggctgtagctctactcccatggacatgtgcatcccgcgctttgcagcacctggaccctccagcacccctacctctcgtgatctggcatggaatgggaagcaggtacgtggcccagacgggactcgaacttctggcatcgtccaacccccctgcatcttcgtaccagagtgctggcatgatcggcgacagttgctgcaacccattgtcaatgggagctatcaaaaagatggtggaaaaaaaaatccctgggatttacgtcctgagcctggaaattggcaagaccctgatggaagacgtcgagaacagtttcttcctcaatgtgaactcccaggtgacaaccgtctgccaggccctggcaaaggacccaaagcttcagcagggctataatgctatgggcttcagccaagggggtcagttcctgcgggctgtggcccagcggtgcccttccccaccaatgatcaatcttatcagcgttgggggacagcaccaaggcgtttttggcctgccgagatgccccggtgaaagctcgcacatctgtgatttcatcaggaagactctcaatgccggtgcttattcaaaggtggtccaggagcgtctggtgcaggctgaatactggcacgatccaattaaggaggatgtatatcggaatcactcaatttttctggcggatattaatcaggaacgcggtatcaacgagagctataaaaagaatctgatggctcttaagaaattcgtgatggtcaaattcctgaacgatagcatcgtcgatccagtggactctgagtag

SEQ ID NO: 233933 - DNA, 921 bp, synthetic construct
  misc_feature 1..921: note = Description of Artificial Sequence: Synthetic coding sequence
  source 1..921: mol_type = other DNA
atggccagtcccggatgcctctggctattggcagtggcactactaccctggacctgtgcaagtcgcgcacttcagcatctggatcctccagctccgttgcctctcgttatctggcatgggatgggcgactcctgctgcaacccactgtcaatgggcgctattaagaagatggtggagaagaagatccccggaatctatgtgctcagcctggagattggcaagaccctaatggaggatgtggagaactcctttttcttaaatgtgaacagccaggttaccacggtatgtcaagcactcgcaaaagacccgaagttgcagcagggatacaacgctatgggcttcagccaagggggacaatttttgagggccgttgcacagcggtgcccgagtcctcctatgattaatctgatttcagtcggaggacagcatcagggagtgtttggtctgcccagatgcccaggtgagagtagccacatatgcgactttattcgcaaaaccctgaatgcaggcgcttactccaaggtggtccaggaaagactagtccaggcagagtattggcacgacccaatcaaggaggacgtttatcgtaatcactccattttcctagccgatattaaccaagagcgtggcataaatgaaagctacaagaagaacctgatggcactgaaaaagtttgtgatggtgaaatttttgaatgatagcatcgttgatccagtagattctgagtggtttggcttctacaggagtggacaagccaaggaaaccatcccgttgcaggagacctcgctgtatacacaggacaggctgggcctgaaggagatggataatgctgggcagctggtttttctcgcgaccgagggcgaccacctccagctgagcgaggagtggttttatgctcatattatccccttcctcggatag

SEQ ID NO: 233934 - DNA, 612 bp, synthetic construct
  misc_feature 1..612: note = Description of Artificial Sequence: Synthetic coding sequence
  source 1..612: mol_type = other DNA
atggcttctcctggctgcctgtggctcctagcagtggcacttctgccctggacatgcgcgagtcgcgctctacagcacctcgacccccctgctcccctcccattggtgatttggcatggtatgggagttttcggactgcccaggtgccctggcgaaagtagccatatttgcgactttataagaaagacgctgaatgcaggcgcatattccaaggtggtgcaggagaggcttgtccaagcggagtactggcacgacccaatcaaagaagatgtctaccgtaatcactcaatctttctcgccgatataaaccaggagcgtgggatcaacgagagttataagaagaacctcatggctctgaaaaaatttgtgatggttaaatttcttaatgattccatcgtggaccctgtcgattcagaatggttcggattttaccggtctgggcaggctaaggaaacaattccgctccaggagaccagtctctatacccaggatcgcctaggtctcaaggaaatggacaatgccggacaactggtctttctggccaccgaaggcgaccatctccaattgtccgaagagtggttctacgctcatattattccatttctaggctag

SEQ ID NO: 233935 - DNA, 921 bp, synthetic construct
  misc_feature 1..921: note = Description of Artificial Sequence: Synthetic coding sequence
  source 1..921: mol_type = other DNA
atggcttccccaggttgcctttggctcctggcagtcgctctgcttccatggacctgcgcctctcgggcactacagcacctggaccccccagcacctctaccattggtgatctggcacggcatgggagactcatgctgtaacccactctccatgggtgcaatcaagaagatggtcgagaaaaaaattcccggaatctatgttctctcacttgaaattggcaagacgctcatggaggatgtggaaaattcattcttcttgaacgtcaattcacaggtcaccaccgtgtgccaggccctcgccaaagaccccaagctccagcagggttacaacgctatgggcttttcccagggaggccagtttctgcgggctgtggctcaacgctgccccagcccaccaatgattaatctgataagcgtgggaggacagcaccagggagtgtttgggcttcctagatgccctggtgagagctctcacatttgcgactttattagaaaaacactaaacgctggcgcttattccaaggtcgttcaggaaagactcgtacaggcagagtactggcatgatcctatcaaggaggacgtgtatcgaaaccatagcatctttctggccgacattaaccaggagcgtggaattaacgaatcgtacaagaagaacctcatggcacttaagaagttcgtaatggtcaagtttctgaacgattctatcgtcgatccagtcgacagcgagtggtttggcttctatagaagcggccaggcgaaagaaaccattccactgcaggagacctccctatacacccaagataggctcggactgaaagaaatggacaatgccggacagttagtgttcctggctaccgaaggagaccatctgcagctctcagaggaatggttttacgcacatattatcccatttttgggctag

SEQ ID NO: 233936 - DNA, 909 bp, synthetic construct
  misc_feature 1..909: note = Description of Artificial Sequence: Synthetic coding sequence
  source 1..909: mol_type = other DNA
atgctaggactttgtggccagagactgcccgctgcctgggtactacttctcctgccgtttttgcctttactcttgcttgccgcaccagccccacatcgagcaagttacaagcctgtaattgtggtccatgggctttttgacagctcgtacagcttccggcatctactggaatacatcaacgaaactcaccccggaaccgtggttactgtgctcgatctctttgacggcagagagtcactgaggcccctgtgggagcaagttcaggggtttcgcgaagcagtcgtgcctatcatggcaaaagcccctcagggagtccatctgatctgttatagccagggaggactggtgtgccgggctctgctgtctgtgatggatgatcacaacgtcgacagcttcataagcctctcctcccctcaaatgggacaatacggtgacactgattacctgaagtggctgttccctactagtatgagatctaatttgtaccgtatttgctattccccatggggccaggaattttcaatctgtaactattggcatgatccccatcatgacgacctgtacctgaatgcctcttcgtttttggctctgattaacggtgaaagggaccacccaaacgctaccgtgtggcggaagaattttttgcgggtggggcacctcgtgctgatcggaggtcctgatgacggcgttatcactccgtggcaaagctccttcttcggtttttacgacgcaaatgagacagtgctggagatggaggaacagctggtgtacctaagggattcatttgggttaaagaccttattagcgagaggggcaattgtgaggtgtccaatggctgggatttcccacacagcttggcactcaaacaggaccctgtatgagacttgcatcgagccatggctgagttag

SEQ ID NO: 233937 - DNA, 927 bp, synthetic construct
  misc_feature 1..927: note = Description of Artificial Sequence: Synthetic coding sequence
  source 1..927: mol_type = other DNA
atgaagtcttgtggcagcatgttgggcctatgtggccaaagactgcccgcagcttgggtcctcctcttattgccatttctgcctctgctgctgctggccgctcccgcaccgcatagagccagttacaagcccgttatagtcgtccatggtttgttcgattctagctatagttttcggcaccttcttgagtatatcaacgagacccatcccggaactgtcgtcaccgtccttgacctctttgatgggcgagaaagcctgagaccactatgggagcaggtccaggggtttagagaggccgtcgttccaatcatggccaaagctccccagggggtgcatctgatatgttattctcaagggggactggtttgccgggcactgttatcagtcatggatgaccataatgtcgatagcttcataagcctgtcaagtccacaaatgggacagtatggagataccgattacctcaagtggcttttccccacaagcatgcgatcaaatctgtatcggatttgttattcaccgtggggacaagaattttcaatttgcaattattggcacgaccctcaccatgatgatctctacctgaatgcgtcctcttttctggctctcattaatggggaacgggatcaccctaacgcgaccgtctggaggaagaatttcttaagggttggacacctcgtcctgataggaggacccgacgacggcgtcatcacgccgtggcagagctccttctttgggttttacgatgccaatgagaccgtactggagatggaggagcagttagtttatctgcgcgattcttttggattgaaaaccctgctggcgagaggggctattgtccgttgcccgatggctggaataagccacacagcttggcactctaaccggacactgtatgaaacctgtatcgagccatggctgagctag

SEQ ID NO: 233938 - DNA, 909 bp, synthetic construct
  misc_feature 1..909: note = Description of Artificial Sequence: Synthetic coding sequence
  source 1..909: mol_type = other DNA
atgctgggactgtgcggacagaggctccccgctgcgtgggtacttctcctgctgccattcctgcctctcctgttgttggccgctccggcaccccatagagcttcttacaagcccgtgatcgtcgtacatgggttattcgattcatcctattctttccgtcatttgctggagtatatcaacgagacccatcctggcactgtggtgactgttctggacctgtttgacggcagggaatccttacggccactctgggagcaagtccaaggttttcgtgaggctgtcgtgcccattatggccaaggctccccaaggtgtccacctgatctgttactctcaggggggtctggtgtgcagagcccttctgtctgtaatggatgatcataacgttgatagctttatttctcttagttctccccagatgggccagtacggcgataccgattaccttaagtggctgttccctaccagcatgcgaagtaacctttatcggatttgttactcaccgtggggacaggagttttccatctgtaactactggcatgacccccaccatgacgacttgtatctaaatgctagctcattcttggcgctgataaacggagagcgcgaccatcctaacgccacagtgtggagaaaaaactttctccgtgtaggtcaccttgtgctgattggcggacccgatgatggagtgattacaccttggcagagcagcttctttgggttttacgacgccaacgaaactgtgctggaaatggaagaacaactggtttatctccgagatagctttggactgaaaacactgctggccagaggtgctattgtacgctgtccaatggcagggatctcacatacagcatggcacagtaacaggacactctacgaaacatgtattgaaccatggctgagctag

SEQ ID NO: 233939 - DNA, 909 bp, synthetic construct
  misc_feature 1..909: note = Description of Artificial Sequence: Synthetic coding sequence
  source 1..909: mol_type = other DNA
atgctgggtctctgtggtcagagactgccagccgcttgggtcctactgctcctgccatttttgcccctgctgctgcttgcggcaccagcccctcatagggcttcgtacaaacctgtgatcgtcgtgcacgggttattcgatagctcctacagctttaggcatctattagagtatattaacgagacccatcctgggaccgtcgtcaccgtattggacctgtttgatgggagagagtcccttagacccctgtgggaacaagttcaaggttttagagaggcggtcgttccaattatggctaaagcgccacagggagtccacctgatctgctactcgcaggggggattggtgtgccgcgctctcctgagtgtgatggacgaccataacgtcgacagtttcatttccctgtccagtccacagatgggacagtatggcgacacagactatcttaaatggctgttcccaaccagcatgaggagcaacctgtatcggatctgctacagcccatggggacaggaattcagcatttgtaattactggcacgatcctcatcacgacgacttgtacctaaacgccagcagcttcctggctttgatcaacggggaaagagatcatcccaatgctactgtgtggcgcaagaacttcctccgggtgggacacctggtcttaattggcggacctgacgacggagtgattactccctggcaatcgagctttttcggtttctatgacgcaaatgaaaccgtgcttgagatggaggagcagttagtatacttgcgggactcttttggactcaagactcttcttgcccgaggggcaatcgttaggtgtccgatggctggaatcagtcacacagcatggcactctaaccgtactctttacgaaacatgcatcgagccctggctctcttag

SEQ ID NO: 233940 - DNA, 927 bp, synthetic construct
  misc_feature 1..927: note = Description of Artificial Sequence: Synthetic coding sequence
  source 1..927: mol_type = other DNA
atgaaatcgtgcgggagcatgctcggcttatgggggcagcggctgccagcagcgtgggtgttactccttctcccgtttttgccattgttactgttagctgcgcctgctcctcatcgggagagctacaaacccgtgattgttgttcatggattgtttgatagcagctactcctttcgtcacctgctggagtacattaacgagacgcatcctggaaccgtagtgaccgtcctcgatctttttgatggtcgagagtccctgaggcccctgtgggaacaggtgcaggggttccgggaggccgtggtcccaatcatggccaaagccccacagggtgttcatctgatttgttattcacaaggcggtctggtctgcagagctttgcttagcgtgatggatgatcacaatgtcgacagttttatctcattgagtagccctcagatgggccagtatggcgacaccgattacttgaaatggctgttccctacatcaatgagatctaatctctataggatttgctactctccctgggggcaggaattctcgatctgtaattactggcacgaccctcaccacgatgatttgtatcttaatgcaagcagctttctggccctaattaatggagaaagagaccatcccaacgctactgtttggcgaaagaacttcttgcgcgtgggtcacctggtgctgatcggtggcccagatgatggagtgattacgccctggcagagctcattttttggattctacgatgctaacgagacagtgttggagatggaagagcagctcgtgtatttgcgagattccttcggcctgaagacccttttggcgcgaggggctatagtacgctgtccaatggccggtattagtcacaccgcatggcattctaacagaaccctttatgaaacttgtattgagccctggctctcctag

SEQ ID NO: 233941 - DNA, 927 bp, synthetic construct
  misc_feature 1..927: note = Description of Artificial Sequence: Synthetic coding sequence
  source 1..927: mol_type = other DNA
atgaaatcctgtggctcaatgcttggcctgtggggtcagagactccccgctgcgtgggtcttgctgctgctgcccttcctgcccctcctgcttctggccgctcctgcgccacaccgggcaagctacaaacctgtcatagtggtccacggcctatttgatagttcctacagcttccggcatcttcttgagtacatcaatgagactcatcctgggacagtggttaccgtgcttgacctctttgacggccgagaatccctccgaccgctgtgggaacaagtgcagggatttagggaggctgttgtccccatcatggctaaggctccccagggcgtccacttaatttgttattcccagggtggcctagtctgcagagcattattgagcgtgatggacgaccacaatgtcgactctttcatttctttatcatcccctcagatgggacagtatggtgacactgactaccttaagtggctttttcctacgagtatgcgcagtaatctgtatcgcatttgctacagcccatgggggcaggagttctctatctgcaactactggcacgatcctcaccatgatgacctgtacttgaacgcttcctcttttctcgctctcataaacggcgaacgcgaccatccaaatgcgaccgtttggagaaaaaactttctgcgcgtgggtcatctcgtcctcattggaggtccagatgacggcgtgataacaccatggcagagctcatttttcggtttttacgatgcaaatgagaccgtattggagatggaggaacagttagtatatctgcgggactcatttggtttgaagaccctgttagctcgcggagccatcgtgagatgcccaatggcgggaatatctcacaccgcctggcattcgaaccgaactttatatgaaacctgtatagaaccctggctttcctag

SEQ ID NO: 233942 - DNA, 909 bp, synthetic construct
  misc_feature 1..909: note = Description of Artificial Sequence: Synthetic coding sequence
  source 1..909: mol_type = other DNA
atgctggggttgtgcggtcagaggctgcctgctgcctgggttttgctcctgctcccctttctgcccctcctgcttcttgcagcgccagctcctcaccgtgcgtcatacaagcccgtaatcgtggtccacggactgtttgacagttcctatagctttcgtcatctcttggaatacattaatgagacgcacccaggaacagtcgttacagtcctcgacctcttcgatggcagggaatccttgaggcctctgtgggagcaggtccagggctttagagaggccgtcgtgcccattatggccaaggcaccccagggagtgcacttgatctgttatagtcagggcggtctcgtgtgtagagcccttctgtccgtgatggacgaccataatgttgattctttcatatcgctctcctcccctcagatgggacagtacggggataccgattacctcaaatggctcttccctacttccatgcgtagcaatctctatagaatttgttactcgccctggggacaggagttttccatctgtaactattggcacgatccccaccacgatgacttgtatctgaacgcaagctccttccttgccttaatcaacggagagagggaccaccctaatgctacggtgtggcgaaagaatttcctgagggtgggacatctagtgctcattggcggacccgacgacggagtgattactccctggcaatctagtttcttcgggttctacgatgccaacgagaccgtcctggaaatggaagaacagctcgtctacctcagagactcttttggactcaaaaccttgctggcccgtggtgcaattgtccggtgtccaatggccggaatctcccacaccgcatggcacagtaacaggacgttgtacgaaacctgtatcgaaccatggctgtcctag

SEQ ID NO: 233943 - DNA, 909 bp, synthetic construct
  misc_feature 1..909: note = Description of Artificial Sequence: Synthetic coding sequence
  source 1..909: mol_type = other DNA
atgctcggcttgtgggggcagcgcttgccagcggcatgggttcttctcttgctgccatttctgcctctgctgctgctcgccgctcctgcccctcatagggagagctacaagcctgtgatcgtggtgcatgggcttttcgactcaagctactctttccgtcatctgttagagtatattaacgaaacacacccagggaccgtggtcaccgtgttggacctttttgacggcagagagagtctgagacctctgtgggagcaggtccagggattccgagaagcagtggtccccataatggctaaagcaccccagggagtgcatcttatttgctattcccagggtggcctggtgtgccgcgcactcctgtctgtgatggacgatcacaatgtcgacagttttatctctctgagctcccctcagatgggccagtatggggacacggactatctcaagtggctctttcccacaagtatgagaagcaatctgtataggatctgctattctccctggggacaggagttttctatttgcaactattggcacgatccccaccacgacgatttatatctcaatgcaagctcatttttggccctgatcaatggcgagcgcgatcaccccaacgctaccgtttggcggaagaactttctgagggttggccacctcgtgctgattgggggacctgacgatggagtgatcactccatggcagagcagtttttttggcttttatgacgccaacgagacagtgctggagatggaagaacagctcgtctatctcagagacagttttgggctgaagactctgctagcacgaggcgctatcgtgcgctgtcccatggctggaattagccataccgcctggcacagcaatcggactctctacgagacttgcattgagccttggctgtcgtag

SEQ ID NO: 233944 - DNA, 909 bp, synthetic construct
  misc_feature 1..909: note = Description of Artificial Sequence: Synthetic coding sequence
  source 1..909: mol_type = other DNA
atgttaggattatggggacagcggctccccgctgcctgggtgttattgctcctcccctttcttcccctcttgctgcttgccgctccggcaccccacagagaatcctacaagcctgtaattgtcgtgcatggcctgttcgatagtagctattcatttcgccatctacttgagtatataaacgagacacatcctggaacggtggtgacagttctcgaccttttcgatgggagagagagccttcgcccattatgggagcaggttcaagggtttagggaggccgtagtgccaatcatggccaaagctccccagggcgtgcacctcatctgttacagccagggcggattggtgtgccgggcattgctgagcgtgatggacgatcataacgtggactcttttatttccctgagctcacctcaaatgggtcaatacggtgatacagactacctgaagtggctattccctacttccatgcggagtaacctctatcggatatgctacagcccatggggtcaggaattctctatctgcaattactggcacgaccctcaccacgacgatctgtatcttaacgcaagtagcttccttgcattgattaatggtgagcgtgatcaccccaacgccactgtgtggcgtaagaacttcctcagggtggggcacctcgtcctgataggtgggcctgacgacggggtgatcactccatggcagtccagcttctttggcttttatgacgctaatgaaacagtcttggaaatggaggagcagctagtgtaccttcgcgactcatttggacttaagactctcctggctaggggagccatcgtgaggtgccccatggccggaatctctcatactgcttggcactctaataggaccctctatgagacctgtatcgagccctggttaagctag

SEQ ID NO: 233945 - DNA, 909 bp, synthetic construct
  misc_feature 1..909: note = Description of Artificial Sequence: Synthetic coding sequence
  source 1..909: mol_type = other DNA
atgctaggactatgggggcagagactcccggctgcctgggtccttcttttgttaccctttctgcccctgctcctgctggcggctcccgctccccacagggagtcgtataagccagtcattgtcgtgcatggcctgttcgatagcagctacagcttccggcacttgctggaatatattaacgaaacacaccccggtactgtagtgacggttctcgacctgtttgacgggagggagagtctacgcccattgtgggaacaggtgcagggattcagggaggcagttgtcccgataatggctaaagcacctcagggggtccatttgatctgctactctcagggcggactagtctgcagggccctcctgtctgtaatggacgatcacaacgtcgactcctttatcagcctgtcaagcccacagatgggccagtacggcgatacagactatctaaagtggctctttccgacttctatgcggagtaacctgtatcgcatctgctactccccttggggacaagagttctctatatgtaattactggcacgacccccaccatgacgacctgtacttgaacgccagctctttcctggccctcatcaacggggagcgagaccaccccaatgctacagtatggcggaagaacttccttagggttggccatttggtgctcataggcggaccagacgatggggttatcacaccatggcagagctcattttttggcttctacgacgccaacgagacggtgctggagatggaagagcaactggtgtacctgagagattctttcggactcaaaaccctcctggccaggggagccatagtgcggtgcccaatggccggaataagtcacactgcctggcacagtaaccggaccctgtatgaaacgtgcattgagccatggctctcttag

SEQ ID NO: 233946 - DNA, 909 bp, synthetic construct
  misc_feature 1..909: note = Description of Artificial Sequence: Synthetic coding sequence
  source 1..909: mol_type = other DNA
atgctcggtctttggggtcagcggcttccagctgcgtgggtgctgttattacttcccttcctccctctgctgctgctggcagcgccagctcctcaccgggcaagctacaagcccgtgatcgtcgtccatggcttgtttgattccagctactcctttaggcatttactcgaatatatcaacgagacccaccctgggaccgtagtcacagtgcttgatttgttcgatggacgcgagtcactgagaccattgtgggaacaggttcaaggcttccgggaggccgtggtgcccatcatggccaaggcccctcaaggagtccacctgatctgttacagccagggaggactggtctgtcgagcactcctctcggtcatggacgaccacaatgtcgactcattcatctcattaagcagcccacaaatggggcaatacggcgacacggattaccttaaatggctctttccaacctccatgagaagtaatttgtaccgcatctgctattctccctgggggcaagagttctcaatttgcaactattggcatgacccccaccatgatgacctttatttaaacgcctcttcctttttggccttaatcaacggtgaaagggaccatcccaatgcaacagtgtggcgcaagaacttcctgcgtgtagggcatctcgttctcattggcggaccagacgacggagtcataacaccgtggcagtccagttttttcggcttttacgatgctaacgagacagtcttagaaatggaggagcagctagtatacttgagagactctttcgggttgaaaaccctgttagcacgcggtgcaatcgtgcgctgtccaatggcaggtatctctcacaccgcctggcatagcaatcgaaccctatatgagacctgtatcgagccctggctgtcatag

SEQ ID NO: 233947 - DNA, 909 bp, synthetic construct
  misc_feature 1..909: note = Description of Artificial Sequence: Synthetic coding sequence
  source 1..909: mol_type = other DNA
atgctcggcctctggggccagcgcttgcctgctgcctgggtgttgctgttactgccttttctacccttgctactcctggcagctcctgcaccccatcgggcttcatataagcccgttatcgtagtgcatggccttttcgatagctcttattcatttcggcacctgctcgaatatataaacgagacccatcctgggactgtggtaaccgtgctcgatctgtttgatggtcgagaatccttgcggccactctgggagcaggtccagggatttcgggaagcagtggtgccgatcatggcaaaagcccctcagggtgtgcacctgatctgctactcgcagggcggtctagtgtgcagggccttactctcagtcatggacgaccataacgtggattcattcatatcattatccagccctcagatgggccagtacggagataccgattatctgaagtggttgttcccaacgtccatgcgatcaaatttgtaccgcatttgttatagcccctggggccaggaattctccatttgcaattattggcatgaccctcaccatgatgacttgtacctcaacgcctcaagcttccttgcactgatcaatggggagcgcgatcatcccaacgccacagtttggaggaagaacttcctgagagtcgggcacctcgttctcattggcggaccggatgacggcgtgataacaccctggcagtcgtcattttttgggttctatgacgccaatgaaaccgtgctggagatggaagagcagcttgtctatctgcgggacagcttcggtctaaaaaccctgctggccagaggggctatcgtgaggtgccccatggcaggtatctcccatacggcttggcattcgaatagaactctgtacgagacctgtatcgagccctggctcagttag

SEQ ID NO: 233948 - DNA, 909 bp, synthetic construct
  misc_feature 1..909: note = Description of Artificial Sequence: Synthetic coding sequence
  source 1..909: mol_type = other DNA
atgttaggtctgtgggggcagcgcctgcccgcagcctgggtgctgctccttctcccctttttgccactgttgctgctggcggcaccggctccccatagggcatcttataagccggtaattgtggtgcatggtttgttcgatagcagctactccttccgacacctattggagtacatcaatgaaacccacccaggaactgtggttaccgtcctggatttgttcgacggccgagagagcctcagaccactgtgggagcaggtccagggtttcagagaagccgtggtgcctataatggccaaggcgcctcagggggtgcacctcatttgctattcgcagggaggactggtttgtcgcgcactgcttagtgtcatggacgaccacaatgtagatagcttcatctccctcagctccccacagatgggtcagtacggagacactgactatttgaagtggctgttccctacttccatgcgctccaacctctataggatctgctatagcccttggggacaggaattctccatttgtaactattggcatgacccccaccacgacgatctgtaccttaacgcctcaagcttcctcgctttaattaacggcgaacgggatcatcccaatgccacagtctggcgtaaaaatttcctgagggtgggccacctagtgttgattggcggtcctgatgacggcgtgatcactccttggcaatcatcattctttggcttctacgatgcaaatgaaacagtgttggaaatggaggaacagctggtatacctccgagactcttttggactgaagacactactggcccgaggagctattgtacgttgccccatggccggaatctcgcacacagcctggcacagtaatcgaacactgtacgagacgtgtattgaaccttggctgagctag

SEQ ID NO: 233949 - DNA, 927 bp, synthetic construct
  misc_feature 1..927: note = Description of Artificial Sequence: Synthetic coding sequence
  source 1..927: mol_type = other DNA
atgaagtcctgcggcagcatgttgggcctgtggggccagcggcttcctgcagcttgggtactgctgcttcttcccttcctacctttattgctcctggcagcacccgctcctcatcgggcatcctataaacccgtaattgtggtccatggtctgtttgattcaagctatagctttaggcatctcctcgaatacattaacgaaactcatcccggtaccgtagtcacagtcctggacctgttcgatggccgtgaaagtctgagaccactctgggagcaggtccaggggttccgcgaagccgtcgttcctattatggccaaggcaccccaaggcgtacacctgatatgctacagccaggggggactcgtgtgtcgtgcattactgtcagtgatggacgaccacaacgtcgattcattcatctcactgtcttccccgcaaatgggacagtacggggatactgattatcttaaatggctgttccctacctctatgagaagtaatctgtatcggatttgctactcaccctgggggcaagagtttagcatttgcaattattggcatgatccacatcacgatgacttatacctgaatgcctcgagctttctggccttgataaatggggagagggaccaccctaacgcaacagtgtggaggaagaattttcttcgggtggggcacttggttttaattggaggccctgacgacggcgttatcactccatggcaaagctccttttttggcttctatgatgctaatgagaccgttctggagatggaagagcaattagtgtacctgcgcgattccttcggcctcaagactttgctagctcggggagcaatagtcaggtgtcccatggccggaatttcccataccgcctggcattccaacaggacactgtacgagacgtgcatagaaccctggctgtcatag

SEQ ID NO: 233950 - DNA, 282 bp, synthetic construct
  misc_feature 1..282: note = Description of Artificial Sequence: Synthetic coding sequence
  source 1..282: mol_type = other DNA
atgctcggcctgtggggtcagagactgccagctgcttgggttctgctcttacttccatttctcccactgctgcttctggccgctcctgctccccaccgggcaagttataagcccgtcatcgtggtgcatgggctctttgattcttcctattcttttcgtcacctgctggaatatatcaatgagggggcactttgcgccggactctgctttctgtcatggatgatcacaacatggattttgagtagcccttctccactgcatagatgggacagtatggaatag

SEQ ID NO: 233951 - DNA, 543 bp, synthetic construct
  misc_feature 1..543: note = Description of Artificial Sequence: Synthetic coding sequence
  source 1..543: mol_type = other DNA
atgctcggactgtgcgggcaacgtttgccagccgcatgggtcttgctactgctcccttttctgcccctgctactcctggctgctccagcgcctcacagagcatcttataagcctgtgatagtggtgcacggcctgttcgactcatcgtactccttccgacatcttcttgaatacataaacgaaactcacccaggtaccgtcgtgactgttttagacctcttcgacgggagagaatctttgaggccactgtgggaacaggtgcaaggcttccgggaagctgtcgtacccattatggcaaaagctccgcagggtgtgcatctcatctgctacagccaggggggactggtttgccgcgcactgttaagcgtgatggacgatcacaatgtggactcgttcattagcttaagcagcccgcagatggggcagtatggggacaccgactaccttaagtggcttttccctacctctatgcggagcaatctgtatagaatctgttacagcccatggggtcaagaattctcaatttgcaactactggcactag

SEQ ID NO: 233952 - DNA, 927 bp, synthetic construct
  misc_feature 1..927: note = Description of Artificial Sequence: Synthetic coding sequence
  source 1..927: mol_type = other DNA
atgaaaagttgtgggtccatgctaggtctatggggacagcggttgcctgcagcttgggtgctcctactgctcccatttctgcccctgctgctactggccgctcccgcaccacaccgagcatcgtacaaaccggtaatcgtggtccacggattatttgatagttcctattcatttcgtcatcttctggagtacatcaacgaaacccaccccggtacggttgttaccgtgctggatcttttcgacgggcgtgaatctttgcggcctctctgggaacaggtgcaaggatttcgggaggccgtcgtgcctataatggcaaaagcccctcagggtgtgcacctcatctgttactcacaagggggactggtgtgtagagccctgcttagcgtgatggatgatcataacgtggattcctttatctctctctcttcccctcaaatgggtcagtatggtgataccgactacctgaagtggcttttccctactagcatgcgcagcaatctctacagaatctgctatagcccatggggccaggaattctctatctgcaattactggcacgaccctcatcacgatgatctgtatctgaatgcctctagctttcttgccctcattaatggagagagggatcaccccaacgccacagtgtggcgcaagaattttctgagggtcggacatcttgtgctgattggaggcccagacgacggcgttattaccccatggcagtcatctttctttggtttctacgacgcgaacgaaacagtcctggagatggaggagcagctggtgtatctgcgagactcattcggccttaaaaccctgctcgcccgaggagcaatagtgcgctgccctatggccggaatctcgcataccgcatggcactccaatagaactctgtatgagacatgcatagaaccgtggttatcatag

SEQ ID NO: 233953 - DNA, 603 bp, synthetic construct
  misc_feature 1..603: note = Description of Artificial Sequence: Synthetic coding sequence
  source 1..603: mol_type = other DNA
atgttagggctttggggtcagaggttgcccgcagcctgggtgctcctgctgctgccttttttgccgctgcttctgctcgctgctccagctccccatcgtgaaagctataagcccgtgattgtggtacatgggctctttgactctagttacagcttccggcatctgctggagtatatcaacgaaacccaccccggaaccgtcgtgaccgtgttagaccttttcgatggacgggagagcctgcgtccgctgtgggagcaggtgcaggggtttagagaggcagtcgtcccaattatggcaaaagccccacaaggcgtccatctgatctgttactcccaaggaggcctcgtctgtagagccctcttgtctgtcatggacgaccacaacgtggatagttttatctcgctctcctcaccacagatgggacagtacggagacacggattacctgaaatggctctttcccacttccatgcgctccaacctgtaccgcatatgttattccccatggggccaggaattttctatctgtaactactggcacgacccccaccatgacgacctctacttaaacgctagctctttcctcgctctgattaatgggtag

SEQ ID NO: 233954 - DNA, 477 bp, synthetic construct
  misc_feature 1..477: note = Description of Artificial Sequence: Synthetic coding sequence
  source 1..477: mol_type = other DNA
atgctgggactctggggacagcggctgcccgctgcctgggtgctcctgcttctgcccttcttgccactgctcttgctcgccgcaccagctccccaccgggagtcttataaacccgtgatcgtagtccacggactgtttgacagtagctattccttcaggcatctgctcgaatacattaatgagatgggccagtacggagacactgactacctgaagtggctgtttcccactagtatgcgaagcaacctgtatcggatttgttatagcccatggggccaagagttttctatatgcaattactggcacgacccccatcacgacgatttgtatctgaacgcttcaagcttcctagccctgattaacggggagcgggaccacccaaatgccaccgtctggaggaagaacttcctgagagttggacatctcgtgttgatcgggggacctgatgacggggtaatcacaccatggcaatcatag

SEQ ID NO: 233955 - DNA, 543 bp, synthetic construct
  misc_feature 1..543: note = Description of Artificial Sequence: Synthetic coding sequence
  source 1..543: mol_type = other DNA
atgctgggcctctggggtcagcgtctgcccgcagcctgggtgctcctgcttctgcctttcctgcctctcctgctactcgctgcgcctgccccacatagggcctcttataagccagtgatcgtcgtccatgggttgttcgattccagctactcttttcgacacctgctggaatatatcaatgagacccatcccggaacggtggtgactgttttggatctttttgacggccgtgaaagtctgaggcccctttgggaacaggtccaaggttttcgagaggcagtggtcccaattatggccaaggcccctcagggggtgcacctgatttgttactcccagggcggactggtgtgcagggccttgctgtctgtgatggacgatcacaatgtagattcgttcatcagtttgtcatccccacaaatggggcagtacggtgacaccgactatttgaaatggctctttcctacctccatgcgtagcaacctatataggatatgctattccccttggggccaggaattttccatctgcaactactggcattag

SEQ ID NO: 233956 - DNA, 477 bp, synthetic construct
  misc_feature 1..477: note = Description of Artificial Sequence: Synthetic coding sequence
  source 1..477: mol_type = other DNA
atgctgggtctttggggtcaaaggttgcctgccgcttgggtgctgttgctactgccttttctaccgctgctcctcctcgctgcaccggctccccacagagccagttataaaccggtgatcgtcgtgcatgggttatttgactcatcatacagttttaggcatctgttggaatatattaatgaaatgggacagtacggtgacaccgactatctgaaatggctatttcccacttcgatgcgttcaaacttgtatcgtatctgttactctccttggggacaagaattttcaatttgcaattactggcatgacccacaccacgatgatttgtaccttaacgcttcatcatttctcgcattaatcaacggcgaaagggaccaccctaacgctaccgtttggaggaagaactttctaagagtcggacacttagtgctgatcgggggaccagacgacggtgtgatcactccatggcagagctag

SEQ ID NO: 233957 - DNA, 543 bp, synthetic construct
  misc_feature 1..543: note = Description of Artificial Sequence: Synthetic coding sequence
  source 1..543: mol_type = other DNA
atgctgggactgtggggtcagagactgcctgctgcctgggtgcttctgttgcttccattcctgcccctcctccttctggccgcacccgctcctcatcgggcttcctacaaacccgtcatcgtcgtccatggactgtttgatagcagttatagcttccgccaccttctcgaatatataaatgaaacccacccgggtactgtcgtcacagtgcttgacctgtttgatggtagagagtccctgcgtccactgtgggaacaggtgcagggctttcgcgaggcagtggttcctatcatggcgaaggcccctcagggggttcacctgatatgctactctcaaggaggacttgtctgtcgggctctactgtccgttatggacgaccataacgtagactctttcatcagtctgagttccccacaaatgggtcaatatggggacactgattatctcaagtggttgtttccaacgtccatgcggtcaaatttgtatagaatctgctactccccttgggggcaggagtttagtatttgtaattactggcactag

SEQ ID NO: 233958 - DNA, 909 bp, synthetic construct
  misc_feature 1..909: note = Description of Artificial Sequence: Synthetic coding sequence
  source 1..909: mol_type = other DNA
atgcttggtctttgggggcaacgccttccagccgcttgggtgttgctgcttctgcctttccttccactcctgctgctggctgcacccgctccacaccgagcgtcatataagcctgtcatcgtggtgcacggactgttcgactctagctatagcttcaggcatctgctggaatatataaatgaaacacatccgggaacagttgtcacagtcctggatctgtttgacggcagagaatccctgcgacccctctgggagcaggtgcaaggattcagagaggccgtggtgccaatcatggctaaagcccctcagggcgtccatcttatttgctattcccagggcggtctggtgtgcagagctttattaagtgtgatggacgatcataacgtcgatagctttatcagcttgtcaagcccccagatgggtcagtatggggacacagattacctgaagtggcttttcccgacctccatgcggtccaacctgtatcgcatttgctactctccctggggccaggagttcagcatctgcaactattggcacgacccccatcacgatgacctttatctgaacgcgagcagtttcctggcactgatcaacggcgagagggatcaccccaacgcgactgtctggcgaaaaaacttcctgcgcgtgggtcacctggtactgatagggggaccagatgatggcgtaatcactccttggcagagtagttttttcggcttctatgatgccaatgaaaccgtcctcgagatggaggaacagctcgtttatctgcgcgattcttttggcttgaagaccctcctagcgcgaggtgcaatcgtgcggtgtcctatggctggaatttcccacacagcctggcactctaataggaccctatatgaaacttgcattgaaccctggctatcctag

SEQ ID NO: 233959 - DNA, 909 bp, synthetic construct
  misc_feature 1..909: note = Description of Artificial Sequence: Synthetic coding sequence
  source 1..909: mol_type = other DNA
atgcttggtttatggggacagagactgccagccgcttgggttttgttactgcttcctttccttccattactcctgttggcagcccctgcccctcatcgcgcttcctacaagcccgtcatcgtggttcacggattatttgattcaagctattcgtttcgtcacttgttggagtatattaatgaaacccatcccggaacggtagtgaccgtgctggacctgtttgatggcagggagtcccttcgaccattgtgggaacaggtacagggctttagggaggcagttgttccgatcatggccaaggctccacaaggcgttcacctcatttgctacagccaagggggtctggtgtgtagggcactgctgtcggtgatggatgatcacaacgtcgactccttcatcagtctatcttctccacagatggggcaatatggggatacggactacctgaaatggctgttcccaacctccatgaggtcaaacctgtaccgcatttgctatagcccatggggccaggaattttcgatatgcaattactggcacgatccacatcacgatgacttgtatttgaacgcaagttcctttttagcgctgatcaatggggagagagatcatcccaatgccacagtctggagaaagaattttctaagagtgggtcatttggttctcattgggggacccgacgacggcgtgataaccccctggcagtcatcgttttttgggttctatgacgcgaatgagacagttcttgagatggaggaacaactggtgtacctgcgagatagtttcggtttgaagacactgcttgctcgtggagccattgtacgctgtccaatggcaggcatcagtcacactgcatggcactctaatcgaactttatacgaaacctgtatagagccttggttgagctag

SEQ ID NO: 233960 - DNA, 927 bp, synthetic construct
  misc_feature 1..927: note = Description of Artificial Sequence: Synthetic coding sequence
  source 1..927: mol_type = other DNA
atgaagagctgcgggtctatgttgggactgtggggtcaaagattacctgccgcttgggtcttgctcttattaccattcctacccctactgctgttggccgctcccgcacctcatagggcctcctacaaaccagtgatcgtcgttcacggcttgttcgactcctcatacagctttcggcatctcctggagtatataaacgagactcacccaggaactgttgttaccgtcttagatttgttcgacggaagagaatctctgcggcctctttgggagcaggtgcagggcttccgcgaggcagtcgtccctatcatggcgaaagcccctcagggtgtgcacctcatttgctacagccagggtggattagtctgccgcgctcttctcagcgtgatggacgaccacaacgtcgattcctttatcagcctgagttcaccccagatgggtcagtatggggacacggactacttaaagtggttgttcccaaccagtatgcgtagcaacctctatcgaatatgttactctccttggggccaggaattttctatttgcaattactggcatgatcctcaccacgatgacttgtacttgaacgcaagctcctttctggctctgattaacggggaaagggaccatcccaacgctaccgtttggcgcaaaaatttccttcgcgtgggtcacttggtgctaattggaggcccagacgacggtgtgatcacaccgtggcaatcttctttttttggattctatgatgcgaacgagactgtcctggagatggaagagcagctggtttacctaagggattcgtttggactcaagacactgctggcgaggggagctatcgtcagatgtccgatggctggtatatcccacaccgcatggcatagcaatagaacgttgtatgagacatgcatagagccatggctctcctag

SEQ ID NO: 233961 - DNA, 282 bp, synthetic construct
  misc_feature 1..282: note = Description of Artificial Sequence: Synthetic coding sequence
  source 1..282: mol_type = other DNA
atgctcggcctctgggggcagcgactgccggctgcctgggttcttctgctgctgccttttttacctctgctgcttttagccgcacccgctccacatcgtgcttcctataaaccggtgatcgtcgtccacggcctcttcgatagcagctatagttttagacacctcttagagtatatcaacgagggagctttgtgtgctggcctctgctttctgtcctggatgattaccacttggatcctgtcctctccatcgccgctgcacagatgggacagcatggaatag

SEQ ID NO: 233962 - DNA, 909 bp, synthetic construct
  misc_feature 1..909: note = Description of Artificial Sequence: Synthetic coding sequence
  source 1..909: mol_type = other DNA
atgctcggactgtggggacagagactgccagctgcctgggtcctccttctgctcccatttttacccctattgcttctggccgctccagccccacaccgggcttcatacaagcctgtgattgtggtgcacggactgtttgactccagctactcatttcgccacctgcttgagtacattaacgaaactcatcctggcacagttgtcaccgtgctggacttgtttgatggaagggagagcttgcgccctctgtgggagcaagtccagggcttccgtgaagctgtcgttcctatcatggcaaaggctccgcagggtgtccacctgatctgctacagccagggcggactggtgtgcagagccctcctgagtgtgatggacgatcataacgtggacagcttcatctccctgtcttcgccgcagatgggccaatacggagatacagattacctaaagtggctcttccccaccagtatgcggtccaatctttatcgtatttgttattctccatggggacaggagttctctatatgcaattactggcatgacccgcaccacgatgacctttatcttaacgccagctcatttctagcgttgattaacggggagcgtgatcaccctaatgcaaccgtgtggagaaagaacttcttaagagttgggcacctcgtgttgattgggggaccagacgatggcgtcattacgccttggcagagcagcttttttgggttctatgatgccaacgagaccgtactggagatggaagaacaactggtttatcttcgtgatagcttcggactgaagacactcctggccaggggggctattgtgcggtgtcccatggcgggaatttctcacactgcatggcactcaaacaggaccctatatgagacctgcatcgaaccatggctgtcatag

SEQ ID NO: 233963 - DNA, 477 bp, synthetic construct
  misc_feature 1..477: note = Description of Artificial Sequence: Synthetic coding sequence
  source 1..477: mol_type = other DNA
atgctgggcctctgtgggcagaggttgccggcagcttgggtcctattactgcttcctttcttacccctgctgctcctcgcagccccagcgcctcacagggcctcatacaagcccgtgattgtggtgcatggactgtttgactcatcctactccttcagacacctcctcgagtacatcaatgagatggggcagtacggggataccgattacctaaaatggctgtttccaaccagtatgcggtccaatctgtataggatttgctactccccatgggggcaggaattttccatctgtaactattggcatgacccccatcatgacgacctatatctgaatgcctcttcgtttctggccctcatcaacggggaacgcgaccatccaaatgcaaccgtgtggcgaaaaaatttcttgagggttgggcacttggtgcttatagggggtcccgacgatggcgtgatcactccttggcaatcctag

SEQ ID NO: 233964 - DNA, 711 bp, synthetic construct
  misc_feature 1..711: note = Description of Artificial Sequence: Synthetic coding sequence
  source 1..711: mol_type = other DNA
atgctggggctatggggccagcgactccccgctgcttgggtcctgctgctgctgcctttcttgccgcttctcctcctggctgccccagcgccacacagagagagttacaaacccgtgattgttgtgcatggactgttcgattctagttacagctttcggcatctcctcgaatacataaacgaaacccatcctggcaccgtagtgacggttctcgatctcttcgatggccgagagagtctacgtcctctctgggagcaggtccagggatttcgggaggccgtagtccccattatggcaaaggcacctcagggtgttcacctgatttgttactcgcaggggggactcgtttgtcgagcccttttgtccgtaatggacgaccataatgtggactctttcataagcctgtcgtcaccccagatgggccagtatggagataccgactacttgaagtggctgttcccaaccagtatgagatctaatttataccggatttgctactcaccctgggggcaagaatttagtatttgtaactactggcatgatccgcatcacgatgatctgtacctgaacgcctccagcttcctcgcactgattaatggtgaaagagatcatccgaacgccaccgtgtggagaaagaatttcctgagagttggacatctggtgctgatcggcggtcctgacgatggcgtaatcaccccttggcagtcctag

SEQ ID NO: 233965 - DNA, 543 bp, synthetic construct
  misc_feature 1..543: note = Description of Artificial Sequence: Synthetic coding sequence
  source 1..543: mol_type = other DNA
atgttaggactctggggccagcgtctacctgccgcttgggtcctgctgctgctgcctttcctcccccttttgcttttggctgcccctgctccacatcgcgcatcgtataaacccgtgattgtggtgcatgggctctttgactctagctatagtttcagacacctcctggagtatatcaacgagacccacccaggaacagtagtaacagtgctagatctgttcgatgggagagagtccctccgcccactgtgggaacaggtgcagggttttcgagaggctgtggtaccaatcatggccaaagctcctcagggcgtgcacctgatctgttattcgcaagggggactcgtatgccgtgctttgttgtcagtcatggatgatcataatgtggacagcttcatctccttgtcatcccctcagatggggcaatacggcgataccgattatctcaagtggttatttccaacatctatgaggtcaaacctgtacaggatctgttacagcccatggggacaggaattttctatttgcaattactggcattag

SEQ ID NO: 233966 - DNA, 711 bp, synthetic construct
  misc_feature 1..711: note = Description of Artificial Sequence: Synthetic coding sequence
  source 1..711: mol_type = other DNA
atgctgggactgtgggggcagcgactcccggctgcctgggtactcctgctccttcctttcctgccactgttacttctggcggcaccagcaccgcatcgcgaaagctataagccagtcatcgtggtgcatggtctcttcgactcatcatactccttcaggcatctcctggaatacatcaatgagactcaccccggtaccgtggtaacagtgctggatctgtttgatggaagagagtctctacgcccactgtgggagcaggtgcaggggttccgggaagccgtggttccgataatggccaaagctccccagggcgtccatctaatctgttattcccaaggaggtcttgtgtgccgagctctcctctcagtgatggacgatcataatgtcgacagcttcattagcttaagttcaccccagatgggccagtatggagacacggattatctgaaatggctgttccctacttcgatgcgaagtaacctataccgcatttgttacagcccttggggtcaggagttttcaatctgtaactattggcatgacccccaccacgatgacctgtatctgaacgcatcctccttcctggctctaattaatggtgaaagggatcatcccaacgccaccgtctggaggaagaacttcctccgtgtgggccacctggtgctgatcggaggtccagacgatggagtcattacaccatggcagagctag

SEQ ID NO: 233967 - DNA, 603 bp, synthetic construct
  misc_feature 1..603: note = Description of Artificial Sequence: Synthetic coding sequence
  source 1..603: mol_type = other DNA
atgctcggcttatggggacagcggttgcctgccgcatgggtcctgttgctcttaccgttcttgcctctgctgcttctggccgctcccgctccccaccgcgctagttataaaccggtgatcgtggtacatggcttgttcgattccagttattccttccggcacttgttagagtacatcaacgagactcatccaggcaccgtcgttaccgtgctcgatctgtttgacggcagagaaagcctgaggcctctgtgggagcaggttcagggttttagagaggccgtggtccctattatggcgaaggcgcctcagggagtgcatcttatctgctatagccagggcggattggtgtgcagggctctgctcagcgttatggacgaccataacgttgactcgtttatcagcttgagctcccctcagatgggacagtacggcgacacagactacctgaagtggctcttcccaaccagtatgcgctctaacttgtaccgaatctgttatagcccatgggggcaggagtttagtatctgtaactactggcatgatccccatcatgacgacctttacttgaacgctagcagctttctcgcactgatcaatggctag

SEQ ID NO: 233968 - DNA, 909 bp, synthetic construct
  misc_feature 1..909: note = Description of Artificial Sequence: Synthetic coding sequence
  source 1..909: mol_type = other DNA
atgctcggtctatgggggcaaaggcttcccgcagcgtgggttcttctcttgctgccttttctgcctcttttgctgctcgccgcaccagcaccccaccgagcaagttacaagcctgtgatcgttgttcatggtctattcgacagtagctacagcttccggcacctcttggaatatatcaatgaaacacaccctggcactgtcgtcactgtcctggacctgttcgatggccgagagagcctgagacctctgtgggagcaagtccaggggtttcgggaagctgtagtgcccataatggccaaggccccacaaggcgtccacctgatatgttacagccagggtggacttgtttgtcgggcactgttgtccgtgatggacgatcacaatgtggatagcttcattagcctcagttcaccccagatggggcagtatggtgacaccgattacctgaaatggttatttccaacttcgatgaggtccaatctgtaccgcatatgctactcaccttggggccaggagtttagcatttgcaactactggcacgacccacaccatgacgatctgtatttgaacgcctccagcttcctcgctctgataaacggtgaacgagaccacccaaatgccacagtttggagaaagaactttttacgcgtcggccacttggtgctcattggcggaccagacgacggcgtcataacaccctggcaatcgtctttttttgggttttacgatgcgaatgagaccgtcctagagatggaggaacagctcgtgtacctacgggattcttttggcctcaagaccctattggccagaggcgcaattgtgcgctgccctatggcgggaatcagccacaccgcctggcattcaaatcggaccctctacgagacatgtatagagccttggctcagttag

SEQ ID NO: 233969 - DNA, 603 bp, synthetic construct
  misc_feature 1..603: note = Description of Artificial Sequence: Synthetic coding sequence
  source 1..603: mol_type = other DNA
atgctcggtctatggggtcagcggcttccagccgcatgggtgttgctgcttctgccattcctgccgctgctacttttggcagcacccgcaccacaccgcgcttcctataaacccgtcatcgtcgtccatggactgtttgattcctcctacagcttccgccatttgctcgaatacatcaatgaaacccacccgggaaccgttgtaactgtactagatctgttcgatggacgggagtctcttcggcctttgtgggaacaagtgcaaggcttccgagaagctgtagtccctatcatggcaaaggctccacagggagttcacctgatttgttacagccagggtgggctggtatgtcgagccctgttaagcgttatggatgatcacaacgttgattccttcatcagcctgtcttccccgcagatggggcagtacggcgacacggactacctcaagtggttgttccccactagcatgagatcaaacctctacaggatttgctactccccatgggggcaggaattctcgatctgtaactattggcatgatccacatcacgacgacctttatctcaatgcaagttcctttctggccctaatcaatggctag

SEQ ID NO: 233970 - DNA, 729 bp, synthetic construct
  misc_feature 1..729: note = Description of Artificial Sequence: Synthetic coding sequence
  source 1..729: mol_type = other DNA
atgaaaagctgcggctccatgctggggctgtgggggcagagactgccagcagcctgggtgctcttattactcccttttctgcctcttctgttgctagccgctcccgcacctcaccgggaatcttacaaacccgtcatcgtagtccatggtttgtttgattcatcatacagttttcgacatcttcttgaatatattaatgaaacacacccgggaaccgtggtcactgtgctggatctcttcgacggacgggagtcactgcggccattatgggagcaagtccaagggtttcgtgaagcagttgtgccaattatggcaaaggcccctcagggggtgcatctgatctgttattcacaaggagggttggtctgccgggctctgctgtccgtgatggacgaccataacgttgattcctttatcagcctttcctctccgcagatgggacaatacggagacaccgactatcttaagtggctcttccccacctctatgcgttccaacctatacagaatctgctactctccatggggacaggagttctcgatttgcaactactggcatgatcctcaccatgatgatctgtacctgaatgcgagtagcttcctggcactcatcaacggcgaaagagatcatccaaacgctactgtatggcgcaaaaattttctgagagttggacatttggtgctgatcggcggacccgacgacggggtgattacgccctggcagtcatag

SEQ ID NO: 233971 - DNA, 711 bp, synthetic construct
  misc_feature 1..711: note = Description of Artificial Sequence: Synthetic coding sequence
  source 1..711: mol_type = other DNA
atgctcggcctttggggacagcgcctcccggcagcctgggtcctcctgctgctcccattcctccccctcttgttgctggccgctcccgctcctcatcgggagtcatacaaacccgtcattgtagtgcacgggctttttgatagcagctacagctttagacacttattggagtatataaatgagacccacccagggacagtcgtgaccgtgctcgacttgttcgacggcagggagtcactaagacctttatgggaacaggtgcagggctttcgcgaagctgtcgtgccaatcatggcaaaggctccacagggcgtacatctcatttgctatagccagggtgggctggtctgccgtgctttgttatctgtgatggacgatcacaatgtggacagctttatttctctctcttcacctcagatggggcaatacggagacactgattatttgaaatggctttttcccacgtccatgcggtctaatctgtatagaatctgttacagtccatgggggcaggaattttcgatctgcaactattggcacgatccccatcacgatgatctttacctgaacgcctcatcctttctcgcattgatcaatggggaaagagaccaccctaacgctacagtgtggaggaagaattttctcagagtgggccatctggtgctgatcggcggacctgatgacggcgtgataaccccctggcagtcttag

SEQ ID NO: 233972 - DNA, 543 bp, synthetic construct
  misc_feature 1..543: note = Description of Artificial Sequence: Synthetic coding sequence
  source 1..543: mol_type = other DNA
atgttaggattatggggccaaagattacctgccgcatgggttttactgctactgccctttctccccctgttactgctggctgcaccagcccctcacagagccagctataaacctgtgatagtggtgcacggcttgtttgattcttcctacagtttccggcatctgctggaatatatcaacgagactcatccgggaacggtggtgacagtactggatttgttcgatggcagggaaagcctgaggcccctgtgggagcaggtccaagggttccgtgaggcggtggtgcctatcatggcgaaggcacctcagggggttcacttaatttgttatagccagggaggcttggtgtgccgcgctctactatctgtcatggatgatcacaatgtggatagcttcatctcactctcttctccacagatgggccagtacggggacacagactatttgaaatggttgttccccacatctatgcgcagcaatttataccggatctgttactccccgtggggccaggaattctcaatatgtaactattggcactag

SEQ ID NO: 233973 - DNA, 477 bp, synthetic construct
  misc_feature 1..477: note = Description of Artificial Sequence: Synthetic coding sequence
  source 1..477: mol_type = other DNA
atgctcggtctgtggggtcagcggctgcccgctgcatgggtgctccttctgctgcccttcttgccattattattattagcggctcctgcaccacaccgggcttcatacaaacctgtcatagtggtacatggtttgtttgattctagctatagttttagacacctgctggagtatatcaacgaaatgggacagtatggagacacggattacctcaaatggctttttcccacatcaatgaggtccaacctctataggatctgctacagcccctggggtcaggagttcagcatttgcaactactggcacgatcctcaccatgacgatctgtatctgaatgcctccagttttctggctctgatcaatggggagcgcgatcatcccaacgccaccgtctggcgcaagaattttctgagggtcgggcatctggtactcatcggaggaccagatgacggggttattaccccatggcagtcttag

SEQ ID NO: 233974 - DNA, 603 bp, synthetic construct
  misc_feature 1..603: note = Description of Artificial Sequence: Synthetic coding sequence
  source 1..603: mol_type = other DNA
atgttgggtctgtgggggcaacgtctacctgccgcatgggtgctactgcttcttccctttcttcccttgctgctcctggcggcacccgctccacatagagaatcttacaagcctgtgattgtggttcacggtctgtttgacagctcctactcattcagacacctcttggagtacataaacgagacccacccagggaccgttgtgactgtgctcgatctcttcgatggcagggagagtctgcgtcccctctgggagcaagtgcaaggcttccgcgaagccgttgttcctatcatggctaaagcgccacagggggtccaccttatttgctacagccagggaggcttggtttgtcgcgcactgctttcggtcatggatgatcataacgtcgactccttcatctccctcagctcacctcaaatgggacagtacggtgatactgactacctgaaatggctgttccctacttcaatgagaagcaacctttatcgtatctgttatagcccgtggggccaggagttctccatctgcaactactggcacgatccacatcatgacgatctctatctcaacgcctctagtttcctcgcactcatcaatgggtag

SEQ ID NO: 233975 - DNA, 603 bp, synthetic construct
  misc_feature 1..603: note = Description of Artificial Sequence: Synthetic coding sequence
  source 1..603: mol_type = other DNA
atgcttggcctgtgcggtcagagactgcctgctgcatgggtcctgctgctgctcccatttcttccactgcttctactagctgcacccgctccgcatcgtgcctcctacaagcctgtgatagtggtacacggactttttgacagctcctacagctttaggcatttgctggaatacatcaacgaaacacatcccggtacagtggtcacagttctggacctgtttgacgggagagaaagtctccgtcccctgtgggagcaggtgcagggattccgtgaggccgtggtgcccatcatggcaaaggcgcctcagggggttcatctgatttgttactcgcagggagggctggtgtgccgtgcccttctgagcgtgatggacgatcataatgtggattctttcatttctctgtcctcaccccagatgggtcagtacggggacacagattacctaaagtggcttttccccacgagtatgcgatctaacctgtatcgcatctgctactctccctggggccaggaattttctatatgcaactactggcacgatccacaccatgatgatctgtacctgaacgccagttcctttctggccctgatcaatggctag

SEQ ID NO: 233976 - DNA, 441 bp, synthetic construct
  misc_feature 1..441: note = Description of Artificial Sequence: Synthetic coding sequence
  source 1..441: mol_type = other DNA
atggatgaccacaacgtggattcatttatcagcctgagttctcctcaaatgggccagtatggtgatactgactacctcaagtggctgttccccacctcaatgagaagcaacctgtacagaatctgctactctccatggggacaagaattttcaatttgtaactattggcacgatccacatcatgatgacttgtatctaaatgcctcttcattcttagccctgatcaatggtgaaagggaccatccaaatgccactgtttggaggaaaaacttcttacgagtcgggcacctcgtacttattggaggcccagatgatggagtgatcacgccctggcagagctctttttttggcttctatgatgccaatgagaccgtgttggagatggaggaacagttaccagtggggtcctctgtgaaggccaatcacggagtgcagggttag

SEQ ID NO: 233977 - DNA, 477 bp, synthetic construct
  misc_feature 1..477: note = Description of Artificial Sequence: Synthetic coding sequence
  source 1..477: mol_type = other DNA
atgctcggattgtggggccagagactgcctgccgcttgggtcctgttattgctgccgttcttgccacttctactcctggctgcaccagctccacaccgggcatcatacaagcccgtgatcgtagttcatgggttgttcgacagtagttattcattcagacatctcttggagtatataaacgaaatggggcagtacggtgacacagattaccttaaatggttgtttccgaccagcatgaggagtaacttatatcgcatttgttacagtccatggggacaagagttctccatttgcaactactggcatgacccacatcacgatgatctctacctcaatgcctcttcctttcttgcgttaattaacggagaacgcgaccacccaaacgccacagtttggcgcaagaattttctccgggtgggtcatctcgtactaatcggaggcccagacgatggcgtgattaccccttggcagagctag

SEQ ID NO: 233978 - DNA, 909 bp, synthetic construct
  misc_feature 1..909: note = Description of Artificial Sequence: Synthetic coding sequence
  source 1..909: mol_type = other DNA
atgctcgggctctggggacaaaggttaccagctgcttgggtgcttctcctgcttccattcctgccactccttcttcttgcggctcctgcacctcaccgagccagttacaaacctgttatagtggtgcacggactgttcgatagttcttactcattcaggcacctactggagtatatcaatgagactcatccgggaactgtagtgaccgtgctcgacctgttcgacggcagagaatcactgcgccctctgtgggagcaagtgcaaggcttccgcgaggcagttgtccccatcatggctaaagctccccaaggcgtccatttaatatgctattctcaaggcggactggtgtgtagggccttattgtcagtcatggatgatcataatgtggattcatttatctctctcagttctccacagatgggtcagtatggagacacagattacctcaagtggcttttcccgacctccatgcgtagcaatctttaccggatttgctacagcccctggggccaggaatttagtatatgcaactattggcacgatccccaccatgacgacctctatttgaatgcgagcagtttcctggccctgatcaatggggagcgtgatcaccctaatgctaccgtttggagaaaaaattttctccgcgtgggccacctggtcctgatcgggggacctgatgatggggttatcaccccttggcagagcagcttttttgggttctacgatgcaaacgaaacagtcctcgagatggaggagcaacttgtgtacctaagagattcgttcggattgaagactctgcttgctcggggagcgatcgtgaggtgtccaatggctgggatatctcataccgcctggcactctaacagaactctctacgaaacctgcattgaaccatggctatcctag

SEQ ID NO: 233979 - DNA, 909 bp, synthetic construct
  misc_feature 1..909: note = Description of Artificial Sequence: Synthetic coding sequence
  source 1..909: mol_type = other DNA
atgctagggctgtgggggcaaaggcttccagcggcatgggtcctgctgctgctgccatttctgcccttactgctcttggcagcccctgccccacatagggcttcttacaaacccgtgattgtcgtccacggcttatttgattcaagctacagctttaggcacttgcttgaatacatcaatgaaacccacccaggcacagtggtgaccgtgctggacttgttcgacggtcgagaatccctaaggcccctctgggagcaggtgcaggggttccgcgaggctgttgtcccgatcatggcaaaagctccccaaggcgtgcacctcatctgttatagccagggcggactggtgtgcagggctctgctgagcgtcatggatgatcacaacgtcgactcttttatcagtctctcctctccacaaatgggacagtatggggacacggattatctgaaatggctgtttcctactagcatgagaagcaacctgtacagaatatgctactctccgtggggccaagagttcagtatctgtaattactggcacgacccgcatcatgatgatctctacctgaacgctagctcatttctcgcactcatcaatggagagagagaccatcccaacgctaccgtatggaggaaaaacttcctcagagtgggtcaccttgtcctcatcggcggaccggacgacggagtcataaccccatggcagagtagtttctttggcttctacgacgcgaatgaaacagtgctggaaatggaagagcagctggtatacctgcgagacagcttcggtctaaagaccctgcttgccagaggagcaattgtgcgatgtccaatggctggtatatctcatactgcttggcacagtaataggacgctgtacgagacctgcatcgagccctggttgagctag

SEQ ID NO: 233980 - DNA, 909 bp, synthetic construct
  misc_feature 1..909: note = Description of Artificial Sequence: Synthetic coding sequence
  source 1..909: mol_type = other DNA
atgttgggcctatgggggcagaggttgccagccgcttgggtgctgcttttgctaccattcttacctttactgctgcttgctgccccagccccacaccgggcaagctataaaccagtcatcgtcgtccacgggcttttcgacagctcctacagtttccgccacttgctcgagtacatcaatgaaactcaccccggtaccgtggtgactgtgctggatctattcgatggaagagaatccctgcgcccattgtgggagcaggtgcagggctttagagaagccgtagtcccaatcatggccaaagcaccacagggcgtccacctcatctgttattcccaagggggtttggtctgtcgggctctcttgagtgtgatggacgaccacaatgtcgattcatttatttccctatcttccccacagatggggcagtacggcgataccgactatctgaagtggcttttccccacctcaatgcggtccaatttgtatcggatctgctacagcccttgggggcaggagtttagtatctgtaattattggcatgacccccaccacgacgacctgtatctgaacgcaagctccttcctcgctcttattaacggggagcgcgaccacccaaacgcgacagtgtggaggaagaattttcttagggtgggtcacctggtgctgattggcggacctgatgatggcgtgatcaccccttggcaatcctccttctttggcttctatgacgctaacgaaaccgtcctggagatggaggaacagctcgtttatttaagagacagcttcggactcaaaactttgctcgctaggggagctattgttcgttgtcccatggccggaatcagtcacaccgcatggcatagtaatcgcaccctttacgagacatgtattgagccatggctgtcctag

SEQ ID NO: 233981 - DNA, 282 bp, synthetic construct
  misc_feature 1..282: note = Description of Artificial Sequence: Synthetic coding sequence
  source 1..282: mol_type = other DNA
atgctcggcctgtggggtcagcggttgcctgctgcctgggttctgctcttacttccttttctcccactcctcctattagctgcccctgctccccaccgtgaaagctacaagccagtcatcgttgttcacgggctgttcgactcgtcctattcattccggcatctgctggaatacatcaacgaaggagctctgtgtgctggcttatgtttcctgtcatggatgattaccacttggatcctgtccagtccctcacccctccatcgctgggattcgatggaatag

SEQ ID NO: 233982 - DNA, 603 bp, synthetic construct
  misc_feature 1..603: note = Description of Artificial Sequence: Synthetic coding sequence
  source 1..603: mol_type = other DNA
atgttggggctttggggtcaacgtcttcccgctgcatgggtgctcctgctgctccccttcctcccacttctgctcttagctgcgcctgctccccaccgagcgagttacaagcctgtcatcgtggtgcacggtttgttcgactcttcatatagctttcgccacctgttagagtatatcaatgaaacacacccagggacggtggttactgtcctggatctgtttgatgggcgtgagtcactaagaccattatgggaacaggttcaggggttccgagaggctgtcgtcccaattatggcaaaagccccacagggagtgcatcttatttgctacagtcagggcggactggtgtgccgggctcttctctcggtcatggacgatcataacgttgattcctttataagcctgagctctccccaaatggggcaatacggcgacaccgattacttgaagtggctctttcctacatcgatgagatccaacctttatcggatttgttatagcccttggggacaagaattctccatctgtaactactggcatgacccgcatcacgacgacctttacctgaatgctagttcatttctagccttgatcaacggctag

SEQ ID NO: 233983 - DNA, 603 bp, synthetic construct
  misc_feature 1..603: note = Description of Artificial Sequence: Synthetic coding sequence
  source 1..603: mol_type = other DNA
atgctgggcttgtgggggcagcgcctgccagccgcatgggttctgctgttgctgccttttctgccactgctcttgcttgctgccccagctccccaccgcgcaagctacaagccagtgatcgtagtccatggcctgttcgattcatcctactcttttaggcacctgttagagtacatcaatgaaacccaccccggtaccgtggtgacagttttggatctgtttgatggcagagagtcgctaagacccctctgggaacaggtacagggctttcgcgaggcagtagttcctattatggctaaagctccccagggagtgcacctaatttgctacagccagggaggtctcgtctgtcgcgcattactgtccgtcatggacgaccacaacgtcgatagtttcatttcactttcatccccgcagatgggacagtatggcgatacggattatctgaagtggttattccctaccagtatgcggagcaacttgtatcgtatctgctacagcccttggggtcaagaattctctatctgcaactactggcatgatccccatcacgacgacctgtacctcaacgccagttcttttctggccctgataaacggctag

SEQ ID NO: 233984 - DNA, 909 bp, synthetic construct
  misc_feature 1..909: note = Description of Artificial Sequence: Synthetic coding sequence
  source 1..909: mol_type = other DNA
atgctaggcctctggggccagagactgcctgccgcatgggttcttctgcttcttccattcctccccctgttgcttctcgctgcacctgctccacaccgggcttcgtacaagcctgttatagtcgtccatgggcttttcgatagttcttactcatttcgccatctcctggagtacatcaacgaaacacatccaggtacagtggtgacagtgctcgacctgtttgacggcagagagtcgctgaggcccctttgggagcaagttcaggggtttcgagaagcagtagtgccgatcatggccaaggcaccccagggcgtacacctcatttgttactcccagggcggacttgtgtgtagggcactcctttccgtgatggatgatcacaatgtagatagcttcatttcgttgtctagccctcagatgggccagtatggcgatacagactatctgaaatggctgtttcctaccagcatgaggtcaaacctctataggatctgctacagtccctggggccaagaatttagcatttgcaattactggcatgatcctcaccacgacgatctgtacctgaacgcttccagcttccttgcccttattaatggagagagggatcatcctaatgctacagtttggcgaaaaaattttctgagagtgggacacttggtgctaatcggcggaccagacgatggcgtcataacaccttggcagagctcgttcttcggcttttatgacgccaacgagacggtgctcgaaatggaagagcagcttgtgtatttacgtgactcctttggcttgaaaacattgctggctcgaggagcgatcgtccgatgtcccatggccggaatttcccatactgcatggcattccaataggaccctgtacgagacctgcatagagccatggctgagctag

SEQ ID NO: 233985 - DNA, 906 bp, synthetic construct
  misc_feature 1..906: note = Description of Artificial Sequence: Synthetic coding sequence
  source 1..906: mol_type = other DNA
atgttagggctgtgtggccaaaggttgcctgccgcttgggttctactactgctgccttttctaccattactgctgctggcggcaccagcgcctcacagagcgtcttacaaaccagtgatcgtggtgcatggcctatttgacagctcctacagcttcagacatctgcttgagtatataaacgaaactcacccaggcaccgtggtgactgtgctggatcttttcgacgggcgtgaatccctgcgtccgttatgggagcaagtacaaggctttcgggaggctgtcgtgccaatcatggcaaaggccccacaaggagtacatctgatttgttatagccagggcggactggtgtgtcgtgccctactgtcagtgatggacgatcacaatgtggacagctttatctcactttcttcccctcagatgggacaatacggcgacacggattatctgaagtggctctttcctacctcaatgagatccaacctgtatagaatttgttatagtccttggggccaggagttctccatttgtaactactggcatgacccgcatcatgacgatctgtatcttaacgcttcctctttcctcgcgttgatcaacggcgaaagggaccaccccaacgctacagtctggcgaaaaaattttctccgtgtggggcacctcgtgctgataggcggacccgacgatggagttatcaccccctggcagagttcgtttttcggcttttacgatgctaatgagaccgttctggaaatggaggaacaactacccgcacgcccaacacatcaatcagaacttttacttctcagactggtgtgccttaagccgccacggcgaaaaaagcccgcatgtcgcgtgcagcgacaatcagagagctggggtcctggtttgtcgtgcgcacttagttag

SEQ ID NO: 233986 - DNA, 477 bp, synthetic construct
  misc_feature 1..477: note = Description of Artificial Sequence: Synthetic coding sequence
  source 1..477: mol_type = other DNA
atgctgggtctgtgggggcagcggctgccggctgcttgggtcctcctccttctgccctttctgcccctgttgctactggctgctcccgctccccaccgggagtcctataaacctgtcattgtggttcatggcctatttgactcctcttatagctttcgtcatctgctggaatacatcaacgaaatggggcagtacggggacaccgattatctcaaatggctgtttcctacaagtatgcgctctaacctctaccgaatttgttattctccatggggccaggagttctccatttgtaattattggcacgacccccaccatgacgatctttacctcaatgcgagctcttttctcgccctgatcaatggggaaagagatcatcccaatgccacagtttggcgcaaaaactttctgagagttggccaccttgtcctcattggtggccctgacgacggcgtgattacaccttggcaatcgtag

SEQ ID NO: 233987 - DNA, 543 bp, synthetic construct
  misc_feature 1..543: note = Description of Artificial Sequence: Synthetic coding sequence
  source 1..543: mol_type = other DNA
atgttggggctgtgggggcaacgccttcctgctgcatgggttctgcttttactccccttcctgcctttgttgctcctcgcagctcctgccccacatagagctagctataaacctgtgatagtggtccacggattattcgactccagttactcgtttcgccatttgcttgagtacattaacgaaacacatcccggaactgtggtcaccgtgctcgacctgtttgacggaagagaaagtctgcgacctctatgggagcaagtccaaggcttcagggaagctgtggttccgattatggcgaaagcaccgcagggcgtgcacttgatttgctacagccaagggggactggtgtgcagggccctcctgtcagttatggatgaccacaatgttgattctttcattagtttgagcagtccacaaatgggacagtacggcgatactgattacttaaaatggctctttcctaccagcatgcgaagcaatttatacaggatctgctactccccttggggacaggagttctccatctgcaattactggcactag

SEQ ID NO: 233988 - DNA, 603 bp, synthetic construct
  misc_feature 1..603: note = Description of Artificial Sequence: Synthetic coding sequence
  source 1..603: mol_type = other DNA
atgctgggcctgtggggacaacgcctccctgccgcatgggtgttgctgctgttgcccttcttgcctctgttgctgttagccgcacctgcaccacacagagcctcttataagcccgtcattgtggttcacggactcttcgactccagttactcgttccgtcatctgctcgaatacattaacgaaacccacccaggaacagtagtgaccgtgctggatcttttcgatgggcgtgagtctctccggccattgtgggagcaagttcaaggcttccgcgaggccgtggtgcctatcatggcaaaagctccccagggcgtgcacctaatctgctattcgcaggggggtctggtgtgcagagcccttctgtcagtgatggatgaccacaacgttgactcattcatatcactgagtagccctcagatgggacaatacggcgacaccgattatttgaaatggctgttccctacttcaatgaggagcaacctctaccgcatttgctactctccgtggggacaggaattttctatttgtaactactggcatgacccccaccacgatgatctctacctgaacgccagctccttcctggccttgatcaatggctag

SEQ ID NO: 233989 - DNA, 909 bp, synthetic construct
  misc_feature 1..909: note = Description of Artificial Sequence: Synthetic coding sequence
  source 1..909: mol_type = other DNA
atgctgggactttggggtcagcgcctgcctgcagcctgggttcttctgctccttccttttctgcctctccttctgctggctgcaccagcgcctcatcgtgcttcatacaaacctgtgatcgtagtccacggcctattcgatagttcctattcgtttcgccatctacttgagtatatcaacgagactcacccagggaccgtggtaacagtactcgatttatttgacggcagagagtcccttcgacccctttgggagcaagtgcaaggttttcgggaagccgtagtgccaatcatggccaaggctcctcagggcgtgcacttgatctgttactcccagggcggtttggtgtgcagagcgctcctctccgtaatggacgaccataacgtcgacagctttatttctctatcttctccacaaatgggacagtacggtgatactgattatctcaaatggctattcccaacctccatgcgcagcaatctgtatcgaatatgttactccccctggggtcaagagttctccatctgcaactactggcatgatccccaccatgatgacctctacttgaatgcctccagttttctggccttaatcaacggggagcgtgaccacccgaacgccaccgtttggcgaaaaaattttcttcgagtgggacacctggtgctgatcggtggccctgacgatggtgtgattacgccatggcagtcctctttctttggtttctacgatgctaatgaaactgttttggaaatggaagagcagctagtgtacctacgggatagctttggactgaaaacactgctggcacgcggagctattgtacgctgtcccatggctggaataagccacactgcttggcattccaaccggacgctttatgaaacttgcattgagccatggctaagctag

SEQ ID NO: 233990 - DNA, 909 bp, synthetic construct
  misc_feature 1..909: note = Description of Artificial Sequence: Synthetic coding sequence
  source 1..909: mol_type = other DNA
atgcttggactatggggtcagcgcctccccgctgcctgggttctgctgctgctcccgttcctgcctctgctgctcctagccgctccagcccctcatcgtgcctcgtataagcccgtcatcgtcgtccacggcctgtttgacagttcatatagctttcgacatctgctggagtacatcaatgagacccaccctgggaccgttgtgacggtcctggacctcttcgacggacgtgaatccttaagaccattatgggaacaggtgcaagggtttcgggaagctgtagttccgataatggccaaagcccctcagggggtgcacctcatatgctacagccagggtggattggtatgccgggctttgctgtctgtgatggacgatcacaacgtcgactccttcatatctctgtcgagtccacagatgggtcagtacggagacacagattatctcaaatggcttttccccactagcatgagaagtaatctgtataggatctgctacagtccctggggccaggagttttcaatttgcaactattggcacgacccacatcatgacgatctgtatttaaacgcctcctcctttctagctctgattaacggggagcgtgaccatccaaatgccaccgtgtggaggaagaactttctccgtgtcggccatctggtcctgatcggcggtcctgacgatggcgtgataactccttggcagtcgagcttctttggcttttatgacgctaatgagactgtgctggaaatggaagagcagctggtgtacctccgggattctttcggtctgaagacacttttggctcgcggagccatcgtacgttgtcccatggccggaatatcccataccgcatggcattccaacaggaccctttatgaaacatgtatcgaaccctggcttagctag

SEQ ID NO: 233991 - DNA, 282 bp, synthetic construct
  misc_feature 1..282: note = Description of Artificial Sequence: Synthetic coding sequence
  source 1..282: mol_type = other DNA
atgcttgggctgtggggccagcgcctccccgcagcttgggtactgttgctgctcccttttttacctctgttactgctcgctgctccagcccctcaccgcgcaagctataaaccagtgatcgtggtccacgggcttttcgattcttcttattctttcagacacctgttagagtacatcaatgaaggcgctctctgtgccggtctgtgcttcttgagctggatgattaccacatggattttgtcttcccccagtcccttgcacagatgggattccatggaatag

SEQ ID NO: 233992 - DNA, 282 bp, synthetic construct
  misc_feature 1..282: note = Description of Artificial Sequence: Synthetic coding sequence
  source 1..282: mol_type = other DNA
atgttaggattgtgtggtcagcggctgcctgcagcttgggtacttctattacttccatttctcccactgcttcttctggctgcccctgctccgcatcgggcatcctataagcctgtaattgtagtgcacggcctgttcgactcttcctatagtttccggcatctgctggaatatatcaatgaaggggctctttgcgctgggctctgtttcctttcatggatgatcacgacatggatcttatcctctccttcgccactccaccgctgggacagcatggaatag

SEQ ID NO: 233993 - DNA, 909 bp, synthetic construct
  misc_feature 1..909: note = Description of Artificial Sequence: Synthetic coding sequence
  source 1..909: mol_type = other DNA
atgctgggcctgtggggccagaggctccccgctgcatgggttcttttattgctgccatttctcccgctgctgctgctggcagcccctgcgcctcatagagccagttataaacctgtgatcgttgtacacggactgttcgattcttcctacagtttcaggcatcttctggagtacataaacgaaactcaccctggaaccgttgtcaccgtgctggatttgttcgacggtcgggaatctctgaggcccctctgggagcaggtccaaggctttcgcgaagccgttgttccgatcatggcaaaagcaccacagggtgtgcatttgatctgctacagccaggggggactggtatgccgggcactgcttagtgtgatggatgatcataatgttgactcttttataagtctgagttcgccccagatgggccagtacggagatactgactatttgaagtggcttttcccaacatcgatgaggtctaatctctatcggatttgctatagcccatggggccaggaattctctatctgtaactactggcacgatccccaccacgacgatttatatttgaacgcctcatcattcttggctctgattaacggcgaacgggaccaccctaatgccacagtgtggcgtaaaaattttttgcgggtgggtcatctagttctgattgggggaccagacgatggagtcattaccccctggcagagctctttctttggcttttatgacgccaacgagaccgtgctggagatggaagagcagttggtctacctccgagactccttcggccttaagacgctgctggcgagaggcgcaatcgtacgctgtccaatggcaggtatcagccacaccgcgtggcattcaaatcgaaccctatatgagacctgcatcgagccatggctttcatag

SEQ ID NO: 233994 - DNA, 909 bp, synthetic construct
  misc_feature 1..909: note = Description of Artificial Sequence: Synthetic coding sequence
  source 1..909: mol_type = other DNA
atgctgggcctgtggggccaaaggcttcctgcagcctgggtgttgctgctactgcctttcctgcctctcctgctcttagccgctccggctccccatagggcctcctacaagccagtcatcgtcgtgcatggcctttttgacagcagttactctttccgccatctgctggaatacattaatgaaacccatccaggaactgtagtcaccgtattagatctgtttgatgggcgtgagtcactacgcccactctgggaacaggttcaggggttcagggaggccgtggtccctattatggccaaagccccacaaggcgtgcatctaatttgttattctcagggtggacttgtatgccgagccctgctgtcggtcatggatgatcataacgtggattcattcatcagtctctcctcgccccaaatgggccagtacggcgacaccgattacttaaagtggctgttccctacttcaatgcgtagtaatttatatcgcatttgttattcgccatggggccaggagtttagcatctgcaattattggcacgatccccaccacgatgacctgtacttgaatgcgagttccttcctggccctaataaatggggagcgcgatcatccgaatgcaactgtgtggcgcaaaaattttctccgggttggacatctggttctcattggtgggccagacgacggggtcattacgccctggcaatcgagcttttttggcttctatgacgcgaatgagacagtgcttgagatggaagagcagctcgtctacctgcgtgactcgtttggattgaagacattgctggcacgtggcgcaattgttagatgtccaatggctgggatttcacataccgcatggcactctaataggactttgtacgagacatgcatagaaccttggttaagttag

SEQ ID NO: 233995 - DNA, 543 bp, synthetic construct
  misc_feature 1..543: note = Description of Artificial Sequence: Synthetic coding sequence
  source 1..543: mol_type = other DNA
atgcttggcttgtggggccagaggcttcctgctgcttgggtgctgctgttgctacctttccttccactgctgcttctggcagcaccagcccctcatagagaaagttacaaacccgtgattgtggtgcacgggctctttgacagtagttattcttttcgtcaccttctggaatatatcaatgaaactcacccaggcactgtggtgaccgtgcttgaccttttcgacggacgcgaaagtctgcgtccactttgggaacaagtgcagggcttcagagaagccgtggtcccaatcatggccaaggcaccacagggggttcatctcatatgctacagtcaaggcggactggtttgcagagcgctgctgagtgtcatggacgaccacaatgtggactcctttataagtctcagctcccctcagatgggccagtatggcgacaccgactatctcaagtggctctttccgacatcgatgaggagcaacctctataggatctgctatagtccttggggtcaagaattttctatctgtaactattggcactag

SEQ ID NO: 233996 - DNA, 543 bp, synthetic construct
  misc_feature 1..543: note = Description of Artificial Sequence: Synthetic coding sequence
  source 1..543: mol_type = other DNA
atgcttggcttatggggacagcgcctcccagccgcatgggtgctgctgcttcttccttttctgcccctcctgctgctcgcagcacccgctccccacagagagtcctacaagccggtgatcgtagtccacggactgtttgactcctcgtactctttccggcatctactggaatacattaatgaaacacaccccggtactgtcgtgaccgttctggatctgttcgacggacgagagtctttgcgccctttatgggagcaggtccagggatttcgtgaggctgtcgttcctattatggcaaaggccccacaaggggtgcacctcatttgttactcccagggtggccttgtttgtagagctttgctgtcagtaatggatgatcataacgttgacagctttatcagtttatcctcaccacagatgggccagtatggcgacacagactatctaaagtggctctttcctaccagcatgcgctctaacctgtataggatttgttattctccgtggggccaggagtttagtatttgtaattactggcattag

SEQ ID NO: 233997 - DNA, 282 bp, synthetic construct
  misc_feature 1..282: note = Description of Artificial Sequence: Synthetic coding sequence
  source 1..282: mol_type = other DNA
atgcttggcctctgggggcagcgactccccgctgcctgggtactcctcctgctgccgttcctgccactcttacttctggctgctcccgcacctcacagagagtcgtacaaacccgtcatcgttgtacacgggttattcgatagcagttactctttccgccatctcctggagtacatcaatgaaggagccttatgtgcgggtttgtgcttcctgagctggatgattaccacatggatcctcagcagcccatcacctctacacagatgggattctatggaatag

SEQ ID NO: 233998 - DNA, 711 bp, synthetic construct
  misc_feature 1..711: note = Description of Artificial Sequence: Synthetic coding sequence
  source 1..711: mol_type = other DNA
atgctggggctgtggggccaacggctcccagccgcatgggttctgcttctgttgccttttctcccactgttgttactggctgctccagcaccacaccgcgagtcttacaagccagtgatagttgtgcatggtctctttgactcctcatacagttttaggcacttgctcgaatacataaacgagactcaccctgggacggtcgtaaccgtcttggatctatttgatggtagggagagtttacgacccctgtgggaacaggtgcaaggattccgggaggcagttgtgcctattatggccaaggccccacagggagtacatctgatatgttacagccaggggggactggtttgtagggctctgttgtccgtcatggatgatcacaacgtggattcgtttatctccttgagttcaccacagatgggccaatatggtgacaccgattatctgaagtggctgttcccgacctctatgaggtctaatctttataggatttgttacagtccttggggacaggagttctccatttgtaactactggcatgacccccaccatgacgatctgtacctgaatgcctctagcttcctcgcactgattaatggagaacgtgaccatcccaacgctactgtctggaggaaaaacttcctgagagtcggccatctcgtgctcatcggcggacctgacgatggtgtcattacaccttggcagagctag

SEQ ID NO: 233999 - DNA, 165 bp, synthetic construct
  misc_feature 1..165: note = Description of Artificial Sequence: Synthetic coding sequence
  source 1..165: mol_type = other DNA
tgacacgatgacctatacttgaatgcctcaagtttccttgccctgattaatggagagagagaccatcctaacgcaactgtatggcgaaagaacttcctccgggtcggccatttagtactgattggaggcccagatgatggcgtgattaccccctggcaatcttag

SEQ ID NO: 234000 - DNA, 711 bp, synthetic construct
  misc_feature 1..711: note = Description of Artificial Sequence: Synthetic coding sequence
  source 1..711: mol_type = other DNA
atgctggggctgtggggacaacgcctgcctgccgcttgggtgcttctcctgttgccatttctcccattgctgctgcttgcagctcctgcccctcatagggagagttacaaacctgttatcgtggtacacggcttgttcgactccagctactccttcagacatctccttgagtacatcaatgaaacacaccccggaaccgtggttacagtgctggacttgttcgacggcagagagagtctgagacctctttgggagcaagtgcagggattccgggaggcagtcgtaccaattatggccaaggcccctcagggtgtacacctcatctgctattcccagggagggcttgtgtgcagggctctgctcagcgtaatggacgaccacaatgttgattcctttatttctctgagctccccacagatgggccagtacggcgacacagattacctgaagtggctcttccccacctccatgaggagtaatctctatcgcatttgttacagtccgtggggccaggagttttctatttgtaactattggcatgaccctcaccacgacgatttgtatctcaatgcctcctcgtttctggccctgataaatggtgaaagagatcaccctaacgcgactgtgtggcggaaaaactttctgagggttggccatctggtcctgattggtggacccgatgacggagtaataacaccttggcagtcttag

SEQ ID NO: 234001 - DNA, 909 bp, synthetic construct
  misc_feature 1..909: note = Description of Artificial Sequence: Synthetic coding sequence
  source 1..909: mol_type = other DNA
atgcttgggctttgggggcaacggctcccagccgcatgggtgctcctgctcctcccgttcttgcccctcctgctgctagcggcaccggcaccacaccgcgctagttataagccggtgattgtagtgcacgggttgtttgattcgtcatacagcttccgccacctgctggaatacataaatgagactcaccccggaactgtagtgaccgtattggacttattcgacggacgagaaagccttcgcccactctgggaacaggtccagggctttcgcgaagccgtggttccaatcatggccaaagcccctcaaggagttcacctgatctgttactcacaaggcggactggtctgcagggcgcttctttcagtcatggacgaccataacgttgattcatttattagcttgagcagtccccagatgggccagtatggcgatactgactacttgaaatggttatttcccactagcatgcgtagtaacctgtatcgtatctgctactctccgtggggacaggagtttagcatatgcaattactggcatgatccacaccatgacgacctgtacttgaacgccagctccttcttagccctgatcaatggggaacgggaccatccaaatgccacagtgtggcggaagaattttctgagggttggccacttggtcctgatcggcggtcccgacgatggcgtgattaccccttggcagtcctcctttttcgggttttatgacgcaaatgaaaccgtgctcgagatggaagaacagctagtgtatttgagagacagcttcgggctcaaaactctgttggcaaggggagctatcgtgcgctgtccaatggcgggtatctcacacactgcatggcactctaataggacgctgtacgaaacatgcatcgagccctggttgtcttag

SEQ ID NO: 234002 - DNA, 909 bp, synthetic construct
  misc_feature 1..909: note = Description of Artificial Sequence: Synthetic coding sequence
  source 1..909: mol_type = other DNA
atgctgggcctttggggtcaacgactccctgccgcttgggtcttactgcttcttcccttcttgcctctcctgctgctggccgcacctgccccacacagagccagctacaagcctgtaatagtggtacacgggctattcgattcttcgtactccttccggcatcttctggagtatatcaatgaaacgcaccctggcacagtcgtcactgtgctcgacctcttcgacggtcgggaatccctgcggcctctatgggagcaggtgcagggtttcagagaagccgtcgtgccaatcatggcgaaagctccgcaaggcgtgcacctcatttgctactcccagggtggcctggtctgtcgagctttgctcagcgtgatggatgatcacaatgtcgacagcttcatatcactgagcagcccacaaatgggtcagtacggagatacagattatcttaagtggctatttcctacctctatgcgctcaaatttgtacagaatctgctatagcccatggggtcaggagttttccatttgcaattattggcacgatccacatcatgacgatctgtatttgaatgctagttcctttttagcacttatcaacggagaacgagaccaccccaatgccactgtatggcgaaagaatttcctcagggtcgggcacctggtacttattggaggcccagatgatggcgtgatcaccccatggcagtcgtcattctttgggttttacgatgccaatgaaaccgtgctagagatggaagaacagctagtctacctcagagattcttttggacttaagacgctgttggcccgtggggctattgtgcggtgtccgatggccggaatttcccacacggcctggcatagtaaccgtactctgtatgaaacgtgtatcgaaccgtggttatcctag

SEQ ID NO: 234003 - DNA, 909 bp, synthetic construct
  misc_feature 1..909: note = Description of Artificial Sequence: Synthetic coding sequence
  source 1..909: mol_type = other DNA
atgctcggtctttggggacagagactgccagcagcatgggttttgctcctgctacccttcctacctctgttgctactggctgccccagctccccatcgggcatcttacaagcctgtaatagtcgtgcacggacttttcgactcttcatattcattccgccacctactagagtacatcaacgagacacaccccggaaccgttgtgacggtccttgatcttttcgacgggagggaatcgctgaggccactgtgggagcaagtccagggctttagagaggctgtagtccctattatggctaaggcccctcagggagttcacctcatctgttacagtcagggcggtttggtgtgcagagccttgctgagtgtgatggatgaccataacgtggattcttttatatccctatcttcgccacaaatgggccagtacggtgatacagattacctgaaatggctgttccccacctcgatgaggtccaacctgtaccgtatctgctacagtccttgggggcaggagttcagtatctgtaactactggcatgatcctcaccacgacgatttgtacctcaacgcgagttcttttttggcgctgatcaacggggagcgcgaccatcctaacgccaccgtgtggcgaaaaaactttttgagagtggggcatctggtcttaatcggtggccctgacgatggcgtgatcacgccctggcagagctctttctttggattttacgacgcaaacgagactgtgttagagatggaggagcagctggtttacttaagagatagtttcggattgaagacacttttggccaggggcgctatcgtgcggtgccctatggctggaatctcccacacagcctggcattctaataggactctgtacgaaacttgcattgagccctggcttagctag

SEQ ID NO: 234004 - DNA, 441 bp, synthetic construct
  misc_feature 1..441: note = Description of Artificial Sequence: Synthetic coding sequence
  source 1..441: mol_type = other DNA
atggatgaccacaatgtggactcattcattagtctctcatcgccccagatgggacagtacggtgatactgactacctgaaatggctttttccaactagtatgaggagtaacctgtaccggatatgctacagtccctggggccaagaattttctatctgtaattactggcatgatccccaccacgatgatttatatttgaacgcatcttcatttctggcactcataaacggagaacgggaccaccctaatgcgacagtctggagaaaaaattttctaagggtgggccacctggttctgatcggcggacctgatgatggcgtcattactccttggcagagctcattcttcggcttctacgacgctaacgagaccgtgctggaaatggaggagcaactccctgtaggatcctccgttaaggccaatcacggcgtgcagggttag

SEQ ID NO: 234005 - DNA, 927 bp, synthetic construct
  misc_feature 1..927: note = Description of Artificial Sequence: Synthetic coding sequence
  source 1..927: mol_type = other DNA
atgaaatcatgtggatctatgcttggcctgtggggacagaggctccctgctgcttgggtcctcctcctgctcccattcctcccactcctcttgctcgcggctcccgcaccacaccgggctagctacaaaccggtgattgtggttcacggcctgttcgatagttcttatagctttagacacctactcgagtacatcaacgaaacccaccccggtacggtcgttaccgtcctggatctgtttgacggccgtgagagtctccggcctctttgggagcaagtgcagggtttcagagaggccgtcgtgccaatcatggccaaagctccacaaggcgtgcacctgatctgttattcacagggcggactggtttgtcgggcacttctcagcgttatggatgaccacaatgttgacagctttatttcgctgtcctcccctcagatgggacaatacggggatactgactatctgaagtggctgtttccaacgagtatgaggtctaacttataccggatctgttacagcccctgggggcaggaattcagcatttgcaattattggcacgacccccatcatgatgacctctatcttaatgcttcctcattcttggcgctgataaatggcgaaagagatcaccctaatgcaaccgtgtggcgaaagaactttctgcgcgtgggccatctcgtgttaatcggagggcctgacgatggcgttatcaccccctggcagagcagctttttcggattttatgatgcgaacgaaacagtattggaaatggaggaacagcttgtgtatttgagagacagcttcggactgaagaccctcctcgcccgaggagcaattgtgaggtgcccaatggctggaatcagccatactgcttggcactccaaccgaactttatatgaaacctgtatcgagccttggctatcttag

SEQ ID NO: 234006 - DNA, 882 bp, synthetic construct
  misc_feature 1..882: note = Description of Artificial Sequence: Synthetic coding sequence
  source 1..882: mol_type = other DNA
atgggatccagggctgagctatgtacccttttgggtggtttcagctttctgctcctgttgattccaggcgaaggtgcgaagggcggttctctgcgcgaaagccagggcgtgtgctctaaacaaaccctagttgtccccctccactacaacgagtcttactcccagccagtctacaaaccatacctaacgctttgtgccggtaggaggatctgtagcacctacaggactatgtatcgcgttatgtggcgggaagttcgacgtgaggtccagcagactcacgctgtgtgctgtcaggggtggaagaaacgacacccgggagccctgacctgcgaggcaatctgcgctaaaccatgtctcaacggaggtgtgtgcgtaagaccagaccagtgtgaatgcgctccaggctgggggggtaaacactgtcatgttgacgtagacgaatgcaggaccagtataactttatgcagccatcactgcttcaacacagcgggttcttttacatgcgggtgtccgcatgacttggttcttggggtggacggccgtacctgcatggagggatcccccgagccccctactagcgcaagtatcctctctgtggcagtgagagaagcggagaaggatgagcgggcactgaaacaagagattcacgaactacgtgggagactggagcggttggagcagtgggcgggtcaagctggcgcttgggtacgagcggtcctgcctgtgcctccagaagagctgcagcctgaacaggtcgctgaactctggggtcgcggagaccgaattgaatctctgtcagaccaggtgctgctcctcgaggaacgcctaggtgcttgctcctgcgaggataatagcctcgggctgggtgtcaatcataggtag

SEQ ID NO: 234007 - DNA, 906 bp, synthetic construct
  misc_feature 1..906: note = Description of Artificial Sequence: Synthetic coding sequence
  source 1..906: mol_type = other DNA
atgctcggtttgtggggtcagaggctcccagctgcttgggtcctacttctcctgccttttctgcccctcttacttttggcggctcccgctcctcacagagcttcgtataaacccgtgatagtggtgcacggccttttcgatagtagttacagctttcgtcatctcctggagtatatcaacgaaacccaccctggcaccgtggtgactgtgctggacctatttgacggacgcgaatctttgcgacccctgtgggagcaggttcagggcttccgcgaagcagtcgttcctatcatggcaaaagcccctcagggggttcacctgatttgctatagtcagggcggtctcgtctgtagggcgctgcttagtgtcatggacgaccataatgtggattcctttataagcctaagttccccgcagatggggcagtacggcgatacagattacctcaaatggcttttccctacctcgatgcgttcaaacttgtaccgcatctgctacagcccgtgggggcaggagttctccatctgtaactattggcacgatccccaccacgatgatctgtacctgaatgcctctagctttctggccctgatcaacggggagagggaccatcctaacgccactgtgtggcgcaaaaattttttaagggtaggccatttagtcttaattgggggaccagatgatggagtcatcactccgtggcagagtagcttttttggtttctatgacgctaatgagaccgtacttgaaatggaagagcagctgcctgctaggcccacgcaccagagcgaactccttctactgcgtctcgtgtgcctaaaacccccacgccgtaaaaaaccagcatgcagagttcagagacagtccgaaagttgggggccaggattaagttgcgccctgagctag

SEQ ID NO: 234008 - DNA, 909 bp, synthetic construct
  misc_feature 1..909: note = Description of Artificial Sequence: Synthetic coding sequence
  source 1..909: mol_type = other DNA
atgctgggactctggggacagcgacttccagcggcttgggtgctacttctgctccccttccttccactgctgttgttggcggctcctgccccacaccgtgagtcctacaagcctgtgatcgtggtacatggtcttttcgattcctcctactcttttcgacatcttctggaatacatcaacgagacccaccctgggacagtggtgactgtgctcgatctcttcgacggtcgggagagcctgcggcctctgtgggaacaggtccagggcttccgtgaggcggtggttcctatcatggccaaggccccacagggcgtgcatctaatttgctacagccaagggggactagtctgtcgcgctctcctcagcgtgatggatgaccacaacgtggactcctttattagcttgtctagccctcagatggggcaatacggcgatacagactatcttaaatggctttttcccacaagcatgaggagtaacctatacaggatctgttattccccctggggccaggagtttagtatttgtaactattggcacgatcctcaccacgacgacctctaccttaacgccagtagctttcttgctctgatcaacggagaaagagaccaccccaacgccacggtctggaggaaaaactttctcagagttggacacttggtccttattgggggtcctgacgacggggtaatcaccccctggcagagctcgttctttggattttatgacgcaaacgagaccgtcctcgagatggaagagcagctcgtttacctcagggactcttttggcctgaagacacttctggccaggggcgctatcgtgcgatgcccaatggcgggaattagccacacagcttggcactctaatagaacgctgtacgagacatgcattgagccgtggctatcatag

SEQ ID NO: 234009 - DNA, 441 bp, synthetic construct
  misc_feature 1..441: note = Description of Artificial Sequence: Synthetic coding sequence
  source 1..441: mol_type = other DNA
atggacgatcacaacgtcgattctttcatctcgctgtccagtccccagatggggcagtatggcgacaccgactacctgaagtggctgtttcccacctccatgcgctccaatctctataggatctgctactcaccttggggccaggaattttccatttgcaattactggcacgatcctcaccatgatgacctgtacctaaacgcctcatctttcctggccctaattaacggtgaaagggatcatcctaatgcaacagtgtggaggaaaaactttctgagggtcggccacctggtgctgataggtggaccggatgatggggtcattaccccatggcagtcatccttcttcggcttctatgatgcgaatgaaactgtcctcgaaatggaagagcaattacctgtaggcagctccgtgaaagccaatcatggggtgcagggatag

SEQ ID NO: 234010 - DNA, 882 bp, synthetic construct
  misc_feature 1..882: note = Description of Artificial Sequence: Synthetic coding sequence
  source 1..882: mol_type = other DNA
atggggtccagagcagagctttgcacattgctgggcggttttagtttcctgttgctgctcattcctggagaaggcgcaaaaggtggcagcctgagggaaagtcaaggggtctgttccaagcagaccctcgtggtgccactccactacaacgagtcctactcccaacccgtgtataagccttacctgaccctgtgcgccggaagaaggatctgcagcacatatcgaacgatgtatagggtgatgtggagggaagtgaggagagaggttcaacagacacatgcagtctgctgtcagggctggaaaaagcggcaccccggtgctctgacctgcgaggcgatctgtgccaagccatgtcttaacggaggggtttgtgttcgccctgatcagtgtgagtgtgctcccggatggggtggcaagcactgccatgttgatgtggacgaatgcagaacaagcataactctgtgttctcaccattgtttcaacacagcgggatcattcacctgtgggtgtccccacgatcttgtgctaggtgtagatggacgaacttgtatggaaggcagtcctgagcccccaacttcagcttccattctgagcgttgcagtgcgggaggccgaaaaggacgagcgcgctttaaagcaagagattcacgaattacgtggcaggctggagcggcttgagcaatgggcaggtcaggctggcgcttgggtcagggctgtcctgccggtgccccctgaagagctgcagccagaacaggtggccgagctgtggggccgtggagatcggatcgaaagcctgtccgatcaggtgctgctcttggaggaaaggctgggggcttgttcatgcgaggacaactctctcggtttgggtgtaaatcaccgatag

SEQ ID NO: 234011 - DNA, 906 bp, synthetic construct
  misc_feature 1..906: note = Description of Artificial Sequence: Synthetic coding sequence
  source 1..906: mol_type = other DNA
atgttgggtttgtggggacaaagactgccggctgcctgggttctgctgctgctaccctttttaccactgctcctgctggcggctcccgctccgcaccgggcatcttacaagcctgtgatcgtcgtgcacgggctgtttgacagcagctatagctttcgccacctcctggagtatatcaacgaaacgcatcccggtacggtggtcacagtgctggatctgttcgatggccgagagtcattacggccactctgggaacaggtgcagggcttccgagaggccgtcgtccccattatggctaaggccccacagggtgtgcacttgatctgctatagtcaagggggactcgtctgccgcgctctgctaagcgtgatggacgaccataatgtggactcttttataagcctttcatctcctcagatgggtcagtacggcgatacagattacctgaagtggctgtttcccaccagtatgcggtcaaacttgtaccggatttgctactctccttggggtcaagaattctcaatctgcaactactggcatgatccacaccacgatgatctgtatttgaacgccagctcgttcttggccctgatcaatggagaacgggatcaccctaatgccaccgtatggcgcaagaacttcttaagagtcgggcatcttgtgctgatcgggggaccagatgatggggtcattacaccgtggcaatcttcttttttcggcttttatgatgctaacgagacagtgctggaaatggaagagcagctccccgctagacccacccaccagtctgagttattacttctgcgcctagtgtgcctgaaacctccgaggagaaaaaaacctgcttgtagggtgcaacgccagagcgaaagctgggggcctggactgtcctgcgccttgagctag

SEQ ID NO: 234012 - DNA, 441 bp, synthetic construct
  misc_feature 1..441: note = Description of Artificial Sequence: Synthetic coding sequence
  source 1..441: mol_type = other DNA
atggacgatcataacgtcgattccttcatatctctttcttccccgcagatgggacagtatggagataccgactaccttaagtggctgtttccaaccagcatgcgaagcaatctgtacagaatatgctactcgccgtggggacaggaattcagcatatgtaactattggcatgacccacaccatgatgacctttatctgaacgcctcgtccttcctcgccctcatcaatggggaaagagaccaccctaatgccaccgtttggcgaaaaaatttcctgcgggtgggacatctcgttcttatagggggaccagatgacggggtgatcaccccgtggcaaagcagttttttcggcttttacgatgcaaacgaaactgtcttagagatggaagaacagttgcccgttggctctagcgtcaaagccaatcacggcgtgcaggggtag

SEQ ID NO: 234013 - DNA, 906 bp, synthetic construct
  misc_feature 1..906: note = Description of Artificial Sequence: Synthetic coding sequence
  source 1..906: mol_type = other DNA
atgttggggctgtggggccagcgcttaccagcagcctgggttctccttctgttaccattcctgccactgttgctgctggctgctcctgcccctcaccgcgcaagctataaaccagttattgtggtgcatggtctgttcgacagttcctacagcttccgccacttgttggagtacattaacgagacccaccccggtactgttgtgaccgtgctcgacctgttcgacggacgagaatccttacgcccactgtgggagcaggtacagggatttcgtgaagccgtagtgcccatcatggcaaaagcgccacagggggttcacctgatctgctactctcagggtgggctcgtgtgcagggcacttctcagcgtgatggacgaccacaacgtggactcttttatctccttgagctcgccgcagatgggtcagtatggtgacacagactatcttaaatggctattccccactagcatgagatccaatctctaccgcatttgctactctccctggggccaagagttttccatttgcaattattggcacgacccgcaccatgatgatctctacctgaatgcgagcagtttcctggctttaataaacggcgaaagggaccaccccaatgccaccgtctggcgaaaaaacttcctgagagtgggccacctggttctgatcgggggtccggacgacggggtaattacaccctggcaaagctctttcttcggcttttatgatgctaatgagactgttctggaaatggaggaacaattgcccgcacgacctacgcatcaatcagagctgctccttctgaggctggtgtgcctgaagcccccaaggagaaaaaaacccgcttgtcgcgtacagcggcagagcgaatcttggggccctggcctgtcctgcgcgttgtcttag

SEQ ID NO: 234014 - DNA, 441 bp, synthetic construct
  misc_feature 1..441: note = Description of Artificial Sequence: Synthetic coding sequence
  source 1..441: mol_type = other DNA
atggatgaccacaatgtagacagttttataagtctgtcctctccacagatgggccagtacggagataccgattacctcaagtggttattccccactagcatgcgatccaatctctacagaatttgttatagcccatggggccaagagttctccatttgcaattactggcacgacccccaccacgatgacttgtacttaaacgcctcctcctttcttgctctcattaatggggaacgcgaccaccctaacgcaacggtctggagaaagaattttctgagagtcggacaccttgtactgataggtggtccagatgatggtgtgattactccatggcagtcaagcttctttggcttttacgatgccaacgagaccgtactggagatggaagagcagctgccagtcggcagctcggtcaaggctaatcacggcgttcaaggttag

SEQ ID NO: 234015 - DNA, 882 bp, synthetic construct
  misc_feature 1..882: note = Description of Artificial Sequence: Synthetic coding sequence
  source 1..882: mol_type = other DNA
atgggctcccgagctgaactttgtacattgttgggaggattctcctttctgttgttgttgatccccggtgagggggcaaagggcggatctctgcgggagagccagggggtgtgctcaaaacaaaccttggtcgtgccattgcattataatgagtcttacagccagccagtgtacaagccttatttgacgctatgtgcaggtcgccgtatctgcagcacgtatcggacgatgtatagagtgatgtggcgagaagttagaagagaagttcagcagacccacgccgtctgctgccagggctggaagaagaggcatccaggagccctgacctgtgaggccatatgcgcaaaaccttgtctgaatggaggcgtttgcgtcagacccgatcagtgcgaatgtgcacctggttggggcggaaagcactgtcacgtggacgtggatgaatgtcgcacaagcataactctgtgctcacatcactgcttcaacacagctggcagttttacatgcggctgcccccacgacctagtgctgggggttgacggccgtacttgcatggaaggaagccccgagccgcctacaagcgcctcaatacttagcgtggctgtgcgggaggctgagaaagatgaacgcgctctgaaacaagagattcacgaactgaggggtaggttggaacggctcgaacagtgggccggacaagctggggcatgggtgcgcgctgtgttgcctgtgcctccggaggaactccagccggagcaggtagctgagctgtggggcaggggggacagaattgaatcactcagcgatcaagtgctcctgcttgaagaaaggttgggcgcttgctcatgcgaagacaattcccttgggctgggtgtgaatcatagatag

SEQ ID NO: 234016 - DNA, 882 bp, synthetic construct
  misc_feature 1..882: note = Description of Artificial Sequence: Synthetic coding sequence
  source 1..882: mol_type = other DNA
atgggatccagggccgagttgtgcactttactgggaggattttcatttctgctgctcttgatccccggtgagggagctaaagggggttctctccgggagtctcagggtgtgtgttccaaacagacccttgtcgttccgctgcactacaatgaatcatatagtcagcccgtgtataaaccctatttgacactgtgcgccggtaggcgcatttgtagcacttacaggaccatgtatagagttatgtggcgcgaggtgcgccgtgaggtccaacagacacacgccgtgtgttgtcagggatggaaaaagagacacccaggagcactcacatgtgaagccatatgcgccaagccgtgtctcaacggcggtgtgtgtgtgaggcctgaccagtgcgagtgtgccccaggctgggggggtaaacactgtcacgtggatgtggatgaatgtaggacgagcatcaccctgtgttctcaccactgtttcaacactgctggaagtttcacctgcgggtgcccccatgatctggtgctgggcgtggacggacggacatgcatggaaggctctcccgaaccgccaacaagcgcctcaatcctgtcagtggctgtgcgggaggccgaaaaagacgagagggctttgaagcaagagatacacgagttgagggggcgtctagagcgccttgaacagtgggcaggccaggcgggtgcttgggtgagggccgtgctcccagtccctcccgaggaacttcaacccgaacaggtggccgagctgtgggggagaggagatcggatagagtcactgtccgaccaggtgctactgcttgaggagcggttgggtgcgtgctcatgcgaggataactccctcggcctgggtgtcaatcataggtag

SEQ ID NO: 234017 - DNA, 909 bp, synthetic construct
  misc_feature 1..909: note = Description of Artificial Sequence: Synthetic coding sequence
  source 1..909: mol_type = other DNA
atgctcggtctttgggggcaaaggctccctgctgcctgggttttattgctgcttccattccttccgctgctgttgctcgccgctcccgcaccacatcgagcgagctataagcccgtgattgtcgtgcacggactgttcgattcaagttacagctttcgtcacctgctcgagtacatcaacgagacccacccaggcaccgtcgtcacagtgctggacctcttcgacggtcgcgagagcctgcgacctctctgggagcaagtgcaggggtttcgcgaggctgtggtgcccatcatggccaaggccccacaaggagtgcatctcatttgctacagccagggtggactggtgtgtcgcgctttgttatccgtgatggatgatcacaacgtagattcatttatctctctgtccagtccccagatgggacagtacggagataccgactatctgaagtggttgtttcccacttctatgagaagtaatctgtaccggatttgctactccccctggggacaggaattcagcatctgcaattactggcatgacccacaccacgatgatctctaccttaatgccagtagctttctggccctcattaatggcgagagggatcacccaaacgccacggtgtggcggaaaaacttcttaagagtgggacacctggtgttaattgggggacctgacgacggggtgatcacaccatggcagtcatcattcttcggattttacgacgccaacgaaacggttctggagatggaagagcagcttgtatacctgcgcgatagcttcggacttaagactctgctggcccgaggagcaatagtacggtgcccaatggctggcatatcacacacagcatggcatagcaaccgcacattgtacgagacctgcattgaaccctggctgtcatag

SEQ ID NO: 234018 - DNA, 441 bp, synthetic construct
  misc_feature 1..441: note = Description of Artificial Sequence: Synthetic coding sequence
  source 1..441: mol_type = other DNA
atggatgaccataatgtggacagttttatctcattgagtagccctcaaatggggcaatacggggacaccgactatcttaaatggctcttcccaaccagcatgcggtcgaacctataccgcatttgctatagcccatgggggcaagaattttccatctgtaattactggcacgacccacaccatgacgacctttacttgaacgcctccagcttcctcgctctgattaacggggaaagggaccatcctaacgcaactgtgtggcgtaagaatttcctgcgagtgggccatttggtgctgattggtggcccagacgacggcgtgatcacaccttggcaatcaagcttttttggattctacgatgctaacgaaacggtactagaaatggaagaacaacttcccgtcggctcaagcgtgaaagcgaaccacggggtccagggctag

SEQ ID NO: 234019 - DNA, 909 bp, synthetic construct
  misc_feature 1..909: note = Description of Artificial Sequence: Synthetic coding sequence
  source 1..909: mol_type = other DNA
atgctgggtctctggggccaaagattacctgccgcatgggtgctcctgctcttgcctttcctacccctgctgctgttagcggctccagcaccacaccgtgcttcctacaaaccagtcatcgtcgtgcatggtctcttcgattccagttacagttttagacatctgctcgaatatatcaatgagacacatccaggcactgtggtgactgtattagacctttttgatgggagagaatcgctgaggcccctgtgggagcaggtgcagggcttccgcgaagcagttgtccccattatggccaaagccccacagggggtccatttgatatgctactcccagggcggattggtatgtcgcgcacttctcagtgtgatggacgatcataacgtcgactcttttatttcattatcgtcaccccagatgggccagtacggcgatactgattacctgaagtggctgtttcccaccagtatgcgctctaacctgtatcgaatctgttacagtccgtggggccaggagttctcaatctgtaactattggcatgaccctcaccatgacgacctttacttgaacgccagctctttcttggcactgatcaatggtgagcgagaccaccctaatgccactgtctggagaaagaacttccttcgcgtgggacacctggtgcttatcgggggacccgacgacggagttatcacaccatggcagagcagctttttcggattctacgatgcaaacgagactgtgctggagatggaggaacagctggtgtatctgcgggactctttcggactcaagacactgcttgcgagaggcgcaattgttaggtgtccaatggctggtatcagccacactgcctggcactctaacagaaccctgtacgagacctgtattgagccatggctctcatag

SEQ ID NO: 234020 - DNA, 441 bp, synthetic construct
  misc_feature 1..441: note = Description of Artificial Sequence: Synthetic coding sequence
  source 1..441: mol_type = other DNA
atggacgaccacaacgtcgattctttcattagtttatcctcaccccagatgggacagtatggtgacacagactacctcaaatggttattccctacaagcatgcgcagcaacctgtaccgcatctgctacagtccatgggggcaggagttcagtatctgcaattactggcacgatcctcatcacgatgacctttacctcaatgcatcctctttccttgctctgatcaatggcgagagggatcaccccaatgctaccgtgtggcggaagaacttccttcgcgtaggtcacttagtgctcataggcggaccagatgatggcgtgatcacaccctggcagagcagtttcttcggtttttatgacgccaatgagactgtgcttgaaatggaggagcaactgccagttggttccagcgtcaaggcgaaccatggtgtgcaggggtag

SEQ ID NO: 234021 - DNA, 906 bp, synthetic construct
  misc_feature 1..906: note = Description of Artificial Sequence: Synthetic coding sequence
  source 1..906: mol_type = other DNA
atgctgggattgtggggacagagactccccgcagcctgggtgctgctacttctgccattcttacccttattgcttctggcagcgccagcaccccaccgagcttcatataaacccgttatcgtcgtgcacggtctgttcgacagtagttactccttccgccatctactcgagtacattaacgaaacacacccgggaacggttgttactgttctagatctcttcgatgggagagaaagcctgaggcccctgtgggagcaagtccaagggtttagggaggcagtggtgcccataatggcaaaagccccacaaggggtacatcttatctgctactcgcaggggggactggtgtgccgagctctcctgtcagtcatggatgatcacaatgtggactcgttcatatccttatcttctccccagatgggccagtatggggacacagactacctgaaatggcttttcccaacttcgatgagaagtaacctatacaggatttgttattctccttggggacaagagttcagcatttgcaactattggcacgaccctcaccacgacgatctgtatctgaatgctagctcattcttagcactaatcaacggggagagggaccatcccaatgcaactgtgtggagaaagaacttcctgagagtggggcacttggtgctgattgggggaccggacgacggggttatcacgccatggcaatcctcttttttcgggttctatgatgcaaatgaaaccgtactcgaaatggaggaacagctgcccgcaagacccactcaccaatcagaactgttactgctcaggttagtgtgtctgaaaccacctcggaggaaaaaacctgcttgtagagtccagagacaatcagaatcttgggggccagggttgagttgcgccctgtcttag

SEQ ID NO: 234022 - DNA, 906 bp, synthetic construct
  misc_feature 1..906: note = Description of Artificial Sequence: Synthetic coding sequence
  source 1..906: mol_type = other DNA
atgctgggtttgtggggccaaagattgcccgcagcgtgggtgttgctgctgctgcccttcctccccctgttacttctggccgcacccgcacctcaccgagagtcgtataagcccgttatagtggtccacggactgtttgacagttcctactctttccgacacctgctggagtatatcaacgagacacaccccggaaccgtggttacggtcctggacctcttcgatggaagagaaagcctgcgcccattatgggaacaggtgcaggggtttcgggaggccgtagtcccaattatggccaaggctccgcagggtgtccacttgatctgctattctcagggcggactggtgtgccgtgcactgttatcagtgatggacgaccataacgtcgactcctttattagcttgtcttcaccacagatggggcagtacggcgacacagactacctgaaatggctgttccccaccagcatgcggtctaacctgtatagaatctgctattcaccttgggggcaggaattttccatttgcaactattggcacgacccacatcacgatgatttgtacctgaacgcctcgtcattcttggctctcataaatggcgagcgagatcacccgaacgcgacagtgtggcgtaagaatttcctgcgtgtgggccacttagtgttgattggtggcccagacgatggtgtgattacaccttggcaaagttccttctttggcttctacgatgctaatgaaacagtgctggaaatggaagaacaactgcccgctaggccgacccaccaatccgagcttctgctgctcaggctggtgtgtttgaaaccgccacgcaggaaaaagcctgcttgtcgcgtgcagaggcagtccgaatcttggggacccggactgagctgcgctctgtcttag

SEQ ID NO: 234023 - DNA, 906 bp, synthetic construct
  misc_feature 1..906: note = Description of Artificial Sequence: Synthetic coding sequence
  source 1..906: mol_type = other DNA
atgttaggcttgtggggacaacgtctcccagccgcttgggtattgctactcttgccttttcttccgctgctccttctggccgctcccgctccacatagagcaagttacaagccagtgatcgtggtgcacggactgtttgatagttcctactcctttcgccacctgctggaatatattaatgagacccaccctggcacagttgtgacagtgctggatctctttgacgggcgtgaatcgttaaggcccttatgggagcaggtgcagggcttccgagaagccgtcgtgccgatcatggctaaggcccctcaaggggtacacctcatctgctatagtcaggggggactggtctgcagagctttgttatccgttatggacgaccacaatgtggactcttttatctccctttcgagtcctcagatgggccagtacggcgatacagactacctcaagtggctgtttcccacaagcatgagaagcaatctgtatcgcatctgctactccccatggggccaggaattcagcatctgtaactattggcacgacccccaccacgatgacctctacctgaacgccagtagctttctggcgctgataaatggcgagcgtgaccacccaaatgcgactgtctggagaaagaacttccttagagtgggacacctggtgctgatcggcggacctgatgacggggttattacgccctggcaatcctctttttttggtttctacgatgccaatgaaacggtcctggagatggaggagcagctgccagccaggcctactcaccaatccgaactcttgctgctgcgattggtgtgtctcaagccccctagacgcaaaaagcctgcatgtcgtgtgcagcgtcaatctgagtcctggggtcctggcctctcctgcgcattgtcctag

SEQ ID NO: 234024 - DNA, 909 bp, synthetic construct
  misc_feature 1..909: note = Description of Artificial Sequence: Synthetic coding sequence
  source 1..909: mol_type = other DNA
atgttgggactgtgggggcagcggctcccagccgcttgggtgcttctcttactgccgttcctccctttactgctgcttgccgcaccagcccctcatcgggctagttacaagcctgtcatagtcgtacacggtctgtttgatagctcctactccttccgccacctcctggagtatatcaacgaaactcaccctggtactgtggtgaccgttcttgatctgttcgacggccgagagtcattgcgccctctgtgggaacaagtccaggggttcagggaggccgtggtgcctatcatggcaaaggccccacagggagttcacttgatttgttatagccaaggcggtcttgtatgccgagcactcctgtccgtgatggatgaccataatgttgattcattcatctctctaagtagtccacagatgggacagtatggtgacacagactatcttaagtggctcttccccacatccatgcgctcaaacctgtatcgaatttgttattctccatggggacaggagttcagcatttgcaactactggcacgaccctcaccatgacgacttgtatctgaacgccagcagtttcctcgccttaatcaatggtgaacgcgatcacccgaatgcaacagtgtggaggaagaattttctgcgggtggggcatcttgttctgattggcggacccgatgatggggttattaccccgtggcaaagctctttcttcggattttacgacgcaaatgagaccgtgttggagatggaagagcagttagtttatcttagagattccttcggtcttaaaacactgctggccaggggtgccattgtccgctgcccaatggcgggtatctctcatacagcctggcactcgaaccggaccctatacgagacatgcatcgagccttggctaagctag

SEQ ID NO: 234025 - DNA, 3606 bp, synthetic construct
  misc_feature 1..3606: note = Description of Artificial Sequence: Synthetic coding sequence
  source 1..3606: mol_type = other DNA
atgaatttcgaaggtttggatcccggactcgccgaatacgctcctgccatgcacagtgctctggacccggtgctagatgcccacctaaatcccagcctgctgcagaacgttgagctggatccagagggcgtggctctggaagccctaccggtgcaggaatctgtgcacataatggaaggagtgtactccgagcttcactctgtcgtggcagaagttggggtcccagtgtctgtgagccatttcgacctgcatgaagagatgctctgggtagggtctcatgggggacacgccacaagcttcttcggacccgcactggaacggtattcaagctttcaggtcaacgggtcggatgatattcgccagattcaaagcctagagaacggtattctgtttctgacaaaaaacaacctgaagtatatggctaggggcggacttattattttcgactatctgcttgatgagaacgaggacatgcattccctgctgctaacagacagctccacccttctcgtgggcggtctgcaaaaccatattatcgagattgacctgaacactgtacaggaaacacaaaagtatgcagtggagacacctggagtcaccatcatgagacagaccaaccggtttttcttttgtggccacacgagtggaaaagtaagtctgcgagaccttagaaccttcaaagttgaacatgagtttgacgctttttcgggttctctgtcagactttgatgtccatgggaacctcctggccgcttgtggcttctcctctcggctcaccggactagcttgtgacagatttctgaaggtttacgacttgaggatgatgcgggctatcacgccactccaggtacatgtggaccccgctttccttcgcttcatcccgacctatacttcgcgcctggctattatctcccaatcaggacagtgccagttttgcgagccaaccgggctagccaatccggctgacatatttcacgttaatcctgttggacctctactgatgactttcgatgtgtccgcctctaaacaggccctggcgttcggggacagcgaagggtgcgtgcacttgtggacggattcgccggagccttcattcaacccttattctcgcgaaactgaattcgctttgccctgcctggtggatagcctgccccctctcgattggtcccaggatctgctcccactgagtttaatcccagttccactcaccacagacacactcctttcggattggcctgctgccaactcggctccagccccacgtcgtgcccctcccgtcgatgcagagattttgagaacaatgaagaaggttgggttcatcggctatgcccctaacccacgtactcggctgagaaatcagattccttaccgccttaaggaaagcgattctgaattcgacagcttcagccaggtcaccgagagtcctgttgggagggaagaggagccccacctgcatatggtcagcaaaaaataccgaaaggtgacgatcaagtactccaaactgggccttgaagattttgatttcaagcactataataagaccttattcgcaggtctcgaacctcatattcctaatgcctactgcaattgcatgattcaagttctttactttctggaacctgtgaggtgtcttatccagaaccacctttgccagaaggagttttgcctggcatgtgagttagggtttctttttcatatgctcgacctcagcagaggggatccgtgccagggtaataacttcttaagagcgtttagaaccattcccgaagcgtctgccctagggttgatcttggctgacagcgacgaggctagtgggaaggggaacctcgccagactgatccagagatggaaccgcttcatcctcacccagctgcaccaagatatgcaggagcttgagatcccacaggcctacagaggggcagggggttctttttgcagctcaggggattcggttattgggcagctgttcagctgcgagatggaaaattgcagcctgtgccggtgcggatcggaaacagtgagagcctccagcacactcctcttcacgctcagctatcctgatggatccaaatccgataaaactgggaagaactacgatttcgcgcaggtgcttaagagatcaatctgtttagaccaaaacacacaggcctggtgtgacacatgtgagaagtaccagccaactatccagactcgtaacatcaggcacttgccagacatcctggtgataaactgcgaggtgaattccagcaaggaggccgacttctggcggatgcaggcagaagtcgccttcaaaatggccgtgaagaagcacggcggagagatcagcaaaaacaaagagtttgccttggccgactggaaagaactggggtccccagagggtgtgctagtgtgtccttcaatcgaagagttgaaaaatgtgtggctgccattctctatccggatgaagatgaccaagaacaagggactcgatgtttgcaactggacagacggagatgagatgcaatgggggcctgccagggcagaagaggagcacggcgtgtacgtgtatgacttaatggctactgttgtgcacattctagacagccgcactggaggctcactggtggctcacataaaagtgggcgaaacctatcaccagcgtaaagagggagtgacgcatcagcaatggtacctttttaacgatttccttatcgagccaatcgataagcatgaagcagtccaattcgacatgaattggaaggtccctgcgatcctctattatgtgaaaaggaatctgaacagccgatataacctcaacattaagaatccaattgaggcatccgtgctcctagccgaggccagcctggccagaaaacagagaaagacacatacaacgttcatccctctcatgctgaacgaaatgcctcagattggcgaccttgtggggctggatgctgagttcgtcacacttaacgaagaagaggccgagttacgcagcgacgggacaaaaagcactataaagccatctcaaatgagcgtagctcggattacgtgcgttcgcggacaggggcctaatgagggaataccgtttatagacgattatattagcactcaggagcaagtcgtggattaccttactcaatactctggaatcaagcccggagatcttgatgcaaaaatctcctctaagcatctcaccactctgaaatctacataccttaagttacgttttctaatcgatatcggggtcaaattcgtgggacatggtctccagaaagacttccgcgtaatcaatctgatggttcctaaggaccaagttctggacacagtatatttattccacatgcccaggaagcgcatgatttccctgaggttcttggcctggtattttctggatctgaagatccagggtgaaacccacgatagcattgaggatgctagaacagccctccaactgtaccgcaaatacctcgagttaagcaagaacgggacggaacccgagtcttttcacaaggttcttaaggggttatacgagaagggaaggaaaatggactggaaagtcccagagccagagggccagacatcacctaagaacgcagcagtctttagttcagtgttggcgctttag

SEQ ID NO: 234026 - DNA, 3609 bp, synthetic construct
  misc_feature 1..3609: note = Description of Artificial Sequence: Synthetic coding sequence
  source 1..3609: mol_type = other DNA
atgaacttcgaaggcttggacccgggactggccgaatacgcgccagcgatgcactctgctctggaccccgtgcttgacgctcatcttaacccaagcctcctgcaaaacgtggagcttgatcccgagggcgtggccctcgaggcactcccagtacaggagtccgtgcacatcatggaaggagtgtactccgagctgcattccgttgttgctgaagtgggtgttccagtgagcgtttcacattttgatctccatgaagaaatgctatgggtcggatcccatggaggccatgctacctctttctttggacccgcactcgaaaggtatagttcatttcaagtgaatggctcagatgacatcaggcagattcaaagtctggagaacgggattctgttcctcacaaagaacaacctgaagtatatggcaagagggggactaatcatctttgattacttactggacgaaaacgaagatatgcactcgctactgctgaccgactcttcaactctcttggtaggcggactgcaaaaccatattattgaaattgacctgaatacggttcaagagactcagaaatacgctgttgagacgcccggtgtcactataatgagacagaccaacagatttttcttctgcgggcacacttctggcaaagtgagcctccgcgacctgcgaaccttcaaagtcgagcatgagtttgacgcattttctggatccctgagcgacttcgacgttcacggaaatctgctagcagcatgtggcttttcatctcggttaacaggactggcatgtgaccggtttcttaaggtctacgacctccggatgatgcgcgctatcacaccacttcaggtacacgtggatccagccttccttaggttcatacccacatacaccagcagattagccattattagtcaaagtgggcagtgtcagttttgcgaacctactggcctagccaacccagccgacattttccatgtcaatcccgtgggtccactcctaatgacatttgatgtgtcagcttctaagcaagccctggcctttggcgacagcgaaggttgtgtgcatctgtggactgactcgcctgagccctcatttaatccatattctagggagactgagtttgccttaccatgtcttgtggatagcttgccccctttggattggagtcaggacctcctgccactatcactcattccagtgcccctaacaacagacacactgctgtccgattggccggctgccaatagtgcaccagctcctcgaagggcccctccagtggacgccgagatcctgcggaccatgaaaaaggttggcttcataggctacgcaccaaaccccagaacccggctgcgaaaccagatcccttatcggttgaaagaaagcgacagtgaattcgacagtttttctcaagtaacggagtcacctgtgggaagagaagaagaaccacacttacacatggtcagcaagaagtaccgcaaagttactattaaatactccaagttgggactcgaggacttcgattttaagcattacaacaagacattgttcgcgggattggaacctcacatccccaatgcttattgcaactgcatgatacaggtcctttacttcttggagcctgtgaggtgcttaatccagaaccacctctgccagaaggagttttgtctcgcatgcgaacttggctttctgttccacatgcttgatctaagcagaggggacccgtgtcagggcaataacttcctccgagcctttaggaccatcccggaagcatcagctcttggactgatcctggcagactccgatgaggcgtcgggcaaaggcaacctggcccgattaattcagaggtggaacagattcattctgacacagctacaccaggatatgcaggagcttgagatcccccaggcctatcggggagcgggtggaagttctttctgttcttccggcgattctgtgatagggcagttgttttcttgtgagatggaaaattgttctctctgcaggtgtggcagtgagactgtccgcgcttcctccaccctcctgtttactctgtcgtaccccgatggaagcaagtcggataagacgggcaagaactatgatttcgcgcaggtcttgaaaagatccatctgcctggaccagaatacacaagcgtggtgtgatacatgtgaaaaataccaacccacaatccaaacccgaaacatcaggcacctgcctgatatcctggtaatcaactgcgaggtgaactcatcaaaggaggccgatttctggcggatgcaggcagaagtagctttcaagatggccgtcaaaaaacatggaggggaaatctcaaaaaacaaagagttcgcactggcagattggaaagaattgggatcacctgaaggtgtgctggtgtgtccatctattgaagaactcaagaatgtgtggctgcccttttctattcgcatgaagatgaccaagaacaagggcctcgacgtgtgtaactggactgatggtgacgagatgcagtggggtcccgctagagctgaggaagaacacggcgtttacgtgtacgatttgatggccacagtggtccacatcctggattccaggaccggaggctctctggtcgcacatatcaaagtgggagaaacctaccaccagcgtaaggagggtgtgacccaccagcagtggtacctgttcaatgacttccttattgagcccatcgacaagcacgaggccgtacagttcgacatgaattggaaagtaccggcaatactctattatgtcaaaagaaatctgaactcacgctataatcttaatattaaaaatcccattgaggcctccgtcctgctggccgaggctagtttagccaggaagcagcgcaaaacacacacgactttcatacctttaatgctcaatgagatgccacagatcggggacctcgttggcctggacgctgaattcgtgaccctgaatgaagaggaagctgaactgcgctcagacggcaccaaatcgacaatcaagcccagccaaatgtctgtggcacgaatcacatgtgtgcgcggtcaggggccaaatgaaggcattcccttcattgatgactacataagcactcaagagcaagttgttgactatctgactcagtatagcggaatcaagcccggagacctggacgccaagattagctccaaacatcttacaacacttaaatccacgtatttgaaacttaggttcttaatagacattggcgtgaagtttgtgggccacggcctacagaaggactttcgcgtgatcaatctcatggtgccaaaagatcaagtgctggacacagtgtatctgttccacatgccaagaaagcggatgattagtctcagattcctggcctggtactttctcgacctgaagatccaaggcgagactcatgattcaattgaggatgccaggacagctctgcagctgtatagaaagtacctagagttgagcaaaaacggaaccgagcctgagtcgttccataaggtcctcaaagggctgtacgagaagggccgtaaaatggactggaaggtcccagagcctgaggggcagacttctcctaaaaacgctgccgttttcagcagcgtgctagcattgtag

SEQ ID NO: 234027 - DNA, 3597 bp, synthetic construct
  misc_feature 1..3597: note = Description of Artificial Sequence: Synthetic coding sequence
  source 1..3597: mol_type = other DNA
atgaattttgaaggtctggaccctggactggcggaatatgcacctgcaatgcatagcgcgctggaccctgttctggatgcgcacctgaatccgtcattgctccagaatgtggagctcgatcctgagggagttgccctcgaggcactgccagtgcaggaatccgtgcacatcatggagggcgtgtatagcgaactgcacagtgtggtggcggaagtaggggtccctgtctccgtgagccacttcgacctgcacgaagaaatgctatgggtaggcagtcacgggggtcatgccacaagtttcttcggccctgccctggaacgctattccagctttcaggtgaatgggtcagacgatatccgccaaatccagtcccttgaaaatggcatactgtttctgaccaagaacaatctaaagtacatggccaggggagggcttatcatatttgattacctgcttgatgagaacgaggatatgcattctttactcctgactgacagttccaccctattggtggggggattacagaatcacataatcgagattgacctgaacacagtccaagaaactcaaaagtacgcagtggaaacacctggggtgactataatgcggcagactaaccgcttctttttctgtggacacactagcggcaaagtatccctgcgagacctcagaactttcaaagtagaacacgaatttgatgcgttttctgggagtctgtctgatttcgacgtgcacggtaatctattagcagcctgtggtttctcctcacgactgaccggcctcgcttgcgatcgtttcttgaaggtgtacgatctgcgtatgatgcgtgcaatcacgcccctgcaggttcacgtggatccagcctttctgcggttcatcccaacatataccagccggctggctattatctcccagtctgggcaatgccagttctgcgaacccacaggccttgccaatcctgccgatatctttcatgttaacccagtgggccctctgctcatgaccttcgatgtgagtgcaagtaaacaggctttggccttcggagactccgaaggatgcgtgcacctgtggactgattctccagagccatcatttaatccttactcgcgcgaaaccgagttcgcgctaccgtgtctggtcgacagtctgccacctctagattggtcccaggatctgctccccctttccctgattcctgttcccctgactactgacaccttgcttagcgattggcccgcagctaattctgcaccagcgcctcgcagagccccaccagtcgatgcggagatcttaaggacaatgaaaaaggtaggattcattggttacgctccaaaccctaggacaagactgaggaatcagattccctatcgcctgaaggagagcgatagcgagtttgactcttttagccaggtaacagaaagtccagtgggtcgggaagaagagcctcatctccacatggtgtctaagaaatacagaaaagttaccataaagtactctaagctcggtttggaggacttcgattttaaacactataataaaaccctatttgccggtctggagcctcacatccccaacgcttattgtaactgtatgatacaggtgctttactttttggagcccgtgcgttgcttgatccagaaccatctctgccaaaaagaattttgcctggcttgtgaactcggtttcctgtttcacatgctcgatctgtcaagaggggacccttgtcaaggaaacaattttctgcgcgctttccgcaccataccagaggcatcagctctgggcctgatattggcagactcggacgaggctagtggtaaagggaatctggccagactcattcagcgctggaaccggttcatactgacccagctccaccaggacatgcaggaacttgaaattccgcaagcataccggggagctggaggctcctctttttgctccagcggggacagtgtgatcgggcagttgttcagttgtgaaatggagaattgttcattgtgtcggtgcggaagcgaaacggtgagagcatcttcaacgctgttgttcacattatcctacccagacgacaaaacaggtaaaaattacgacttcgcgcaggtacttaagcggagcatatgtttagaccagaatactcaggcctggtgcgacacatgcgaaaaataccaaccaaccatccaaactcggaacatcagacatcttccagatatcctggttatcaactgtgaggtgaacagttcaaaggaggctgacttttggaggatgcaggctgaggtggcgttcaagatggcagttaagaagcatggaggagagatttctaaaaacaaggagttcgcgttggcagattggaaagaacttggctcgccggagggagtgctcgtctgcccatctatcgaggagctcaaaaatgtatggctgccctttagtattaggatgaaaatgaccaagaacaaaggtctcgatgtctgcaattggactgacggcgacgaaatgcagtggggccctgcacgggctgaagaagaacatggagtgtatgtctacgatctcatggccacggtggtgcacatactagattcacgcacgggcggatctttggtggcacacattaaggtgggggagacctatcaccagaggaaggaaggagttacccaccagcaatggtacctgttcaacgactttctgattgaacccatcgacaaacatgaggcagtgcagtttgacatgaactggaaagttccggctatcttatactacgtgaagagaaatctgaatagccgttacaacttgaatattaagaacccaattgaagccagcgtgttgctggctgaggcttcgctggccagaaagcagcgtaaaacacacaccaccttcataccattgatgctcaatgagatgccacagatcggcgatctggtgggcctggatgcggaatttgtgaccctgaatgaggaagaggctgagctgagaagcgatggaactaaatccactattaagccaagtcaaatgtcagttgcacggatcacttgtgtgaggggacagggacctaatgaggggatacccttcatcgatgattacatatcgactcaggaacaagtggttgactacctgacacagtacagtggaatcaagcccggagacctcgatgccaagatcagctcaaagcacctcacaactctcaaaagtacttaccttaagctgcgctttctaatcgatattggcgttaagttcgtcggccacgggctgcaaaaagatttcagagtgattaacctgatggtgccgaaagaccaggtgctcgatactgtttacctattccatatgccccgaaagcgcatgatctctcttcggtttttagcgtggtacttcttggatttaaaaatacagggagagacgcatgatagtatcgaggacgccagaaccgctttacagctctaccgcaagtatctagaactttcaaaaaatggcacagagcccgagtcgtttcacaaagtcctcaagggactctatgaaaaaggcagaaagatggattggaaggtgccagaaccagaaggccaaacgtcacccaaaaacgccgctgtattctcatcggtgctcgccttgtag

SEQ ID NO: 234028 - DNA, 3609 bp, synthetic construct
  misc_feature 1..3609: note = Description of Artificial Sequence: Synthetic coding sequence
  source 1..3609: mol_type = other DNA
atgaattttgagggactggaccccggtctggccgagtatgcccctgctatgcactcggctctggatccggtgctagacgcccatctgaatccctcacttttgcagaatgtggagttagaccctgagggggtcgctctggaagctttacccgtccaggaaagtgtgcacatcatggagggagtatactccgagctgcactccgtggtggccgaggttggagtgcctgtatctgtttcacattttgacctgcacgaagaaatgctctgggtcggatcgcacggaggccacgctacgtccttcttcggtccagcgctcgaacggtattcctcctttcaggtgaacgggtccgatgacattaggcaaattcagtctttggagaatggcatcctctttctgaccaaaaacaacctgaagtacatggccagaggcggtcttattatttttgactaccttctggacgagaatgaagacatgcactcacttctgctgactgattccagtacgctcctggtgggcggactgcagaaccatatcatagagatcgacctcaacacagtgcaggagacacagaagtacgccgtcgaaacccctggcgtgacaatcatgcgtcaaacaaaccggttctttttttgcgggcacaccagcggcaaagtgagtctccgggacctcaggactttcaaggtggagcacgagtttgacgccttcagcggaagtctaagtgactttgacgtgcacggtaacctacttgcagcctgtggattttcttctaggctgaccggcctagcatgtgaccggttcctgaaggtgtatgacctgagaatgatgcgcgctatcactcctttgcaggtgcatgtggaccccgcttttttgagatttattccaacatacacttcacggctcgccatcatcagccagtccgggcagtgtcaattttgcgaacccaccggactggctaacccggctgacattttccacgtgaacccagtggggccactgctcatgacattcgatgtgtctgcctctaagcaggcattagccttcggagattcagagggctgtgttcatttatggaccgattcccccgagccttcctttaacccatactctcgggaaaccgagttcgcacttccatgcttagtggactctctgcccccattggactggtcccaagatcttcttcccctctcactaatccctgtgccactcacgactgacaccctgctcagcgattggccagcagccaacagcgctcccgcacctagacgcgctccaccagttgacgccgagatcttgcgcaccatgaaaaaggtgggtttcatcggttatgcaccgaatccacggacgaggctgcgcaatcagattccctaccgcctgaaggagtctgactcagaatttgacagcttctcacaggttacagagagtccggtgggcagagaggaggaaccacatctccatatggtctctaagaagtaccgcaaggtgaccataaagtactccaagcttggacttgaggacttcgactttaagcactacaacaaaaccctgttcgctggactggagccccatatcccgaatgcatactgcaattgtatgatccaggtcttgtacttcctcgagcctgtcaggtgtctaatccagaaccacctttgtcagaaggaattctgcttggcttgcgagctcggatttctttttcacatgctggatctctctcgaggcgatccctgtcaaggaaataacttcctcagggcgttccggaccattcctgaagcctctgctcttgggctgattctggccgattccgatgaagcttccggcaagggaaatctggctcgacttatccagcgatggaatagattcattttgacccagctgcatcaggatatgcaagagctcgagatccctcaggcttataggggtgccggtggttcttctttctgctcttcaggcgattcagtgataggccaactgttcagctgcgaaatggagaactgttcattatgccgctgtggcagcgagaccgtcagggcatccagcactttactgtttaccctgagttatccggatggctccaaatcagacaagacagggaaaaactatgacttcgctcaggtcctaaagcggtctatttgcctcgaccagaacacccaggcttggtgtgatacttgtgaaaaataccagcccacgattcaaacccggaacataaggcatctgcctgatatcttggtgatcaattgcgaagttaattcctccaaagaggcggacttctggaggatgcaggctgaggttgccttcaagatggctgtgaagaagcacggtggagagataagtaaaaacaaggagttcgcccttgctgattggaaagagctcggctccccggaaggtgtgttagtatgccctagcatcgaggagctgaagaacgtctggctcccattttcaattagaatgaaaatgacaaaaaataaggggctggacgtttgcaattggaccgacggggatgagatgcagtggggtcccgcaagagctgaggaagaacacggcgtctatgtgtacgacctgatggccacggtagtgcacatccttgacagccgcactggcggttcactcgtagctcatatcaaggtgggagagacttaccaccagcgcaaggagggtgtgacgcatcaacagtggtatctctttaacgattttttaatagagccgatcgataaacatgaagccgttcagtttgatatgaattggaaggtgccggcaatattatattatgtaaagcgcaacttaaatagcaggtataatcttaatattaagaaccccatcgaggccagcgttctgctggctgaggctagcctggcccgaaaacaacggaagacacatacgaccttcatccccctcatgcttaacgagatgcctcaaattggcgacctggtgggccttgatgccgagtttgtgaccctaaacgaagaggaggctgaactgaggagcgatgggaccaaaagcacaattaagccgtcacagatgtccgttgctaggatcacttgcgtgcggggacaggggcctaatgaagggatcccttttatcgacgactacattagtacccaggaacaggtggtggattatctgacccagtatagtggcattaaacccggtgatcttgacgctaagataagctccaaacatcttacgacactgaagtctacctacctgaagctacgctttctcattgatatcggtgtgaaattcgtgggacatgggctccagaaggattttagagtaatcaaccttatggtccctaaggaccaggtgctggacacggtatacctgttccacatgcctcgcaagaggatgatcagtcttcggttcctcgcttggtattttctagatctgaaaatccagggggagactcatgatagcattgaggatgccaggacagctctccagctttacaggaagtaccttgagctttccaaaaacggaactgaacctgagtcttttcataaagttctcaagggactttacgagaaagggagaaaaatggattggaaggtgcctgagccggaggggcagaccagcccaaagaatgccgctgtcttctcttccgtgctggccctgtag

SEQ ID NO: 234029 - DNA, 987 bp, synthetic construct
  misc_feature 1..987: note = Description of Artificial Sequence: Synthetic coding sequence
  source 1..987: mol_type = other DNA
atggatgctgttcttttggagcactttccaggtggcttagatgcattcccctcgtcctattttgatgaggacgacttcttcaccgaccaatcttctcgggatccactggaggacggggacgaactgctcgcagatgaacaggccgaagtcgagtttttgtctcaccagcttcatgaatattgctatcgcgatggtgcttgcctgctgctgcagccagccccacccgcagcccctctggccttggcacctccaagctctggcggactcggagagcccgacgacggaggcggaggaggctactgctgcgaaaccggcgcaccacccggaggttttccatactcaccaggatctcctcctagctgcctggcttacccttgcgccggtgctgctgttttaagcccaggcgctcgcctgagaggactttccggcgctgccgctgccgcagcacggagaagacggagagtcagaagcgaggcagagctccagcagctgaggcaggcggcaaacgtccgggaaagacggaggatgcagagcatcaatgatgcttttgaggggttgcggtcccacattccaactctcccgtacgaaaaacgcctgagtaaggtcgacactctccgtctggccattgggtatatcaactttctgagtgagttggttcaggcagacctgcccctcagaggtggcggtgcaggcggttgtggaggaccaggcggagggggaagattgggtggcgacagtcccggttcacaggcccagaaggtgatcatctgtcaccggggaacgcgctctccatccccaagcgaccccgattacggcctaccccctctggcagggcactccctgagctggaccgatgaaaagcaactcaaagaacagaatatcatacgcactgccaaggtgtggacaccagaggatccacggaagctgaatagcaagtcttcttttaacaatatcgagaatgaacctccatttgagttcgtttcctag

SEQ ID NO: 234030 - DNA, 852 bp, synthetic construct
  misc_feature 1..852: note = Description of Artificial Sequence: Synthetic coding sequence
  source 1..852: mol_type = other DNA
atgaacggcgaagagcagtattatgcggctacccagttatataaagacccgtgtgctttccagcggggacccgctcccgagttttccgcgagccctccagcttgtttgtatatgggccgacagcctcctccccctcctccgcatccgtttcctggggcactaggggcattagagcaaggctcgccacctgacatttctccctacgaagtgcctccgcttgcagacgaccctgcagtggctcacttgcaccatcacctccctgctcagctggctctgccacatccccctgccggaccgttcccagaaggggcagaacccggagtgctggaagagccaaaccgagtgcagctaccattcccctggatgaaatccaccaaggcccatgcctggaaaggccagtgggccggtggggcttacgctgccgagcccgaggaaaacaaacgaacacgcacagcttacacaagggcacagttgttggagttggagaaagaatttctctttaataagtacatatcgcgccctagaagggtcgaactggcagtcatgttaaacctgactgagcgccacataaagatctggttccagaaccgccgaatgaagtggaagaaagaggaagacaagaaacgcggtggcggaaccgcagtgggcggtggcggtgtagccgagcctgagcaagactgcgcagtcacctccggcgaagagctcctcgcacttcctcctcccccacctcccggaggcgctgtgcccccagccgcacctgttgccgctcgtgagggcagactgcctcctgggctatctgccagcccacagccatcttcagtggctccacggcgtccgcaggagccgagatag

SEQ ID NO: 234031 - DNA, 1398 bp, synthetic construct
  misc_feature 1..1398: note = Description of Artificial Sequence: Synthetic coding sequence
  source 1..1398: mol_type = other DNA
atgctgccactgtggactctctctttgcttttgggcgcagtggcgggtaaagaagtgtgttatgaaagactgggatgtttttcggacgatagtccttggtccgggattactgaacgcccattgcacatcttgccatggtcccccaaggatgtgaacactaggtttctcttgtataccaatgaaaatcccaacaatttccaggaagttgctgccgatagttcctcaatctccggcagtaattttaaaaccaacaggaagacccgcttcatcatccacggttttatcgacaagggcgaggagaactggctggctaacgtgtgcaagaacctctttaaagtggagtccgtcaactgtatatgtgtcgattggaaggggggatctcgtaccggctacacccaggctagccagaacatccggatcgtaggcgctgaggtggcctattttgtggagtttttgcagtccgcctttggctactcaccctcaaatgtgcacgttattggacattctctgggcgcacacgcggctggggaggctggcagacgtaccaacggcaccatcggcaggatcacaggactcgatcctgctgagccttgctttcagggcactccagagctggtgagactcgatccctcagacgcaaaattcgtggatgtaattcacacagacggcgctccaatagttcccaatctcggattcgggatgagtcaagtggtaggccacttagacttctttccgaacggcggtgtggagatgccgggatgtaagaaaaatatactgagtcagatcgtcgatatcgacggaatctgggaaggtactcgtgattttgcagcctgtaatcacctgagatcttacaaatactacactgatagcatcgtaaatccagacggttttgctggtttcccatgcgcttcctacaatgtattcactgccaacaaatgttttccatgtcctagcggaggatgcccacagatggggcattatgctgatcgctacccaggcaagactaacgacgttggtcaaaaattctacctcgacacgggggacgcaagtaacttcgccagatggcgctacaaggttagcgtgacccttagcggcaagaaggtaaccggacacatacttgtctctctgttcggcaacaagggaaattctaagcagtatgaaatcttcaagggaacattgaaaccagactccactcattctaatgagttcgactccgatgttgatgtgggggatctgcaaatggtcaagtttatttggtacaacaatgtgattaatccaacattacctagagtgggagcttcaaaaatcatagtggaaactaacgtggggaagcagtttaatttctgctcgcccgaaacagtccgcgaggaagtccttctgacattgaccccctgttag

SEQ ID NO: 234032 - DNA, 3372 bp, synthetic construct
  misc_feature 1..3372: note = Description of Artificial Sequence: Synthetic coding sequence
  source 1..3372: mol_type = other DNA
atgaacagtccaaacgaatccgcggatgggatgagcggaagggagcccagcctggaaatactgccacgcaccagcctccacagcattccggtcaccgtggaggtgaaacctgtactcccccgagcgatgccctcgtcaatgggtggcggaggcggaggctctccctcaccagtggaactgagaggggcactagtgggtagcgtggatcccacgctgcgcgaacagcagctccagcaggaactgctcgcacttaaacagcagcagcagcttcagaagcagctccttttcgctgaattccagaaacaacacgaccatttaacccggcagcacgaagtacaattgcagaaacatctgaagcaacagcaggagatgttagcagctaaacagcaacaggagatgctggcagcgaaaagacaacaagagcttgaacagcagcggcaacgcgagcagcagcggcaggaagaactggaaaagcagcgtctggagcaacaactgcttatcctgagaaataaggagaaaagcaaagaaagcgccatagcttccaccgaagttaaactgcgtctccaggaattcctgctcagcaagagcaaggaacctacaccaggtggcctgaaccacagcctgccgcagcaccctaaatgttggggagcccaccacgcgagcctggaccagtcctcaccacctcagtctggccctcctggtactccgccaagctataagctgcctctgcccggaccgtacgacagcagggacgatttcccactccgaaaaactgcaagcgaaccaaacttaaaggtaaggtccagactaaagcagaaggttgcagaaagacggtccagtcccctgctaaggcgcaaagacggaacggtgatttccacgtttaaaaagcgggcagttgagattactggcgcagggccaggtgcaagctctgtttgcaacagtgctccgggatccgggccaagctctccaaactcctcacacagtaccatagctgaaaacggttttacaggatctgtgccaaatatcccaactgagatgctgccccagcaccgggcacttccactggattcgagccccaatcagttctccctgtatacaagcccatctctgccaaacatttctcttggtttgcaagcgacagtcacagtgaccaactctcacctcactgcaagtccaaagttgtctacccagcaagaagccgagcgccaggcactgcagagcctgcgccaaggaggcacactgacaggaaaatttatgtccactagcagtatccccggttgtttactcggtgtcgccctagagggagatggctctccacatggtcatgcttcacttctgcaacacgtcctgctcttagaacaggccagacagcagtctactttgattgccgtgccactccatggacagagtcctctggtgaccggcgaaagagttgccacctccatgagaaccgtcggcaagttaccaagacatcgaccactctcgcgaacacagtcctcaccgttgcctcagtccccccaagcactgcagcagctggtcatgcagcagcaacatcagcaattcctagagaagcaaaaacagcagcaattgcagctagggaaaatattgacaaagactggagagctgcctagacagcctacaactcacccggaagagactgaagaggagctgaccgagcagcaagaggtgctgttaggagagggtgctttgaccatgccaagggaggggtccaccgagtccgaaagcacacaagaggatctggaagaagaggatgaggaagatgacggcgaagaagaagaagattgtatacaggtaaaagacgaagagggggagtcgggcgctgaagagggtcccgaccttgaggagcctggagccggatacaaaaagctgttttctgacgctcagccattgcagcccttgcaggtgtaccaggctcctctctctctggctaccgtgcctcaccaggctctgggacgaacccaatcctcccccgcagcccctggtggaatgaagtcaccgcctgaccagcccgtcaaacacctgttcactacgggagtggtatacgatacattcatgctaaagcatcaatgcatgtgcgggaatactcacgtccatccagaacatgctggtagaattcagtccatctggtccagactgcaggagactggcctgttaagtaagtgtgagcgaatcaggggacgaaaagccactctggacgaaatacagaccgtccactcagaataccacaccctgctctacgggacgtccccacttaatcgccagaaactggattcaaagaagctgctcggcccaattagccagaaaatgtatgccgttttaccatgtggtggtataggagtggactcagacacagtatggaacgaaatgcattcgtcatcagcggtccgaatggctgtcggatgcctgctggaactcgcatttaaggttgccgcaggggaactgaagaacggcttcgccataattcggccaccgggtcatcacgcagaggaaagtaccgctatgggtttttgcttctttaatagcgtagccatcaccgccaagttattacagcagaagctgaacgtgggaaaagttctcatcgttgactgggacattcatcatgggaacggcactcaacaggccttttataacgatcccagcgttctctacatttctctgcacaggtacgacaatggaaacttttttccaggttcaggggcaccggaggaagtgggagggggaccgggagtgggttacaatgtgaacgtggcttggaccggcggagtcgatccccctatcggagatgtggaatacctaaccgccttcaggactgttgtgatgcccattgcccacgaattcagccccgacgtggtgctggtgtcagcaggtttcgatgctgtcgaaggccatttaagccctctggggggatacagcgtaactgcacgttgttttggccatctgacccgtcagcttatgactttagcagggggacgcgtcgtgctggccctggaaggcggacacgatcttactgccatctgcgacgcctctgaggcatgtgtgagcgcactccttagcgtggagctccaacctcttgatgaggccgtactccagcagaaaccaaatataaatgcggtggcgacgctcgagaaagtcatcgagattcagagcaagcactggtcttgcgtccagaagtttgccgcaggcctgggacgcagtttgcgtgaagctcaggctggggagaccgaggaggccgaaaccgtttcagcaatggccctgctgagcgtgggcgcagaacaggcccaggcagccgcagcgagggaacactccccgaggcccgctgaggaacctatggagcaggaaccggcactgtag

SEQ ID NO: 234033 - DNA, 1128 bp, synthetic construct
  misc_feature 1..1128: note = Description of Artificial Sequence: Synthetic coding sequence
  source 1..1128: mol_type = other DNA
atgaatacctcccacctgcttgcactgctgctccccaaaagtccacaaggggagaataggagcaagccactaggaactccgtataacttctcagagcactgtcaggactccgtggacgtcatggtgttcattgtgacatcttactcaatcgagaccgtggtgggtgtcctggggaacctgtgcctaatgtgtgtcacagtacgccagaaggaaaaggcaaatgtaactaatctgctaatcgctaatctggctttctctgacttcttaatgtgcctgctctgccagcccttgactgctgtctacaccatcatggactactggatttttggagaaaccctctgcaaaatgtcagcctttatacagtgtatgtctgtgaccgtgtcgatactttctctggttctggtggccctggaacgccaccaactcatcattaatcccactgggtggaagccgagcataagccaggcgtacctgggaatcgtgctgatatgggtgatcgcttgcgtgctgtcactccccttcttagctaattctatcttggagaatgtgtttcacaaaaaccactcaaaagccttggaattcctcgctgataaagttgtgtgcacagaaagttggcctttggctcatcatcgcacgatttacacgacatttctcctcttgttccagtattgtctcccgcttggatttattctagtctgttatgcccgtatctatcgcagactgcagcgccaaggaagggtcttccataaagggacatatagtctgagagctgggcatatgaaacaggtcaacgtggtgcttgtcgtgatggttgtggccttcgctgtgctgtggctccccctgcacgtgttcaacagtttagaagactggcaccatgaggctattcccatctgtcatggtaatctcatattcctggtgtgccacctgctggcaatggcttccacatgtgtcaaccccttcatctatggttttctgaatacaaattttaagaaagagataaaggcactagttttgacatgtcagcagtcagctccacttgaggagtcggaacatttaccacttagcaccgtccatactgaggtgtccaagggctcactgcgactgtcaggcaggtccaaccctatttag

SEQ ID NO: 234034 - DNA, 1128 bp, synthetic construct
  misc_feature 1..1128: note = Description of Artificial Sequence: Synthetic coding sequence
  source 1..1128: mol_type = other DNA
atgaatacttcacacttactagctcttctgttgccaaagtccccacagggagagaacagatccaaacctctgggtactccgtacaatttctccgaacactgccaagattccgtagacgttatggtatttatcgtgaccagttactctatcgagacagtggtgggagtgctgggaaatctttgtctcatgtgtgtcaccgtcagacagaaggagaaggccaatgtcaccaatctgctcattgctaatctggccttcagcgacttccttatgtgtctactgtgtcagcctttgaccgctgtctataccattatggattactggattttcggagaaacactatgtaagatgagcgccttcatccaatgcatgtctgtcacggtgtccattctctctctagtgctggttgcgctagaaaggcatcagttgattatcaatccaaccgggtggaaacctagtatcagccaggcttacttaggaatagtcctaatatgggtgatcgcttgcgtcctgagtctgcccttcctcgccaatagcatcttagaaaatgtctttcacaaaaaccatagcaaggcactcgagtttctcgccgacaaggtcgtctgtaccgaatcatggcctctggcccaccatcgaacaatctatacaacattcctgctcctttttcagtactgtctgccactgggctttatcctcgtctgttatgccaggatctacagacgactccagcggcagggtcgtgtgttccataagggaacatattccctcagggccggtcatatgaagcaggtcaacgttgtgctcgtggttatggtagtggcatttgcagtgttgtggttacccctccacgtgtttaatagtctggaggactggcaccatgaggcgatcccgatttgccacggcaacctcatttttttagtgtgccacctgctcgcaatggcatctacctgtgtcaaccctttcatttatggcttcctgaacacaaattttaagaaagagattaaggcgcttgtcctgacctgtcagcaaagcgcccctttggaggaaagtgagcatctcccactcagtacagtacataccgaggtctcaaaggggtcgctgcgactgagtggacgctccaatcccatctag

SEQ ID NO: 234035 - DNA, 1797 bp, synthetic construct
  misc_feature 1..1797: note = Description of Artificial Sequence: Synthetic coding sequence
  source 1..1797: mol_type = other DNA
atgctgaaacttgtgggaggcggaggcggacaggattgggcctgctcagttgccggtaccagcttaggcggtgaggaggcggctttcgaggtcgccagacccggagaccaaggtaaggcaggagggggatcaccgggatgggggtgcgcaggaattcctgactcagctccaggtgccggtgttctccaggcaggcgctgtgggccctgccagggggggacagggggctgaagaggtgggcgagagtgccggaggtggcgaagaaaggcgcgtgcgtcatcctcaggcgccagctctgcgtcttctcaaccgaaagccccagggagggagcggagaaattaaaacgcccgaaaacgatcttcagaggggacggctgtcacggggaccacgcactgcccctcctgctcctgggatgggggatcgcagcggacagcaggaacggagtgtgccacattctcctggcgctcctgtaggaacgagcgcagccgcagtaaatgggctgctgcacaatggatttcaccctccacccgtacagcctcctcatgtctgttcacgcggtcccgtggggggaagcgatgcggctccacagcggttgccgctcctccctgagctccagcctcagcccctactgccccagcatgacagtcctgctaagaagtgccgattgcgaaggaggatggacagcggcagaaaaaaccggcctccctttccatggttcgggatggatatcggaggaacactcgtgaaacttgtgtactttgaacccaaagatatcaccgccgaagaggaacaggaggaagttgaaaatctgaaatcaattagaaaatatttgacctctaacacagcatatggaaagactgggattagagacgtgcatttagagctgaagaatctaacaatgtgtggtcggaagggaaatctacattttatcaggttcccatcatgcgccatgcaccggtttatccaaatggggtctgagaaaaacttttcatccctgcatacgacactgtgtgctactgggggtggtgcattcaaatttgaagaagattttcgcatgatcgccgatctgcagctgcataaactggacgagctggactgtttaatccaaggactactgtatgtggattctgtcggcttcaatgggaagcccgagtgctactacttcgaaaaccctaccaaccccgagctctgccagaagaagccatattgtctcgataacccatacccaatgctgttggtaaacatggggtccggggtttcaatacttgccgtctattcaaaggataattataagagggtgactggtacttccttgggtggcggaactttcctgggtctctgctgcctgttaaccggctgcgagacctttgaagaagctttggagatggccgcaaaaggcgactccacaaacgtcgataaactggtgaaggatatttacgggggtgactacgaacggtttgggctgcaaggaagtgcagttgcatcaagctttggaaacatgatgagtaaggagaaacgagattccatctccaaggaggacctggccagagccaccctggtgacaattaccaacaatatagggtcgatcgcaaggatgtgcgcccttaacgaaaatattgaccgtgtggtcttcgtgggaaactttctgcggattaacatggtgtcaatgaagctcctggcttatgctatggatttctggtcaaagggacaacttaaagcattatttctggaacatgagggatattttggagcagttggggcactcctggaactgtttaaaatgaccgatgacaaatag

SEQ ID NO: 234036 - DNA, 945 bp, synthetic construct
  misc_feature 1..945: note = Description of Artificial Sequence: Synthetic coding sequence
  source 1..945: mol_type = other DNA
atgaaactcataaacggtaagaaacaaacctttccttggtttggcatggacatagggggaacgctcgtaaaactggtgtatttcgaaccgaaagacatcacagccgaggaggagcaagaagaggtggaaaatctgaaatctatccgcaagtaccttactagcaacacagcatacggaaagacaggcattagggacgtccatctagagctcaagaatcttactatgtgcggtagaaaagggaacctgcatttcattagatttccatcctgtgccatgcatagatttattcagatgggttcagaaaagaatttttcatccctccatacgactctttgcgcaaccggtggtggtgccttcaaatttgaagaagattttagaatgatagcagacctgcaactgcataaactcgacgagctcgactgcctcatccaaggtcttctatatgtcgactccgtgggcttcaatggcaagccagaatgctattacttcgagaaccccaccaatcctgaattgtgtcagaagaaaccttactgtctggataatccttatcctatgctcttagtgaacatggggagcggtgtgtccatccttgcagtatattctaaagacaattataaacgggtcaccggcaccagttttgggaacatgatgtcaaaagagaagcgggacagcatttccaaagaggacttggcccgagccacccttgtgaccatcaccaacaacatcggctcgatagcccgtatgtgtgccttgaatgagaatatcgatcgggtcgttttcgtcggaaactttctccgcataaatatggtctcaatgaaactgctggcttatgccatggacttctggagtaagggccaactcaaggcgctgtttttggagcacgagggatactttggggcagtgggcgcactgctggagctattcaaaatgacagatgataagtag

SEQ ID NO: 234037 - DNA, 1122 bp, synthetic construct
  misc_feature 1..1122: note = Description of Artificial Sequence: Synthetic coding sequence
  source 1..1122: mol_type = other DNA
atgaaattgatcaatggaaaaaagcagactttcccctggttcggcatggacattggcggaactctcgtgaaactggtgtactttgagccgaaagacatcaccgctgaggaggagcaagaggaagtggagaacctcaagtctataagaaaatacctgacttctaatactgcttatgggaagactggcattcgcgatgtgcacctggaactcaaaaacttaacgatgtgcggtcgcaagggcaacttacacttcatccgattcccctcttgcgccatgcacaggtttatacagatgggatccgagaagaatttttctagcctccacaccactttgtgcgctacagggggtggagcttttaaatttgaagaggattttaggatgattgccgaccttcaactgcataaactggacgagttggattgcttgatccagggactgctgtatgtcgattccgtgggattcaatggtaaaccggagtgttattactttgaaaaccccaccaaccccgaactgtgtcaaaagaaaccttattgcctggacaacccctacccgatgctgcttgtcaacatgggatcgggtgtgagtatcctggccgtgtattctaaagacaactacaagagagtcactggcacaagcctggggggtgggacgtttctgggtctgtgctgtctcctgacgggatgcgagaccttcgaggaagcactagagatggcagcaaaaggagacagcacaaacgtcgacaagttagttaaggatatctacggcggtgactacgagcgctttggcctgcaggggagcgctgtcgcttcatcctttggtaatatgatgtctaaagaaaaacgggattctatttcgaaggaggatttagcaagagccaccttggtgactatcactaacaacattggctctatcgcccgtatgtgcgccctgaatgaaaatatagaccgggtggtattcgtcggtaattttctgcgaattaacatggtgtctatgaagcttctagcatatgccatggacttttggtccaagggacagctcaaagctctctttttagaacacgagggttactttggagcggttggcgcactgttagagcttttcaagatgacagatgacaagtag

SEQ ID NO: 234038 - DNA, 1203 bp, synthetic construct
  misc_feature 1..1203: note = Description of Artificial Sequence: Synthetic coding sequence
  source 1..1203: mol_type = other DNA
atggcaaagtccaagcacgcattattgccattttgccacgggatgatgcagcaggaggggttacaccaaatgcagagcctggacctcggactgctgtccctgcagaacagcttcccttggttcggcatggatatcggagggactctggttaaactggtctacttcgagcccaaagatatcactgctgaggaggaacaggaagaggtggaaaatttaaagagtataaggaaatacctgaccagtaacacagcatatggcaagaccggcatcagagatgttcatctggagctcaagaaccttacaatgtgtgggcgaaagggtaaccttcactttatccgcttccctagttgcgccatgcacagattcatacaaatgggcagtgagaagaactttagctctctccacacaacactatgcgctacagggggaggtgctttcaagttcgaagaggactttaggatgatagccgacctgcagcttcacaagctggacgagctggactgccttatccaaggtctgctgtatgtggattccgtaggattcaatggcaaacccgagtgttattactttgaaaacccaacaaacccagaactttgtcaaaagaaaccctactgccttgataacccttatccgatgctcctggtcaatatgggctcaggggttagcatcctcgctgtttactctaaggataattacaagagggtgactgggacatctctggggggtggtacattcttagggctgtgctgcttgctcaccgggtgcgaaacttttgaggaagccttagaaatggctgccaaaggcgacagtaccaacgtggacaagttggtaaaagatatatacggaggggattacgaacgttttggcctgcaaggaagcgcggtcgcctccagcttcggtaacatgatgtcgaaagaaaagagagacagcatctccaaggaagacctagcccgtgcaaccctggtgactattacgaacaatataggatccatcgcaaggatgtgtgccttaaatgagaatatcgatcgcgtggtgtttgtaggcaatttcctgagaatcaatatggtctccatgaagctgcttgcttacgcaatggatttctggagcaaaggacagctgaaggccctgtttctcgagcatgagggttatttcggcgctgtaggggcattgcttgagttattcaaaatgaccgacgacaagtag

SEQ ID NO: 234039 - DNA, 1386 bp, synthetic construct
  misc_feature 1..1386: note = Description of Artificial Sequence: Synthetic coding sequence
  source 1..1386: mol_type = other DNA
atgggcgacaggtctggccagcaagagaggagcgtgccccacagcccaggtgcacccgtcggcacctcagcagccgcagtcaacgggctgctccacaatggttttcacccaccacctgttcagcctccccacgtgtgttctaggggacccgtcgggggaagcgatgcggctccgcagaggctgcccctgcttcccgagttacagccacaacctctcttgccccagcacgattctcccgctaaaaaatgtagactgagacgcaggatggactcggggagaaagaacaggccaccatttccatggttcggcatggatatagggggtacgctggtgaaattagtctattttgagcccaaggacatcactgccgaggaggagcaagaagaagtcgaaaatctcaagagcatccgtaagtacctcacaagcaatacagcctacggcaaaaccggaatccgcgacgtccacctggaactgaaaaacctcacaatgtgcggccgtaaggggaacttgcattttatccgtttcccaagttgcgcaatgcaccgattcatccagatgggatcagaaaaaaacttctcctcattacacaccaccctgtgcgccacaggcggaggtgcattcaaattcgaagaagacttccgaatgatcgcagacctccaactgcataagttggacgagctcgattgtctgatccagggactcctttacgtggactccgttggtttcaatggtaaaccagagtgctattacttcgagaatcccactaacccagagctgtgtcagaaaaaaccttactgcctggataacccgtaccctatgctgctggtgaacatggggtctggtgtcagcatcctggccgtgtattcgaaagacaactataaacgcgttacggggactagtttaggtggaggcacctttctcggcctgtgctgtctgctcacgggatgcgagacctttgaagaagcactggagatggccgcaaagggagactccaccaacgttgataagctcgtgaaggacatctatggcggtgattatgagcgatttgggcttcagggctccgcggtggctagcagtttcggcaatatgatgtccaaggagaaaagggactcaatcagcaaggaggatttggcaagggcgacgctggtgacgattactaataatatcgggagtatcgcacggatgtgtgccctgaacgaaaacattgacagagtggtgtttgtcggtaactttctgaggatcaatatggtgtccatgaagctgctggcatatgccatggacttctggtctaagggccagttaaaagctctgtttttggagcatgaagggtatttcggcgcagttggggcattattggaactgttcaaaatgactgatgacaaatag

SEQ ID NO: 234040 - DNA, 1713 bp, synthetic construct
  misc_feature 1..1713: note = Description of Artificial Sequence: Synthetic coding sequence
  source 1..1713: mol_type = other DNA
atgagacggctaggtccattccatccccgagtgcactgggcagcacctccttcactgagctccgggctgcatagactcctgttcctgcgagggactcggatccctagttccactaccctttctcctccgcgacacgatagcctctccctggacggaggaaccgttaacccccctcgcgtacgggagcccactgggagagaagcgtttgggccaagccccgctagttccgactggcttccagcacgctggaggaatggtcgtggcggtcgcccacgagccagattatgctccgggtggacagccgctgaggaggccagacgtaatccgacactcgggggattacttgggaggcagagactgctgctgcggatgggtggcggtaggcttggcgcacctatggaacgacatggcagagcatcagctacttctgtttcatctgctggtgaacaggctgctggggaccccgaggggcgacgtcaagagcccctgcgtcgaagggcctctagcgcttctgttccagcggttggagcttcagctgaggggacccgcagagaccgtctgggaagttatagtggacctaccagcgtgagtcgccagcgggtcgagagcctccggaaaaagcgacccctctttccctggtttggactcgatatcggtggtactcttgttaaattggtatattttgaaccaaaagatatcactgcggaagaagaagaggaggaggtggaatctcttaaatccattcggaagtacctcactagcaatgtagcttatggatccaccgggatccgtgatgtgcacctcgaacttaaagatcttactctttgcggaaggaagggaaacctacacttcattaggttccccacccatgacatgcccgcattcattcaaatggggagagacaaaaatttcagctctttgcacaccgttttctgcgcaaccggcggaggcgcttacaaatttgagcaagactttctgaccataggcgacctgcagttgtgcaagctagacgagctcgattgtttaatcaaaggcatactgtacatcgactctgtggggtttaatggtcgaagccagtgctactatttcgagaatcctgcagactctgaaaagtgccagaagttaccgtttgacctcaagaacccataccctttactcctagtgaacatcgggtcaggggtgtccattctggccgtttactctaaggacaattataaacgggttaccggcacctccttaggaggcggaaccttttttggcctgtgctgcctgctgaccggatgcacaaccttcgaagaggcactggagatggcaagcaggggagactctacaaaagtcgataagctcgtcagagatatctacggcggtgattatgagaggtttggccttccaggatgggcagtggcttctagtttcggcaatatgatgagcaaagaaaagagagaggccgtgtccaaggaggacctggccagagccaccttaataacaattacaaacaacattgggtccatcgccagaatgtgtgccttaaatgagaacatcaaccaggttgtgtttgtcggaaattttcttaggattaacaccatcgccatgagactcctggcatacgctttggattactggtccaaggggcagctgaaggctctgttctctgaacacgaagggtattttggcgctgtaggagctctgctcgagctgctcaaaatcccttag

SEQ ID NO: 234041 - DNA, 1161 bp, synthetic construct
  misc_feature 1..1161: note = Description of Artificial Sequence: Synthetic coding sequence
  source 1..1161: mol_type = other DNA
tccggccgtgttaatccggctggagggcttggatgttccgagtcaggaacatttggaggaccacccgcacccatcgtgtttccgtggttcgggctcgatataggcggaacgttagtcaaactcgtctatttcgaacctaaagatatcactgctgaggaagaggaagaggaagtcgagtcacttaaaagtattcggaaatatctgacatctaacgtagcatatggatctaccggtatcagggacgtgcacttggaactgaaagatctgacattgtgcggcaggaagggtaatctgcacttcattcgcttccctacccatgatatgccagccttcatccagatggggagagataagaatttcagctcacttcacacagtgttttgcgccactgggggaggagcctacaagtttgagcaggattttctcacaatcggggatctgcagctgtgcaaactagatgaactcgattgcctcattaagggcattctctacatagattctgtgggctttaacggaaggtcccagtgttattatttcgagaaccccgcagactccgagaagtgtcaaaaactgccttttgaccttaaaaacccttacccactgctgttggtgaacattggcagtggtgtatccatcctagctgtctacagtaaggacaactataagcgcgttactggaacctcactgggaggcggaaccttttttggactgtgctgtctgctcactgggtgcactacatttgaggaagcccttgagatggcctcccgaggggacagtaccaaagtagacaagctcgtcagggatatttatggcggagactacgagaggttcggtttgccaggttgggctgtggctagctcttttggaaatatgatgtctaaggagaagagggaggcagtgtccaaagaggacctagctcgggcaacgcttatcacgattactaataatatcgggagcatagcccgtatgtgcgctttgaatgaaaacatcaatcaagtcgttttcgtgggaaattttctgagaattaatacgatcgccatgcgactgttggcttacgctctggactactggtccaaggggcagcttaaggcgcttttcagtgagcacgaaggatatttcggcgctgtgggggcattgctggagttacttaaaataccctag

SEQ ID NO: 234042 - DNA, 840 bp, synthetic construct
  misc_feature 1..840: note = Description of Artificial Sequence: Synthetic coding sequence
  source 1..840: mol_type = other DNA
atgcccgcattcatacagatgggcagagataagaacttctcatctctgcatacagtgttctgtgctactggcggtggggcatataaatttgaacaggatttcctgactataggtgacctccagctgtgcaaactggatgaattggactgtctgatcaagggaattctgtatattgactctgtggggtttaatggtaggtcgcagtgctattattttgagaatccggctgattcggagaaatgccagaaactccccttcgatttgaagaatccctacccactgctgttggttaacatcgggtcaggtgtgagcatcctggccgtgtattccaaagacaactataagcgtgtcaccggcacctccctggggggtggcacatttttcggtctgtgttgcctgctcaccggctgcactactttcgaagaggcccttgaaatggcatctcgtggggacagtaccaaagtggataagttagtacgtgatatctacgggggagactatgaacgctttgggcttcctggctgggccgtggcatcctcgtttggcaacatgatgtccaaggagaagagagaggctgtgtctaaagaagatctcgccagagcaactctgattaccatcaccaataatataggatccatagcacggatgtgcgccttgaatgaaaacatcaatcaggtggtgtttgtgggcaacttcttgaggatcaatacaatcgccatgaggctgctggcgtatgcactcgattactggagcaaggggcagctcaaggcgttattcagtgaacacgagggctatttcggggcagtgggagcacttctggagctgttaaagattccctag

SEQ ID NO: 234043 - DNA, 1113 bp, synthetic construct
  misc_feature 1..1113: note = Description of Artificial Sequence: Synthetic coding sequence
  source 1..1113: mol_type = other DNA
atgaagatcaaagatgccaaaaaaccctcgttcccttggtttggaatggacattggcggaacccttgtcaagttatcttacttcgaacctatcgacatcaccgcggaggaggaacaggaggaggtcgagagtttaaagtcaatccggaagtatttaacttcgaacgtcgcttacgggagtaccggtattagagacgttcacctcgaactgaaagacctgacactcttcggacgcagaggcaacttgcactttatccgtttccccacccaggacctacctaccttcattcagatgggacgggataaaaatttcagtacccttcagaccgtcctctgtgccactgggggaggagcttacaagttcgagaaggacttcaggacaatcggtaacttgcatctccacaaacttgatgagctggattgcctagtcaagggcttgctctacatagattcagtttccttcaatggccaagcagagtgttactatttcgcaaacgcctccgaacccgagagatgtcagaaaatgcccttcaacctcgacgacccgtaccctttactggtagtgaacatcgggtctggagtttccatcctcgcagtgcattccaaagacaactataaaagagtcactggcactagtctaggcggaggcacttttcttggtctctgctctttgctgaccgggtgtgagagtttcgaggaagccttggaaatggcttcgaagggagattcgactcaggctgataaactggttcgggacatatatgggggagattacgagcgatttggactgcccggatgggcagttgccagttcttttggcaatatgatctacaaggagaagagagaatccgtgtcaaaggaagacctcgcaagagccacgcttgtgacaattactaacaacattggctctgtggccagaatgtgtgctgtgaacgagaaaattaatagagtcgtcttcgtcgggaacttccttcgagttaatacattgagtatgaaactgctggcctacgctctggattattggtctaagggacagctgaaggccctgttcttggaacacgaggggtattttggagccgtgggagcactgctgggtctccctaacttctcatag

SEQ ID NO: 234044 - DNA, 2322 bp, synthetic construct
  misc_feature 1..2322: note = Description of Artificial Sequence: Synthetic coding sequence
  source 1..2322: mol_type = other DNA
atggccgagtgtggagcctctggctctgggagctccggcgactctctcgacaagagtattactctccctcctgacgagatctttcgcaacctcgagaacgctaaacggtttgccatcgatatcggaggctcactgacaaagcttgcatactactccacagtgcaacataaggtggccaaggtgcgcagcttcgaccattcaggtaaagatacagaaagagagcatgagccgccatacgagattagcgttcaggaggagatcacagcgagactgcacttcatcaaattcgagaacacatatattgaagcgtgcctagacttcatcaaagaccacctagttaacaccgagacaaaggtgatccaggctaccggtggtggggcttacaagttcaaggacctgatcgaagaaaaattgaggctgaaggtggataaggaggacgtcatgacctgcctgattaaaggatgcaatttcgtgctcaagaacattccccacgaagcctttgtgtaccaaaaggacagtgatcccgaatttcggtttcagactaatcatcctcacatttttccgtaccttctcgttaacatcggatccggggtgtcaatcgtcaaggttgaaacagaggaccgattcgaatgggtaggaggaagtagcatagggggaggcaccttctggggcctgggtgcgctgcttacaaagaccaagaaatttgacgaattgttgcacctggcctccagagggcaacatagtaacgtcgacatgctggtgagggacgtatacggcggagcccaccagacactggggctcagtggcaacctgatagctagttcatttggtaaaagcgctaccgcagaccaggagttttccaaggaagacatggcgaaaagtctgctgcacatgatcagtaatgacattggacagctagcctgcttacacgctaggcttcacagtcttgaccgcgtctattttggtggcttctttattagaggtcatcctgtgaccatgcgcacaattacatactctattaatttcttcagtaagggggaggtgcaggcattgttcctccgtcacgaaggatacctcggcgcaatcggagccttccttaagggagcggagcaggacaaccccaaccagtacagctggggggaaaattatgccggttctagtggtcttatgagcgccagcccggaacttgggccagcccagcgtgcacgctccggcactttcgatctgctggagatggatcgtctcgaaaggcccctggtagacttgcccctgcttctggatcctccttcgtacgttcctgacacagtggacttgactgacgatgccctggcacggaaatattggctcacatgttttgaagaggccttggacggcgtcgttaagcgtgcagtcgcgagccaacctgactctgtggatgccgcagaacgggctgagaagtttaggcaaaaatattggaataagctacagacgcttagacaacagccatttgcttacggaactctgactgtccggagcctcctcgacacaagggagcactgcctgaacgagttcaacttcccggatccgtatagtaaggtcaagcagagggagaacggtgtggcattacgctgctttccaggcgtcgtgcggtccttagacgctctgggatgggaagagcgccagttagcactcgtgaaagggctgctcgcgggtaatgtgttcgattggggcgctaaagcagtgtccgccgtcttggagtctgacccttactttggtttcgaggaagccaaaaggaagctgcaggaacgcccatggctcgtggacagctattctgagtggctccagcggctcaagggcccacctcacaagtgcgccctgatcttcgctgacaatagtggaatcgatattatattaggagtgtttccatttgttagagaacttctgttacgcggtaccgaggtgatcctggcgtgcaactctgggccagctttgaatgatgtgacccacagcgagtccctcatagtcgccgagcgtatcgcgggaatggacccagttgtgcacagtgccctccaggaggaacgacttctgctagtccagactggctcctcctctccgtgtctcgatctgtctcgcctggacaaaggtctggcggctctagtgcgtgagcgaggcgctgacctggtggtgattgaaggcatgggcagggccgtacacacaaattatcacgccgcactacgctgcgagtcactcaagctcgccgtcattaagaacgcttggctggccgagcggttgggtggccgactcttttctgtaatattcaaatacgaggtccctgccgaatag

SEQ ID NO: 234045 - DNA, 1455 bp, synthetic construct
  misc_feature 1..1455: note = Description of Artificial Sequence: Synthetic coding sequence
  source 1..1455: mol_type = other DNA
atgtttccaaatagtatcttagggagacctccgttcactcccaaccatcagcagcataacaacttctttacccttagcccaaccgtctattcgcatcaacagctgattgacgctcaattcaacttccagaacgccgacttgagccgtgccgtatccttgcaacagttgacttatgggaatgtgtccccgatacagacaagtgcctccccgctgtttaggggtagaaagcggctatcagacgagaagaatctacccctggatgggaagcggcagagatttcactctcctcaccaagagcccacagtcgtcaaccagattgtgccactctcgggtgaaagacgctactccatgccccctctcttccacacccattacgtccccgatatagtgcgctgtgtgccccctttccgagagatcgctttcctcgagcctagggagataactctgccagaggctaaagataagctttcccagcagatcttggaactttttgaaacgtgccaacagcaaatatccgatcttaagaaaaaggagctgtgtcggacacagctgcaaagggagattcagctgctgttcccacagagcagactcttccttgttggaagcagtctgaatgggtttgggacacgatcctccgacggcgatctatgcctagtggttaaagaggaaccttgcttttttcaggttaatcagaagacagaggccaggcacatcctgacactcgtgcataaacacttttgtacgcggctctctggatatattgagagaccgcagctcatccgcgctaaggtacccatcgtgaaattccgagacaaggtctcctgcgtggaattcgacctgaacgtgaacaatatcgtcgggattaggaatactttcttgctgcgcacctatgcctacttggaaaacagagtacgccctctcgtcctggtcattaaaaaatgggcttcacatcatcagattaatgatgccagtaggggtaccctatctagctacagtcttgttttaatggtcttgcactatctccaaaccctgcccgaacctatcctgccgtctctgcaaaagatctacccagagagctttagtcctgccatccagctgcatcttgtacaccaggcaccatgtaatgtgccaccttatctctccaaaaacgaaagtaatctgggcgacctgctgctgggtttcctgaagtactatgcaaccgagttcgattggaacagtcagatgatatctgtccgagaggccaaggcgattccccgtccagacgggattgaatggcggaataagtacatatgcgtagaagagcccttcgacgggacaaacaccgcacgagcggtccacgagaaacagaagtttgatatgattaaggaccagttcttaaaaagttggcatcgactgaaaaataaaagagatctgaacagcatattgcctgttcgcgcagccgtgctgaagcgctag

SEQ ID NO: 234046 - DNA, 1443 bp, synthetic construct
  misc_feature 1..1443: note = Description of Artificial Sequence: Synthetic coding sequence
  source 1..1443: mol_type = other DNA
atgttccctaatagcatcctgggaagaccacctttcactccaaatcaccagcaacataacaactttttcaccctatcccccaccgtctattcgcaccaacagttaatcgacgctcagtttaattttcagaacgcagatttgagtcgcgctgtatcattacaacagctgacttacggcaatgtttcgcctatccaaacatctgcctcccctctgtttagagggagaaaacgtttgagcgacgagaaaaacctgcccctggacggaaagaggcagcgatttcactccccgcaccaggagccaacggtggtgaaccagatcgtccccctgtccggcgagagaaggtactcaatgcccccactcttccacacacactatgtgccagatattgtccgctgtgtcccccctttcagagaaatcgcattcctggagccacgcgaaataaccctccctgaggctaaagataaactgtcacagcaaattctcgagcttttcgaaacctgccagcaacagatctcagacctcaagaagaaagaactgtgccggactcagctgcaaagagaaatccaacttctgtttccccagagccgtttgttcctcgtcggctcatcccttaacggttttggtacgcgaagctctgatggcgacctgtgcttagtcgtgaaggaggagccagttaatcaaaagaccgaggcgaggcacatcctgacactcgtccacaagcacttttgcactcggttgagcggatacattgaaaggccacaattaattagggcaaaggtgcccattgtgaagtttcgggataaggtgagctgtgtcgagttcgacctgaatgtcaataatattgttgggatacgcaacacctttcttctgaggacctatgcatatcttgaaaaccgggtcagacctctcgtgctggtgatcaaaaaatgggcttctcaccatcagatcaacgatgcctcgaggggaacactgagtagctatagcttagtgctgatggtgctgcactatctccaaacactgcccgaaccaatcctgccaagcctgcagaagatctaccctgaaagtttttctcccgcaatccagctgcatcttgtacatcaggctccatgtaatgttcctccttacctatccaaaaatgagagcaatctgggagatctgctgctgggatttttgaaatactacgctaccgaatttgactggaacagtcagatgatttccgtgcgggaagcaaaagcaatcccgcgacctgatggaattgagtggcggaacaaatatatttgcgtagaggagcccttcgacggcacgaacactgctcgggcagtgcacgaaaaacaaaaattcgacatgattaaagatcagttcctaaaaagctggcatagattgaaaaataaacgtgatctgaactctatcttgccagtgagagccgctgttttgaaaagatag

SEQ ID NO: 234047 - DNA, 1455 bp, synthetic construct
  misc_feature 1..1455: note = Description of Artificial Sequence: Synthetic coding sequence
  source 1..1455: mol_type = other DNA
atgtttcctaattccattttaggaaggccccctttcacacccaaccatcagcagcacaataacttctttacactatcccctacagtgtatagccaccaacagctgattgacgctcaattcaactttcagaacgctgatctctcgcgggcagttagtttgcagcagttgacctatggcaacgtgagccctattcagacttccgctagccctctattccggggtaggaaacggctgagcgacgagaaaaacctgcccctcgacggcaaaagacagcgtttccattcacctcatcaggaacctacggttgtcaatcagatcgtgccccttagcggcgagcgtcgctatagcatgccaccgctgttccatacacactacgttccagacattgtgcgctgtgtgcccccatttagggaaatcgcctttctcgaacccagagaaattactctaccagaagccaaggacaaacttagtcaacaaatactcgaacttttcgagacttgccagcagcagataagtgacctaaagaagaaagagctttgtcggactcagctacaacgggagatccagctactgttcccccagtctaggttatttctggttggatcaagcttgaacggatttgggactagatctagcgatggcgatctttgccttgttgtgaaagaggaaccatgcttttttcaggtcaatcaaaagaccgaagctcgacatatccttacactggtgcacaagcatttttgcactagactatcaggttacattgagcgtccgcaattaattagagccaaagttccaattgtgaagtttagagataaggtaagctgtgttgaattcgacttaaatgtgaataacatcgtgggcatacggaacacctttcttttgcggacgtatgcctaccttgagaacagggtcaggcccctcgtcctcgtcattaaaaaatgggcatcacaccaccagataaatgacgcttctcgcggtacactctcgtcctattccctggtgctcatggtacttcattatcttcaaacactacctgaaccaatcctgcccagtctgcagaaaatctaccctgaatcgttttctcccgcaatccagctgcatttggtgcaccaggccccttgcaacgtgccgccttatctgtcaaaaaacgagtccaacttgggcgatcttttgctcgggttcctgaagtattacgccacggaatttgactggaactcccaaatgatttccgtaagagaagccaaagccattcccaggccggatggcatcgaatggagaaacaagtacatttgtgtggaggaacctttcgacgggaccaatacggcacgagccgttcacgaaaagcagaagttcgatatgattaaggaccagttccttaaatcttggcacagactgaagaacaagagggatctaaactctatccttcccgtacgggctgccgtcctgaaaagatag

SEQ ID NO: 234048 - DNA, 1455 bp, synthetic construct
  misc_feature 1..1455: note = Description of Artificial Sequence: Synthetic coding sequence
  source 1..1455: mol_type = other DNA
atgttccccaactctatattaggcaggcccccattcaccccgaatcaccagcaacataataacttttttaccctgtcccccacagtttactctcaccagcagctgattgatgctcagttcaattttcaaaatgcagacctatcacgcgctgtgagcctgcagcaactgacatatggtaacgtctctccaattcagacttctgcaagtccattattccgtgggaggaagcggttatccgacgagaaaaacctccccctagatgggaagcgccagaggttccattccccgcatcaggagcccacagtggtaaaccaaatcgttcccctaagcggggagagacgctacagcatgccacctctgttccacactcattatgtccccgacatagtgcgctgcgtcccccctttccgtgagattgcattcctcgagccaagggagatcacattgccagaggcgaaggacaagctgagccaacagatccttgaactctttgagacgtgccaacagcagataagtgatctcaagaagaaagagctgtgcagaacacaacttcagagagaaattcagttgttgttcccccagagcaggctatttctggtgggtagcagtctgaacgggtttggaacccgatcctcagacggcgatctttgcctggttgtaaaagaagaaccctgcttctttcaagttaatcaaaaaaccgaagctcggcatattctgactttagtccataagcacttctgcacccggttatccggatacattgagcgccctcagctcattagagccaaagtaccaatcgttaaattccgggataaagtgtcttgcgtggaatttgatcttaatgtgaataacattgttggaattcggaatacatttttgctccgcacatacgcctacctcgagaaccgggtcagaccactggtgttggtcatcaagaaatgggcctcacaccaccagataaatgacgcgagcaggggcaccctgtcttcatactctctggttttgatggtgctgcattacctgcagaccctgcccgagccgatcctccctagcttgcaaaaaatctacccagagagctttagccccgctattcagctccacctggtgcaccaagcaccgtgtaatgttcccccatatctgtcgaaaaatgagtccaatctcggcgacctcctgctcggcttcctgaaatattatgcaaccgagtttgattggaattcccagatgatcagtgtgcgggaggctaaagcgattccacgccctgacggaattgaatggcggaacaaatatatttgcgtcgaagaacctttcgacgggactaacacggcacgagcagtgcacgagaagcagaagtttgacatgattaaagaccaattcctgaaaagctggcaccgcttaaagaataagagagacctgaattcaattctgccggtgcgggcagctgtcttaaaaaggtag

SEQ ID NO: 234049 - DNA, 1476 bp, synthetic construct
  misc_feature 1..1476: note = Description of Artificial Sequence: Synthetic coding sequence
  source 1..1476: mol_type = other DNA
atgagccttgtcgcttacgcttcctcagatgaatcagagcctgatgaggccgaaccagagccggaagaagaggaagcggtcgcacctacgagcggcccagctcttggtgggctgtttgctagtctgcccgctcctaagggtcctgcccttctgccacctcccccacagatgttggccccagccttcccaccgcctttattactgccaccaccaacaggcgacccaaggctgcagcccccaccaccactcccatttggacttggcggatttccccctccgccaggggtgagcccagccgaggccgctggggttggcgaaggactcgggctagggttaccctctccacggggacctgggctgaatctccctcctcccataggaggagcaggcccacccttgggccttccaaaacccaaaaagcgtaaggagcccgttaagatcgcagcgccagaattgcacaaaggcgatagcgattccgaggaagatgaaccaacgaagaaaaagaccattctgcaagggtcgagtgaggggactggcttgagcgcattgctaccacagcccaagaatctgactgtcaaggagacaaacagactgcttttaccccatgcctttagcaggaaacccagcgacgggagtcctgatacaaagccatcaaggctcgcatctaaaactaagacatcctctctggcccctgtggtcggcaccacaaccaccacaccctcgcccagtgccattaaggcagcagcaaagtcggccgcactgcaagtgactaaacagattacgcaagaggaggatgatagcgacgaggaggtggcacccgagaatttcttctctctgcccgagaaagccgaaccccctggtgtagagccgtacccctatcctattcccacagttcccgaggagctccccccaggcacagagcctgagcctgcgttccaggacgacgcagcaaatgctcccctggaatttaagatggctgcagggtcaagtggcgcaccatggatgccaaagcccggtgacgattacagctataaccagttttctacttatggcgacgccaacgccgctggcgcttattaccaagattattattccgggggttattacccagcccaggacccagcacttgtgccaccccaggagatcgcaccagatgcttctttcatcgacgatgaggctttcaagagacttcagggaaagcgtaacaggggaagggaggagatcaacttcgtggagattaaaggtgatgaccagttaagcggcgcacagcagtggatgacgaaaagcctcaccgaggaaaaaaccatgaagtccttctccaagaagaagggggaacagcctaccggacaacaacggaggaagcaccagatcacctacctcatacaccaggcaaaagaaagggaactggagctcaagaatacctggagcgagaacaaactgagccggcgtcagacacaggcaaagtatggcttttag

SEQ ID NO: 234050 - DNA, 1380 bp, synthetic construct
  misc_feature 1..1380: note = Description of Artificial Sequence: Synthetic coding sequence
  source 1..1380: mol_type = other DNA
atgtctttggtcgcctacgccagtagtgatgagagcgaaccagatgaagctgaacccgagcccgaggaggaggaggcggtagccccaacaagtggacctgccttaggagggctgtttgcttctcttcccgcaccaaagggtccagcgctcctgcctccgccaccccagatgctcgcacctgcatttcccccaccccttctgctgcctccacccacaggcgaccccaggctccagccccctccacctctgcctttcggtctggggggttttccaccaccccctggggtctcacccgctgaagctgccggtgtcggtgagggactgggcttggggttacctagtcctcgcggacctgggcttaacctgccaccccctatcggaggggcaggtccccctctgggcctccccaaacctaagaaacggaaagaaccagtcaagattgctgccccagagctgcacaaaggtgattctgacagtgaagaagatgaacccactaaaaagaaaaccatactgcaaggttctagtgaggggacagggctgagcgctttactaccccaacccaaaaacttgactgtcaaagagacaaatcgcttactcctgccacacgcttttagtaggaagcccagcgacggtagtcccgataccaaaccaagtagacttgccagtaaaactaagacttccagcctcgccccagtggtagggacaaccactaccactccttctccttcggccatcaaggccgctgcaaagtcggccgcattacaggtcactaagcaaatcacacaggaggaggatgactctgacgaggaggtggcaccagaaaatttcttctcgctgcccgaaaaggctgaaccccctggggtagagccctacccctatcccattcccacagtcccagaggaattacctcctgggaccgagcccgaacccgcttttcaggatgatgctgctaatgcacctcttgaattcaagatggctgccggttccagcggcgcaccatggatgcccaagcccggagatgactatagttacaatcagttcagcacttacggtgacgccaatgccgctggagcgtactaccagtttaagcggctgcagggcaaacggaacagaggacgcgaagagattaatttcgtggaaattaagggagacgaccaactgagcggcgctcagcagtggatgaccaaatcactgacagaggaaaaaacaatgaaatctttttcgaagaagaaaggggagcagccaaccggccaacagcggaggaagcatcaaatcacatacctcatacaccaggccaaagagagggagctcgaactaaagaacacatggagcgaaaataagttaagtcggcgacagacgcaggccaagtacgggttctag

SEQ ID NO: 234051 - DNA, 1404 bp, synthetic construct
  misc_feature 1..1404: note = Description of Artificial Sequence: Synthetic coding sequence
  source 1..1404: mol_type = other DNA
atgcttgcccctgcttttcctcccccattgctcctcccaccaccaacaggggatccacggctgcagcctcctcctccactcccgttcggcctggggggtttcccgcctcctccaggtgtctctccagcagaagcagccggagtaggagaaggcttaggtttgggcctgccttcacccaggggacctggacttaatcttccgcctccaatcggcggagctggcccacctctcggccttcctaagcctaaaaagagaaaggagccggtaaaaattgccgcacccgagctgcataaaggcgatagtgatagcgaagaggacgagccaacaaagaagaaaaccattctccagggatcatcagagggcacgggtctgagcgccctgctccctcaacctaaaaatttaacagtaaaggagaccaatcgcctgctcttgccacatgctttttcgagaaagccatccgatggctcacccgatacaaagccctcccgactcgccagcaagaccaagacaagctctctggcccctgtcgttggaactactactaccactccgtcgcccagcgcgattaaagccgctgccaagtccgctgcactgcaggtaactaagcagattactcaggaggaagacgacagtgatgaagaggttgccccagagaatttctttagcctacccgagaaagcagaacctcccggtgttgagccttatccgtatcctattccaacggtacccgaggaactcccacctggcaccgagcctgagcccgcttttcaggacgacgctgccaacgcacccctagagtttaagatggcagctggctctagcggcgctccatggatgcccaagcctggcgacgattattcctacaaccagtttagtacttatggagatgccaacgccgctggagcatactaccagggactgcagcagcaccttggacacagtccattgcggggtattatgcgcttcttaaacagcaagtctggcaagaggacctgcttcgtccccagctttgactattattccggcggatactacccggcacaagatccggctcttgtgcctccccaggagatcgcgccagatgccagctttattgatgacgaggcctttaagcgcctgcagggaaaaaggaatagaggaagggaggagatcaatttcgtggagattaagggagatgaccagctcagtggcgcacagcagtggatgaccaaatctctcaccgaggagaaaacaatgaagtctttctcaaagaagaagggcgaacagcccaccgggcagcaacgaagaaagcaccaaatcacttatttgatacaccaggcaaaggagcgcgagcttgaactgaagaatacgtggtctgaaaacaagctgtcgaggcggcagacacaggcaaaatatgggttttag

SEQ ID NO: 234052 - DNA, 3096 bp, synthetic construct
  misc_feature 1..3096: note = Description of Artificial Sequence: Synthetic coding sequence
  source 1..3096: mol_type = other DNA
atgaaggtcactgtctgcttcggtaggacacgggttgttgtcccatgtggagacggtcatatgaaggtcttttccctgatacagcaagcagtcactagataccgcaaggcaatagcaaaagacccaaactactggatccaggtgcaccggctagagcacggagatgggggaatccttgatctggacgatatcctgtgtgatgtggccgacgataaagatagactcgtagccgttttcgacgagcaggacccgcatcatgggggagatggcacatctgcttcatccaccggaacccagagccctgagattttcggttccgaactgggcacgaacaacgtctcagcattccagccatatcaggcaactagcgagatagaggttacccctagtgtcttgagggcgaacatgcccctccatgtgcggaggtcatccgaccctgctttgatcggtctaagcactagtgtgagcgactcaaatttctccagcgaggagcctagcagaaaaaatcccactcggtggagcactaccgcaggatttttgaaacagaacactgcaggttccccgaaaacttgtgaccgcaaaaaagatgaaaactatcgaagcctgccacgcgacacgagtaactggtctaatcagttccaaagggacaacgctcggtcctcgctctcggcctcccatccaatggtggggaaatggctggaaaaacaggaacaggacgaggacggcacagaggaagataactccagagtcgagcctgtaggacatgcagacactggactcgaacatatcccgaatttcagcctggacgacatggttaagttagttgaggtcccgaacgacggtggtcccctggggatccatgtggtgccattttccgccaggggcggtaggacgctgggcctgctggtgaagcgcctggaaaagggtggaaaggccgagcacgaaaacctgtttagagagaacgactgtatcgtaagaatcaacgacggtgatctgcgcaaccgtcgctttgagcaggcacaacatatgttcagacaggccatgcgaaccccaatcatctggttccacgtcgtgccggctgcaaacaaagaacagtatgaacagctgtctcaatcggagaagaataactactactcctctagattttcgccagacagtcagtatattgacaatagatcagtcaacagcgctgggttgcatacagttcagcgcgctccaaggctcaatcatccacctgaacaaattgattcccacagcagactgcctcactctgcacatccctccgggaaaccccctagcgctccggcttccgcaccccagaatgtgtttagcaccaccgtatcaagtgggtacaataccaaaaaaataggaaaaaggctgaatatccagctcaaaaaaggtactgaaggactcgggtttagcataacaagtcgtgatgtcaccatcggcggaagcgcgccaatatatgtaaaaaacatacttcctaggggtgccgctattcaggatgggaggcttaaagcaggggacaggctcattgaggttaacggggtcgacctggtggggaagtcgcaggaggaggtggtgtccctcctgcgcagcaccaagatggaaggtaccgtctcgttgctcgttttccggcaagaagacgccttccatcccagagaacttaacgccgaaccatctcagatgcaaattcctaaggagaccaaagcagaagacgaggatatagtgttgacacccgatgggacaagggagttcctgacctttgaggtgccgctgaacgactcgggctcagccggattgggtgtcagcgtcaaaggcaataggagcaaagaaaaccatgctgacctgggtatatttgtgaagtctatcatcaatggtggagctgcaagcaaagacggccgactcagagtcaatgaccagctcatcgccgtgaacggcgaatctctgctcggcaaaaccaaccaggacgctatggagactttaagacggtccatgtctactgaaggaaataagcgtggcatgatacagttaatcgttgcaaggcgaataagtaaatgcaatgagcttaagtcccctggatccccgccaggcccagagctccccatcgaaaccgctctggatgaccgcgagcgcagaatcagtcactcgctgtactcggggatcgagggtctggatgagtcacctagcaggaatgccgcactgagccgcatcatggggaaataccagctgagccctacagtaaatatgccccaagatgacacagtgataattgaggacgacaggttgccagtactgccgccacatctgtcagaccagtcctctagcagctcccacgatgatgtaggtttcgtgactgccgatgcaggaacttgggccaaagcggctatcagcgattccgctgattgtagtctttcacctgatgtcgatcctgtgctggctttccagcgcgagggctttggcagacagagcatgtctgaaaagcgaacaaaacagtttagtgacgcgagccagttagactttgtgaagactaggaagtctaagagcatggatctgggaatcgccgacgaaacaaagctgaacaccgtcgatgatcaaaaggcgggttctcccagtagagatgtggggccatccctgggtttgaaaaagtctagctccctggaaagccttcagacagccgtcgcagaagtgacacttaacggtgatatccctttccataggcccagaccacgaatcatacgcggaagagggtgtaacgaaagcttccgagcggctattgataaaagctacgataagcccgcagtggatgacgacgacgaaggaatggagaccctggaagaggataccgaagaatcatcccgttccggaagagagtccgtttccacggcctcagaccagccctcccattctctcgagcgccagatgaacggaaaccaggagaagggggacaagacggaccggaagaaggacaaaacaggtaaggaaaagaagaaagatagggacaaagagaaagacaaaatgaaggcgaaaaaaggcatgttgaaaggactcggagacatgttctctctggccaagcttaagccagagaaacgatag

SEQ ID NO: 234053 - DNA, 3960 bp, synthetic construct
  misc_feature 1..3960: note = Description of Artificial Sequence: Synthetic coding sequence
  source 1..3960: mol_type = other DNA
atgaaggtcacagtatgcttcggcagaactagggtggttgtcccgtgtggcgatggacacatgaaagtgttttccctgatccagcaggccgtgactagataccggaaagcaatcgcaaaggatcctaactattggattcaggtgcaccgcctcgagcatggcgacggcggtatcctagacctggatgacatcctgtgcgacgtagcagacgataaggacaggctggtggctgtgttcgatgagcaagaccctcatcatggaggggacggcaccagtgctagcagcaccggaacccagtcccctgagatcttcggctctgagcttggtactaacaacgtctctgccttccagccctatcaggctacaagcgaaatcgaggtgaccccgagtgtccttcgggctaacatgcctcttcacgtccgacggtcctcagaccccgctttaattggcttgtctacttccgtgagtgattccaacttttcatccgaggagcctagtcgtaagaatcctaccagatggtccacaacggcgggtttcttaaaacagaatacagccggaagcccaaagacttgcgacagaaagaaggacgagaactataggtcgctgcctcgagacacctctaattggagcaatcagttccagagagacaacgctcgcagtagcctgagtgcctctcatccgatggtcgggaaatggttggagaagcaggaacaggatgaagacggcactgaagaggacaacagccgggtggaaccagtggggcatgctgatactggactcgagcatataccaaatttttccctcgacgacatggtgaaactggtggaagtaccaaacgatggtggcccactgggcattcacgtcgttccatttagtgccagaggagggaggaccttgggtttgctggtgaagaggctcgagaaagggggtaaggctgagcatgaaaacctgtttagagagaacgactgtatcgtcaggattaatgacggcgacctgagaaataggcggtttgagcaagcccaacacatgttccggcaagccatgcgtacccctattatctggtttcatgtagtccccgctgctaacaaagagcagtacgagcaactttctcagtctgagaagaataattactactccagcagattctcacccgattcacagtacatcgataatcggtctgtcaactccgccggactacacacggtccagcgagcaccacgcctgaatcacccacccgaacagatcgattcccactctaggctcccccatagcgcccacccatccggtaaacctccctccgcccctgcctctgccccacagaacgtcttctccaccacagtgtcttctgggtacaatacgaagaagatcggcaagcgtctaaacattcaactgaagaaaggcacagaagggctggggttttccataacctcccgcgacgtcacgatcggcggatcagcccctatctatgtaaaaaatattctaccaaggggtgctgcaatccaggatggtcgccttaaagcaggggacaggttaattgaggtcaatggagtggacctcgtgggaaaaagtcaagaggaagtggtatctcttctgcgatcaactaagatggaaggtacagtctccttgttagtgtttcgccaagaagatgcctttcaccccagggaactcaacgctgagccctcccagatgcagatcccgaaagaaacaaaggcagaggatgaagatatagtgttgactcccgacggcacgcgggagtttctgaccttcgaggtgccactgaacgattccggctcggctgggctcggtgttagtgttaaaggtaacagatcaaaagagaatcacgccgatttaggcatttttgtcaaatctattatcaatggcggagctgccagtaaggacgggaggctgcgcgtgaacgatcagttgatcgcggtgaatggcgagtcactgctcggaaaaaccaatcaggatgccatggaaacacttcgaagaagcatgtcaactgaaggaaacaagaggggtatgattcaactgatagtggcaaggcgaatcagtaagtgtaacgagctcaaaagtcccggttcgcccccagggcctgaactgcccatcgagaccgccctggatgatcgcgagaggcgaatatctcacagcctgtactcaggaatcgagggcctggacgaatcccctagcaggaacgctgctctcagtcgcattatgggcgaatctggaaaataccagcttagccctactgtgaatatgccacaggacgacaccgtgatcatcgaagacgatcgactgccagtgctgcctccacacctctccgaccagtcatcaagcagctcccatgacgatgtcgggttcgtgaccgcggacgccggtacgtgggctaaggccgctatatccgactcggctgattgctcccttagtcccgacgtagatccggtgctggctttccagcgcgaaggcttcgggagacagtcgatgtcagaaaagaggactaaacagttctccgacgcctcccagctcgacttcgtcaagaccaggaaatcgaaatccatggacttaggcatcgcagatgagaccaagcttaataccgtggacgaccaaaaggccggttctccgtccagggacgtgggaccaagtcttggacttaagaaatccagtagcctggaatccctacagactgccgttgcagaagtcacccttaacggagacatacctttccatcgacctcgcccacgcattatcagagggaggggatgcaacgagtcttttcgggcagctattgacaagtcctacgacaaacccgcagtggatgatgacgacgaaggcatggaaacactggaagaggacacggaagagtcttctcgcagcggcagggagtcagtttccacagcctctgaccagccatcacacagcctcgaaagacagatgaacggaaatcaggaaaaaggtgataagaccgataggaagaaagataagaccgggaaggagaaaaagaaggaccgggataaggaaaaggacaaaatgaaggccaagaagggaatgctgaagggtctgggagacatgtttcgcatccaggctaagactcgagagttcagggaaagacaagcgcgtgaaagagactacgccgagatccaggattttcatagaactttcggctgcgatgacgaactcatgtacggtggagttagctcttatgagggatctatggcccttaatgccagaccccagtcccccagagaagggcacatgatggacgctctatatgcacaggtgaagaaaccaagaaacagcaagccttcacccgtggactcgaaccgctctacaccttcgaaccacgatcgcatccagcggttgcgccaggagtttcagcaggccaagcaggacgaagatgtcgaggaccggagacggacatactcattcgaacagccttggccaaatgctcgccctgctacacagtccggcagacatagcgtctcagtcgaagtccagatgcagcgccaacggcaggaagagcgggaatcatctcagcaggcccagcgccagtatagctctctgcccaggcaatctcgaaagaatgcatcaagcgtgagccaggactcttgggagcagaattactcaccgggagaagggttccagtctgcgaaggagaatcctcggtacagtagttatcaggggtccagaaatgggtacctggggggacacggattcaatgcaagggtgatgcttgagacacaggagctgctcaggcaggagcagagaagaaaggagcagcaaatgaagaagcaaccaccctctgaagggccttcgaactatgactcgtacaagaaagtgcaggacccgagctacgctccgccaaaaggcccttttcgccaagatgtccctccaagtcccagccaagtggctagattgaaccgactgcagactcccgaaaagggccgaccattctactcctag

SEQ ID NO: 234054 - DNA, 3933 bp, synthetic construct
  misc_feature 1..3933: note = Description of Artificial Sequence: Synthetic coding sequence
  source 1..3933: mol_type = other DNA
atgaaggtgacagtgtgtttcgggagaacgcgagtggtggtgccatgcggggatgggcacatgaaggtcttttctcttattcaacaggctgtgactcgttacaggaaagcaatcgctaaggacccgaattattggatccaggtgcatcggctggagcatggagatggaggtattctcgatctagacgatattctgtgtgatgtcgccgatgacaaggatcggctggtcgccgtgttcgatgagcaggaccctcatcacggcggtgatggaacaagtgcgtcctccacagggacccagtcacctgaaatttttggctccgagctcggcacgaacaatgtctccgcttttcagccttatcaggccacatccgagattgaagtgacaccttctgtgctgcgagcaaatatgcctctccatgtgcggcgatccagcgatcctgctcttatcggcctcagtactagcgtgtccgattccaatttttctagcgaggaacctagcagaaagaatcctaccaggtggtcgactacggcgggattcctgaagcagaataccgccggttccccaaagacctgtgatcgaaaaaaggatgaaaactatcggtcgctgcctcgagacacttctaattggtctaaccagtttcaacgcgataatgctcgctctagtttaagtgccagccaccccatggtgggcaaatggctggaaaaacaggaacaggatgaagatggtactgaagaggacaattcacgagttgaacccgttggtcatgcagataccggattggagcatattccaaactttagcctagacgacatggtaaaactcgtggaagtccctaacgacgggggtcctctgggtattcatgtggtccctttttccgccagggggggtcggactcttggcctactggtcaagaggttagagaaagggggaaaagcagaacacgagaatctgttcagggaaaacgattgcatcgtgcgaatcaacgacggagacctccgtaacaggagattcgagcaggcccaacacatgtttcgtcaggctatgcgcaccccaataatatggtttcacgtggtgcccgcagctaataaggaacagtacgagcaactgtctcaatcagagaagaacaattactacagctcccgattcagccctgattcccaatacattgataaccggagtgtcaatagtgctggccttcacactgtgcagagagccccacggttgaaccacccaccagagcagatagactctcacagccggttgccacactccgctcacccgagcggcaagcccccttcggccccagcttccgcccctcaaaacgtgttcagcaccacagttagtagcggttacaacactaaaaaaattggcaaacgcctgaatatccaactgaagaagggtaccgaaggcttgggtttttcaattacctcccgggatgtcaccatcggcggttccgcacctatctatgttaagaacattttaccacgaggcgcagcaatacaggatggccgtcttaaagccggtgatcgcttgattgaggtcaatggagttgatctcgttgggaaaagtcaagaagaggtggtgtccttgcttagaagcacaaaaatggaggggaccgtgagcctgctggtcttcagacaggaagacgcatttcaccccagggagcttaaagccgaggacgaggacatcgtcctgacccccgatggcacgagggagtttctgacctttgaggttcccctcaacgactctggatcagctggccttggagtctcggtcaagggcaatagatcaaaagaaaaccatgcagatcttggaatctttgtaaagtccataatcaacggaggggcagcaagtaaagatggccgtctccgcgtaaatgaccaactaatcgccgttaacggggaatcattactgggaaagaccaatcaagatgccatggagaccttaagacgcagtatgtcaaccgaagggaataaacggggaatgattcagctaatagttgcaagacgcatctccaagtgcaacgaattaaagtctccaggcagtccgccaggccctgagctcccaattgagaccgccctcgatgaccgggaaaggcggatcagtcattctttatacagcggtatcgagggcttggatgagtcaccctccaggaacgcggcactgtcccggattatgggtaagtaccagctgtctccgacggtgaacatgccccaagacgataccgtaattattgaagatgacaggctgcccgtgttacccccacacctgagcgaccagtcaagctcttctagccatgacgacgtcggtttcgtcactgcggatgctgggacctgggccaaggcagcgatttcagatagtgcggactgttcattgagtcctgacgtcgaccccgtactggccttccagcgagaggggtttggcagacagatcgctgacgagactaagctcaacaccgtagacgaccagaaggcaggatcaccatctagggacgtgggcccttctcttgggctaaaaaaaagctcgagtctcgagagcttgcaaaccgccgtcgcagaagtgactctgaacggggatatccctttccatcgcccaagaccaaggataatacgcggacggggttgcaacgagagcttcagggcagccatagacaaatcttatgataagcccgcagtggacgacgacgatgaaggaatggaaacactcgaggaggacaccgaagaatccagtaggtccggcagggagagtgtgtctaccgcgtcagatcagccttctcactccttagaacggcaaatgaatgggaaccaggagaagggagacaagacggaccggaagaaggacaagacggggaaggaaaagaagaaggatcgggacaaagaaaaagacaagatgaaggccaagaaggggatgttgaaggggctaggggatatgtttaggtttggtaaacaccgcaaagatgataagatcgaaaaaacaggtaaaattaaaattcaagaatcattcactagtgaggaggagcggatacggatgaagcaggagcaggagcggatccaggcaaaaactcgcgagttccgcgaacgccaagcacgggagcgggattacgcagaaatccaggactttcatcgtacattcggatgtgacgatgagctcatgtatggcggtgtgtcaagctacgaggggagtatggccctgaacgctaggccacagtcacctcgggagggacatatgatggacgccctgtacgcacaggttaagaagccacgtaacagcaagccgagtccagtcgactcaaatcggagtacccccagcaaccacgaccgaatacagcgactgagacaggagtttcagcaagctaagcaggatgaagacgtggaagaccggcgtaggacatatagctttgagcagccctggcctaatgccaggcctgccacgcagtccggacgccattcagtatcagtggaggtgcagatgcagcgccaaagacaggaagagcgcgaatcgagccagcaagcccagaggcagtattcctctttgccacgtcagtcccggaagaatgcatcttctgtgagccaggattcctgggagcaaaactacagccctggcgaaggcttccaatcagcaaaggagaaccccaggtatagcagttatcagggctctcgcaacgggtatctgggtggccatgggtttaatgcccgagtgatgctggaaacacaggaactcttgcgccaggaacagaggcgaaaagagcagcaaatgaaaaagcaacccccaagtgagggaccttccaactacgacagctacaaaaaggtgcaggacccctcttacgctcctcccaagggtccctttcgccaagatgtgcctccaagccccagtcaggtggcccgactgaataggttacaaactcccgaaaagggccgtccattctactcgtag

SEQ ID NO: 234055 - DNA, 540 bp, synthetic construct
  misc_feature 1..540: note = Description of Artificial Sequence: Synthetic coding sequence
  source 1..540: mol_type = other DNA
atgcagatacctaaagaaaccaaagcagaggacgaggatatagtgctcacccccgacgggaccagagagtttctgacattcgaggtccctctgaatgacagtggcagtgccggtctcggggtgtcggtgaaggggaacagatcaaaggaaaaccacgcagacctcggtatctttgtcaagagcataattaatggcggagcagcgagtaaagacggccgtctgagggtcaacgaccagctgattgctgtcaacggagagtcactgctcgggaagactaaccaggacgcgatggagaccttgagacggtcgatgtccacagaaggaaataagcgtgggatgatccagttgattgtagcccgaaggatatccaaatgcaatgaactcaagagcccgggatcccccccaggaccagaactgccgattgaaacagcgctggacgaccgcgaacgcagaatttcacacagtttgtacagcgggatagagggcctcgacgagtctccatcccgaaacgcagcactcagtcgcattatgggaacctag

SEQ ID NO: 234056 - DNA, 3006 bp, synthetic construct
  misc_feature 1..3006: note = Description of Artificial Sequence: Synthetic coding sequence
  source 1..3006: mol_type = other DNA
atgaaagttactgtgtgtttcggaaggacgcgggtggttgtcccttgtggtgatggccacatgaaagtgttctcactgatacagcaggcagtgactcggtaccgaaaggcaatcgctaaagatcctaactattggatccaagtccacagactggaacatggagacgggggtatcttggacctcgatgacatcctctgtgacgtcgctgatgacaaggatcggctcgtggccgtatttgacgagcaggacccacaccatggcggagatggcactagtgcctcctctactggcactcagtcaccggaaattttcggttccgaattaggtaccaataatgtgtccgcattccagccttaccaggctacctcagaaatcgaggtcacacctagcgtgttacgcgctaatatgcccctgcatgtgaggagatcttctgatcctgccctgatcggcctgtctactagcgtgagcgattctaacttctctagcgaagagccatcgcgcaagaatccaacaaggtggtctactaccgctgggtttttgaagcagaacaccgctggttctccaaagacttgtgatagaaaaaaagatgagaactacagaagcctccctagggacacaagtaactggagcaatcagtttcaacgcgataacgcgaggtccagtctgtccgcgtcccaccctatggtgggcaaatggctggaaaagcaggagcaggatgaagacggtactgaagaggataattcgagggtggaaccagtggggcatgcggatacaggccttgagcacatccctaacttttccctggatgatatggtgaagctcgtagaagtcccaaatgatggtggcccattggggatccacgtggtgcctttctccgccagaggagggagaacactgggattgctggttaaacgcctcgagaagggcggaaaggcggagcacgagaacctctttcgcgagaacgactgtatcgtgcgtatcaatgatggagacctgcggaatagaaggtttgaacaggcgcagcatatgttccgacaggcaatgagaactcccattatctggttccacgttgttcctgctgccaacaaagaacagtacgaacagttgtcacaatccgagaaaaacaattactacagctcccggttcagccccgactctcaatacatagacaatagatctgttaactccgcaggcctgcataccgtacagagagcccctcggcttaaccatccacccgagcagattgattctcattccagactcccacacagcgcccacccaagtggtaagcccccttcggccccagcctctgctccccaaaacgtgttctccaccactgtgagttctggctacaatacgaagaagataggaaaaaggctgaacattcaactgaagaaaggcactgaaggactcgggttctccataacatctcgggacgtgaccattggcggttcagccccaatctacgtgaagaacatcttgccacggggagcagctatccaggacggaaggctgaaggccggagaccgcctgattgaggtgaatggcgtggacttggtgggaaaaagtcaggaggaggtggtctccctcctacgctctactaagatggagggcacagtatctctgctggttttccgacaagaagatgccttccaccctagggagcttaacgctgaaccttcacagatgcagattcctaaggaaacaaaggcggaggacgaggacattgtgctcacgccagatggcacacgcgagttcctgactttcgaagtaccactgaacgattccgggtcagcagggctgggtgtcagcgtcaaaggaaaccggtcgaaggaaaaccacgccgaccttggtatctttgtaaagagtattataaacggcggtgctgcctccaaggatggaaggctgcgcgtgaatgatcagttgattgccgtcaacggcgagtcactcttagggaagaccaatcaggatgctatggaaacgctgagacggtcaatgagcactgaggggaataaacggggaatgatccaactgatcgtcgccaggcggattagcaagtgtaatgagctgaagtcccctggaagtccgcctgggccagaactgcccatcgagaccgccttggacgatagagaacgcagaatttcccactcactgtactcagggattgagggcctcgacgagagcccttctagaaatgctgcacttagcagaatcatgggaaagtaccagctgtcccctaccgtgaatatgcctcaggatgacaccgtgattatcgaggatgatcgtttgcccgtcctgcctcctcacctgtctgatcaaagttcaagttcatcccacgacgacgtgggattcgtcactgccgatgcgggaacatgggctaaggcagccatcagcgactcggcagattgctctctctcccctgacgtagaccctgtgctggccttccaacgagaaggctttggccgtcagatcgccgatgagacaaagctgaatactgtcgacgaccagaaggcgggttctcctagcagggatgttggccctagcctgggactgaaaaagtcatcatccctggagtctctgcagactgcggtcgctgaggtaactctgaatggcgatattccctttcaccgcccaaggcctcgcatcattcggggacgcggttgcaacgagagttttcgggctgccatcgacaagagctacgataaaccagccgtggatgatgacgatgaagggatggaaacactcgaggaggacacagaggagtcttctaggtccgggagggagtccgtgtccacagcctccgatcagcccagccacagcctggagaggcagatgaatggaaaccaagaaaaaggagataaaactgacagaaaaaaggacaagacagggaaagagaagaaaaaggatcgcgacaaggagaaagacaaaatgaaagctaaaaaggggatgctgaaggggctcggggacatgttctctctcgcgaagctaaagcccgaaaaacgctag

SEQ ID NO: 234057 - DNA, 2967 bp, synthetic construct
  misc_feature 1..2967: note = Description of Artificial Sequence: Synthetic coding sequence
  source 1..2967: mol_type = other DNA
atgaaggtgacagtgtgcttcggccgtacacgggtggttgtgccgtgcggcgatggtcacatgaaggtgttcagcctgatccagcaggccgtaacccggtaccgcaaggccatagccaaggatcccaattattggatacaagttcatcgcctggaacacggcgacggcggaattcttgacctggatgatattctatgtgatgtagccgacgacaaagatcggcttgttgcggtctttgacgagcaggatccccaccatggtggggatggaacttcagcgtccagcacaggcacacagagccctgaaattttcggctccgaactcgggactaacaacgtgagtgcgttccagccttaccaggcaacaagcgagatagaagtgacgccaagcgtcctgcgagcaaatatgcctctgcacgtacgacgctcatctgacccagccctcattggtttaagtactagcgtcagcgattctaatttttcttccgaggagccaagtcggaagaatcccacacgatggtctaccaccgctggatttctaaaacagaataccgccggatctccgaagacgtgtgataggaaaaaggacgaaaattaccgtagtcttccaagagatacctcaaattggtctaaccagtttcagagagataatgctcggtcctcgctgtcagcctcacatcccatggttggaaagtggctggaaaaacaagagcaggatgaagacgggacagaagaggacaactcccgtgttgaacctgtaggacacgcagacacagggctcgagcatatccccaacttctctttagacgacatggtcaaattagtggaagtgcctaatgatggaggccctctgggtatccacgtggtcccattcagcgcccgtgggggacgtacactgggcttgttggtgaagagactcgagaaaggagggaaagctgagcacgaaaacctctttcgggaaaacgactgcatcgtgcggattaacgatggagatctgagaaaccgcaggtttgaacaggcccagcacatgtttcgtcaggccatgagaacacctatcatctggtttcatgtggtcccagctgccaacaaggagcagtacgagcaactatctcaaagcgagaagaacaactattactcctcccggtttagcccggactcccaatatattgataacaggagcgtaaatagcgctggtttacataccgtccagcgtgcccctcgcttgaaccaccctcctgaacaaatcgacagtcactctagactgccccacagcgcacaccctagtgggaaacccccttctgcacccgctagcgctccccagaatgtcttctctaccacagtctccagcggatataatactaaaaaaatcggcaaaaggttgaacattcagctgaaaaagggaactgagggtttagggtttagtataacatcccgcgacgtgactattggtggctctgctcctatttatgtgaaaaacattctgccacgcggagcagccattcaggatgggcgactcaaagctggcgataggttaatcgaagttaatggtgttgacttggttggcaagagccaagaagaggtggtttctcttttacgatcaactaaaatggagggaacagtgtccctcctcgtgttcagacaagaggatgcatttcacccgagggagctgaaagccgaggatgaagacatagtcttgactccagacggcacgagagagtttttgacctttgaggttccactgaatgacagcggttctgcaggcctcggagttagtgtgaaggggaatcgatccaaggaaaaccacgcagatctcggcatttttgtgaagagtattattaacggcggagccgcttcgaaagacgggaggttacgggtgaacgatcagttaatagcggtgaatggagaaagtctgctggggaagaccaatcaggatgcaatggagactctgaggcggtctatgagcactgagggcaataaaagaggaatgatccagctgattgtagctcggcgaattagcaaatgtaacgaattgaagtcacctggtagtccacccggaccagaacttccgatcgagaccgcattagatgatcgagagcgcagaattagtcatagtctgtatagtggaatagaagggctcgacgagtctcccagtcgcaatgctgctctaagcagaatcatggggaaataccagctctcccccaccgtgaacatgcctcaggatgatactgtcatcatcgaggacgaccgccttcccgttctgcctcctcatctgagcgaccagagtagctccagcagtcacgatgacgtcggtttcgtgacggccgacgcagggacctgggccaaggctgcaatctccgatagtgcagattgttcactgtctcctgatgtggaccctgtgctggcttttcagcgggaaggcttcgggcgacagatagccgacgagaccaaactcaacactgtggatgaccagaaagctggaagtccctccagagatgtaggaccttccctggggctgaagaagagctccagtctagagagtctccagactgcagttgccgaagttacattaaatggtgacataccatttcaccgaccacgaccacggattatacggggaaggggctgcaacgaaagcttcagggcagctatagataagagctacgataagccggctgtcgatgacgatgacgagggaatggaaaccttggaggaggacactgaggaaagtagtcgcagcgggagagagtcagtgagcacagctagcgaccagccatctcatagtctcgagcgccagatgaatggaaatcaggagaagggggataaaactgaccggaaaaaggacaagaccggaaaggagaagaagaaggatcgagacaaagaaaaggacaagatgaaagccaagaaaggcatgctaaagggactgggcgacatgttctcactggcaaagttgaaacccgaaaagaggtag

SEQ ID NO: 234058 - DNA, 4062 bp, synthetic construct
  misc_feature 1..4062: note = Description of Artificial Sequence: Synthetic coding sequence
  source 1..4062: mol_type = other DNA
atgaaggtgaccgtttgtttcggtcgcactagggttgttgtcccttgcggtgatggccacatgaaggtgtttagcctgattcaacaggcggttacccgttaccgtaaagccatcgccaaggatccaaattattggatccaagtgcacaggctcgaacatggggatgggggaatcctggatctggacgacatcttgtgtgacgtcgcagatgacaaagaccggctggtggccgtgtttgacgaacaggacccccaccatgggggtgacggcacttccgcctctagtacaggcacacaatccccagagatttttggatccgaactgggtacgaataatgtgagtgctttccagccataccaggcaacaagcgagattgaggtgacgccctcggtcctgagggctaatatgccactccacgtaaggcggtcttccgacccagctcttattggtctgagtacaagcgtgtctgatagcaatttcagctccgaggaaccatctaggaagaacccgacaaggtggagtaccactgctgggttcctgaaacagaacaccgccggaagcccgaagacttgtgacaggaaaaaggacgaaaattatagaagcctccctcgcgatacaagcaattggtccaaccaattccagcgcgataacgccaggtcaagcctgtcggcgagccaccccatggttggaaagtggctcgaaaagcaggaacaggatgaagatggaactgaagaagacaattcaagagtggaaccagttggccacgctgatactggcttagagcacatacccaacttttctctagatgacatggtcaagctcgtggaggtgccaaatgatggagggccactggggatccacgtggtgcctttcagtgcccgagggggacgaacattgggtctgcttgtcaagcgccttgagaaggggggtaaagccgaacacgaaaacctgtttcgtgagaatgactgcatcgttagaattaatgacggggacctgaggaataggaggtttgagcaagcccaacacatgtttcgacaagccatgaggactcccataatctggttccacgtggtgccagctgccaataaggagcaatacgagcagctttcccaatccgagaaaaataactactattctagccggttctcccccgatagccagtacatcgataatcgcagtgttaactcggcgggtttgcatacagttcagcgcgctcctcgcctgaatcaccctcccgagcagatcgactcccattcccgactgccacactcagcccacccttctggtaagcctcccagcgctcccgcttcagcgcctcaaaacgtttttagtaccacagtgagttctggatataataccaaaaagattggtaagcgcttgaatattcagctcaagaagggcaccgaaggcttgggttttagtatcacttcccgcgacgtgacaattgggggatctgctcccatttacgtgaagaatattctccctcggggagcagctatccaggatggtagactcaaggccggtgaccggttgatcgaagtgaatggcgtcgatcttgtcggtaagtcccaagaagaagtcgttagccttctgcgcagtacaaagatggaaggcacagtctctctgttagttttccggcaggaggatgcctttcacccaagggagttgaatgccgaaccgagccagatgcagatccccaaggagacgaaggccgaggatgaagacattgtgctcactcccgacggcaccagggaattccttacgttcgaggtccctctcaatgactccggtagcgcaggactgggagtatctgtcaagggaaatcggagtaaggagaatcatgccgatctcggcatcttcgtgaaaagtatcataaatggaggggctgcctccaaagatggaagactgagggttaatgatcagctgatcgctgtcaatggggagtctctcctgggaaaaaccaaccaggacgcaatggaaaccttgagaagatccatgagtaccgaaggcaataaacggggaatgatccagctgatcgtagcaaggagaatctcaaagtgtaatgaacttaaatcccccggaagccctcccggaccagaactccccattgaaacagcgctggacgaccgagaacggcgtattagccattctttgtatagcggaattgagggtctcgatgagagtccatccagaaatgccgcactgtctcgtatcatgggcaaatatcaactgtccccaaccgtgaacatgccgcaggatgacactgtgatcatcgaggacgatcgcttacctgtcctgcccccacacctgagcgatcaatccagtagctccagtcatgatgatgtagggtttgttaccgccgatgcaggaacatgggccaaagcagctatcagcgactccgccgactgctcactgtcaccagacgtcgatccagtgctagccttccagcgtgaaggcttcgggcgtcaatccatgtccgagaaacgcacgaagcagtttagcgatgctagtcagctggactttgtgaaaacccgtaagtcaaagtctatggacctgggaatcgccgacgaaactaaattgaatacagttgatgaccagaaggccggttccccttctagagacgtcggaccatccctgggtctcaagaaatcatcgtccctggaatctttgcaaacagccgttgccgaagtgaccctcaacggggatattccctttcaccgaccgcgacccaggatcatcagagggcgaggatgcaacgaatccttccgggctgcaatcgacaagtcttatgataagccagccgtcgatgacgacgatgagggcatggagactctggaggaggacactgaggaatcctctcgctcgggaagagaatccgtgtcaaccgcctccgatcagcccagccatagccttgagcggcagatgaacggaaaccaggagaagggagataagaccgaccggaagaaagataagaccgggaaagagaagaaaaaagatcgtgacaaggaaaaggacaagatgaaggccaagaagggcatgctgaaaggtctcggggatatgttccgcttcggcaaacaccgcaaagacgacaagattgaaaagacaggaaagatcaagattcaagaaagctttactagtgaggaggaacgtattcggatgaaacaagagcaagagcggattcaggctaagacccgggaatttcgtgaacgccaggccagggagagagactatgccgagattcaggatttccataggacttttggatgcgacgacgaattgatgtatggtggcgtgagctcttacgaggggtcaatggcccttaacgcccgacctcaatcaccgcgtgagggtcacatgatggacgcactctatgctcaggtcaagaagccacggaactccaaacccagtccagtggacagcaatcggtccactccgtctaaccacgaccggattcaaaggcttaggcaagagttccaacaggcgaaacaggacgaagatgtggaggatagacgcaggacctactcttttgagcagccatggccgaacgctagaccggctacccagagcggccgtcattcagtgtctgttgaagtacagatgcagagacagcggcaggaagaaagggaatcatctcagcaggcacagaggcagtacagcagcctcccgaggcaatcacgcaaaaacgcttcctctgtcagccaggactcatgggaacagaactactctccaggggaaggctttcagtccgcgaaagagaaccctcgatactcttcctatcagggatcacggaatggatacctgggtggccacggatttaacgcgagggtcatgctggaaacccaagaactgctgcgacaagagcagcggcgaaaagaacagcagatgaagaagcagcctccctccgagggcccatctaattatgacagctataaaaaggtgcaggatccttcatatgccccacctaaggggccttttaggcaggacgttcccccttctccatcccaggtcgccaggctgaaccgcctacagacccctgaaaagggcaggcccttttattcttag

SEQ ID NO: 234059 - DNA, 4071 bp, synthetic construct
  misc_feature 1..4071: note = Description of Artificial Sequence: Synthetic coding sequence
  source 1..4071: mol_type = other DNA
atgaaggtcactgtgtgctttggccgtacgagggtggtggtgccctgcggcgacggacacatgaaggttttcagtttaatccaacaggctgtgacccgatacaggaaggccatagcgaaagaccccaattactggattcaggtgcaccgattagaacacggagatgggggaattctagacctcgacgacattctgtgcgatgtcgctgacgataaggaccggcttgtggcagtatttgatgagcaggacccccaccatgggggtgacggcactagcgccagtagtacaggcacgcagtccccagagatcttcggcagtgaacttggcacaaacaatgtttccgctttccagccctatcaggctacctctgagatcgaagtgactccaagtgttttgcgagcaaatatgcctctgcacgtcagacggagttctgatccagcccttattgggttgtcaaccagcgtcagcgattccaacttttcctctgaggagccttcaagaaagaaccccactaggtggagtactacagccggttttctgaaacagaataccgctggctcaccgaaaacctgcgacaggaagaaggacgagaattatcggtcccttcccagagacacctcaaattggtccaaccagtttcagagagataacgcccgaagctcactgtctgcttcacatccaatggtgggaaagtggctggagaaacaggaacaggatgaggacggaacagaggaggataacagtcgcgtagaacctgtgggccacgctgacaccgggttagaacacatccccaacttcagtctggacgacatggtgaagctagtggaagtcccaaacgatggcggaccattaggcatccacgtggtacccttcagcgccagagggggaaggactctgggacttttagtgaagcggctagagaagggcggtaaagccgaacatgagaatctcttcagggagaatgactgcattgtccgcatcaacgatggggatctgcgcaaccggcgtttcgaacaggctcagcatatgttcagacaagctatgcgaacgcccatcatctggtttcacgtggtcccggcagccaataaagagcagtatgagcagttgagccagtctgaaaagaacaattattatagcagccgcttcagccccgattcacagtacatcgacaacagatccgtgaactccgctgggctgcacaccgtacagagggccccacggctgaaccatccaccggaacagatagatagccatagtaggctgcctcactccgcccacccaagtgggaaacctccatctgctccggctagtgccccacagaacgttttcagcacgactgtgagctcagggtataacacaaagaagattggtaagcgcctgaatattcagctcaaaaagggcacagagggcctgggcttctccattaccagcagagatgttacgatcggagggtcagctcccatttacgtgaagaacattcttcctcgaggcgctgcgatccaggatgggaggcttaaagccggagacagactaatcgaggtgaatggggtcgacctggtcggtaagtcccaagaagaggtggtgagccttcttcggtcaaccaagatggaaggaacagtttcactcctagtgttccggcaagaagacgctttccaccccagggaactgaatgctgagccatcccagatgcagataccaaaagagaccaaggcagaggacgaggacattgtactgacgcctgacggtaccagagaatttttaaccttcgaggtccctttgaatgactccggctccgcaggactgggggtatccgtgaaagggaaccgttcaaaggaaaaccacgcggacctcggaatctttgtcaaatcaataataaatgggggtgcagcatcaaaggacggaaggttgagagtgaatgatcaattgattgctgtaaatggggaatctctcctggggaagacaaaccaggatgccatggagactctgagacgcagcatgtcaacagaaggtaacaagcgcggtatgattcagctgattgtcgccaggcgcatatccaagtgcaacgagttgaagtctccaggatctccaccaggtcccgagctgccaattgagactgctttagatgaccgtgaaaggcgcatatctcactcgctctattctggaatcgaggggctggatgagtcaccaagcagaaatgctgctctatcccgaattatgggggagagcgggaaatatcagctctcaccaactgttaacatgccgcaggatgataccgtcattatcgaggatgatagactacccgtgctgccccctcacctaagcgaccagtcatcctccagctcccatgacgacgtgggcttcgtgaccgcagacgctggcacatgggccaaggcggcaattagcgattcagccgactgctcactctctccagacgtcgacccagtccttgccttccagagagagggctttggtaggcagtccatgtctgaaaaacgcaccaagcagttcagtgacgcttcacagttagattttgtgaaaacgcggaagtctaaaagcatggacctgggcatagccgacgaaactaagctcaacacagtggacgaccagaaggccggttctccttcgcgcgacgtcggcccatcactcggcctaaagaagtcatcttcactcgagagtttgcagacggctgtcgcagaagttaccctgaatggcgatattccatttcaccgcccacggcctagaataatcagaggcaggggctgcaatgagagtttccgcgctgctatagacaaatcctatgacaaacctgctgtggatgatgatgacgaggggatggagactctcgaagaggacaccgaggagagctcgaggtcggggagagagagcgttagcacggcttccgaccaaccgtcacacagcctggaacgacagatgaacgggaatcaggagaagggagacaagaccgatcgaaagaaagataaaacaggaaaagagaagaagaaagatagggacaaggagaaggataagatgaaagccaaaaagggcatgcttaagggactgggagacatgtttcgatttgggaaacatcgaaaggatgacaagattgaaaagacgggtaaaataaaaatccaagagtccttcacctctgaggaagagagaatcagaatgaaacaggagcaggaaagaatccaggcgaaaacccgggagttcagagagcggcaggccagagaaagagattatgccgagatccaggactttcaccggacctttggctgcgatgatgagctcatgtatggaggcgtttcatcctatgagggctctatggcactgaatgccaggcctcaaagtcctagagaaggacatatgatggacgcactttatgcccaggtgaaaaaacccaggaattccaagcccagccccgtggatagcaatcgttctaccccctccaatcacgaccgtatccaaagattgcgacaggaattccagcaggccaagcaggatgaggacgtggaggaccgcagaagaacatacagctttgaacagccgtggcctaacgctagaccggcaacacagtctgggcgacattcagtatcagtagaggtccaaatgcagagacagaggcaggaagaaagggagtcgagtcagcaagctcagcgccagtactcgagtctgcctagacagtccagaaagaatgcctcttctgtgtcgcaagacagctgggaacaaaattacagccctggcgagggatttcagtctgcaaaagaaaatcccagatattcatcttatcaaggaagtcgcaatggttatctaggaggccacggattcaacgccagggtaatgctcgagacacaagaactgctccgccaggaacagcgaagaaaggagcagcagatgaagaagcagcctccaagtgaagggccttctaattatgatagttacaagaaagtgcaagatccttcctacgcaccacccaagggtccctttcgccaggatgtccctccgagccccagccaggtcgcccgtcttaaccgcttacaaacacccgaaaagggccgacctttttactcttag

SEQ ID NO: 234060 - DNA, 3891 bp, synthetic construct
  misc_feature 1..3891: note = Description of Artificial Sequence: Synthetic coding sequence
  source 1..3891: mol_type = other DNA
atgaaggtgacggtgtgcttcgggaggaccagggtcgttgtgccctgcggtgatggacatatgaaagtattttcattaattcaacaggcagtcacacgatataggaaggctatcgctaaagacccgaactactggattcaggtgcacaggcttgagcatggagatgggggtattcttgatttagacgatatcctgtgcgacgtggctgatgacaaagaccgtttggtagctgtgtttgatgaacaagaccctcatcatggaggcgacggcacttcagctagttctacagggacacagtctcctgagatctttgggtccgagctaggtaccaataacgtgtctgcctttcagccataccaagctacttccgagattgaggtgacacccagcgtgctgagagctaacatgcctctccatgtccggcgatcctccgatccggctcttattggcctgtccacttctgtaagtgatagcaacttttctagcgaggaaccgtctaggaagaaccctacccggtggagcaccaccgccggatttctcaagcagaatacagcgggttcacccaagacttgtgaccgcaaagatgaagacggtactgaggaagataactctcgggtggaacccgtgggccatgccgataccggattggaacacattccgaacttctccctggacgatatggtgaagctcgtggaggtgcctaatgatgggggtcccctcggcattcatgtcgtgcccttctccgctaggggtggccgtaccctgggcctgttggtgaaacgtttggagaaaggcggaaaggctgaacacgagaatctgttccgcgaaaacgattgcatcgtgcggattaacgatggcgacctgcgtaacaggcggtttgaacaagcccaacatatgttccgacaggccatgcgcactccaataatttggtttcacgtggttcctgctgccaacaaggaacaatacgagcagctgtcccagtccgagaagaacaattactattcttcccgattttcccctgatagtcagtatatagacaatcgctccgtgaacagcgctgggctccacaccgtccaaagagcccctcgcctgaatcacccccctgagcagatcgacagccactctcgtttacctcactcagctcaccccagcggcaaacccccaagtgcacctgcaagcgccccacagaacgtcttcagcacgaccgtgtcgagcggctacaacactaagaagataggcaagcggttaaacattcagctcaagaagggaactgaaggccttggctttagcataacctctagggacgtgaccatcgggggttctgcgccaatttatgtgaaaaacattttgccaaggggagccgcaattcaggatgggcgacttaaagctggggatcgcctcattgaagtgaacggcgtcgacctcgtgggcaagtcccaggaggaagtggtttccctgcttaggagcaccaagatggagggaaccgtgtcgctcctggtctttaggcaggaggacgcctttcacccacgcgagctcaaagccgaggacgaggacattgtactcaccccagatggcacacgcgagtttctcacctttgaggtccctttaaatgactccggctctgctggcctcggcgtgtctgtcaagggcaacagatctaaggagaaccacgcagacctcggaattttcgtcaagtctatcataaacgggggagcagcctccaaggatggtaggttgcgcgtgaacgaccagctgatcgcagtgaacggcgaatctcttcttggtaaaaccaatcaagatgctatggagactctaaggcgctccatgtcaactgagggcaacaagcgaggcatgatccaactgattgtcgccaggcggatttctaaatgcaatgagctgaagagccccggtagtccacccggacctgagctgcctatagaaactgcattggacgaccgcgaaaggcggatatcccactctctgtacagcgggatcgaggggctcgatgaatcccctagcagaaacgcagcactctctcgaattatgggaaaatatcagctgtctcccacagtgaatatgccgcaggatgatactgtcatcatcgaagatgacagactgcctgttttgcccccacacctgagcgaccaatcctcatcctccagccacgacgatgtgggcttcgtgaccgctgacgctgggacttgggccaaggccgctatcagcgattctgcagactgctctctgtcccccgacgtagaccccgtgctggccttccagcgggagggcttcggaagacagtctatgtctgagaagcgtactaagcagttttctgacgcatctcaactcgacttcgtgaaaactcgaaagagcaagtctatggatttagggatagcagacgaaacaaagctcaacactgtcgatgatcagaaggctggctctccgagccgtgacgtcggtccctctctagggctgaagaagtctagttcgttggaatcactccagactgcggttgccgaagtgacattgaatggcgacatccctttccaccggcctcggccaaggatcatcaggggccgaggttgtaatgagtcattccgtgccgctattgacaaaagctatgataagccagctgttgacgatgatgatgaagggatggaaaccctcgaggaggacacagaagagtcttcgcgatccgggagagaaagtgtgtctaccgctagcgaccagcccagtcactctctcgagcgacaaatgaatggcaaccaggagaaaggcgataagactgacaggaagaaagacaagacaggtaaagagaagaaaaaggaccgcgacaaagagaaagacaagatgaaagccaagaagggaatgctcaaaggattaggcgacatgtttaggttcggtaagcataggaaagatgataagattgaaaagacaggtaaaatcaagatacaagagtcattcaccagtgaagaagaacgcatccggatgaaacaagagcaagagcgcattcaggccaaaactagggaatttagggaacgccaagctcgcgaacgagattatgcggaaatacaagactttcataggacattcggctgcgatgacgagctgatgtacggcggagtgtcctcttatgagggttccatggccctaaatgcacggcctcaatcccctcgggaagggcacatgatggacgctctgtatgcccaagtgaagaaaccacgtaattcaaaaccgtctccggttgattctaaccggagcaccccaagcaatcatgataggattcagagactgagacaggaatttcagcaggccaagcaagatgaagacgtggaagacaggagacggacctactcctttgagcaaccttggcccaacgctcggccagccacacagagtggccgacattcggtctccgtggaggtgcagatgcaacgccagcgacaggaagagagggagtccagccaacaagcccagagacagtactctagcctgccccgacagagtcggaagaacgcctcctccgtctcacaggatagctgggagcagaattattccccaggggaagggtttcagtcggctaaagagaaccctcggtacagcagctaccaggggagtcggaatggctacttagggggtcacgggttcaacgctcgcgtgatgctagaaacccaggaattgttgcgccaagagcagcgacgtaaggagcagcagatgaagaagcagcctcccagcgagggcccaagcaattacgactcttacaaaaaagtgcaggacccctcctacgcaccgcctaaggggccatttaggcaggatgtgccacccagccccagccaagtggccagactgaatagactccagacacccgagaagggtagaccattctacagttag

SEQ ID NO: 234061 - DNA, 3735 bp, synthetic construct
  misc_feature 1..3735: note = Description of Artificial Sequence: Synthetic coding sequence
  source 1..3735: mol_type = other DNA
atgaaggtcacagtctgtttcggtaggacccgcgtggtggtgccatgtggcgatggccacatgaaagtgttttcacttatacagcaggctgtcacccgttaccgcaaagccatcgccaaggatccaaattattggattcaggtgcaccgcttggaacacggcgacggaggcattctggacctggacgatattctgtgtgacgttgccgatgataaggaccgactggtggccgtcttcgacgaacaagatcctcaccacggtggcgacggcaccagcgcttcaagtactggcacccagtctcccgagatttttggatccgaactggggaccaacaacgtctctgccttccaaccctaccaggccacaagcgaaatcgaggtaacgccaagcgtgctgcgggcaaatatgcccttgcatgttcgccgttcaagcgaccctgcgctgatcggcctgagcacaagcgtcagtgactccaacttctctagcgaggaacccagtaggaaaaatcctacaaggtggagcacgacggctggctttctgaagcagaacaccgccggaagtccaaaaacttgtgaccggaaggatgaggatggtactgaagaggacaattctcgggtcgagccagtgggtcacgccgatacggggctggaacacatcccaaacttctccttagatgacatggtcaagctggtggaggtgccaaatgacggtgggcctctgggaatccatgtggtccctttcagcgccagagggggacggacactgggactgcttgttaaacggctggagaaaggcggaaaggctgagcatgagaacctattcagagagaacgactgtattgtaaggattaacgacggagacttgaggaatcgaaggttcgagcaggcccagcacatgtttcgccaggccatgcggacaccaattatatggttccatgtggttcccgctgcaaataaggagcagtacgagcagttgagccagagtgaaaagaacaattactacagttcgagattttctccagatagtcagtatattgacaataggtctgtcaattcagcaggcctccacaccgtgcagagagctcctagactaaatcatcctcctgagcagatcgactcacattcccgattgcctcattccgcccaccccagcggaaagcctccctcagcccctgccagcgctccgcagaacgttttctccacaactgtgtcaagcggctataataccaagaagattggcaaacgactgaatatccagcttaagaagggaaccgagggattgggtttcagcatcactagcagggacgtcactatcggaggaagcgctcctatatatgtgaaaaatatcctgccacgcggagcggcaattcaggacggcaggctaaaagctggggacaggcttattgaggtgaacggcgtagatctagtgggtaagtcacaggaggaggttgttagcttgctgcggtccacaaagatggaaggcactgtgtcactccttgtgtttcggcaagaagacgccttccatcccagagaactgaaagctgaagacgaggacatagtgcttacccccgatggaaccagagaatttctgaccttcgaagttccactgaacgattctggatcagccggtctgggcgtttcagtgaagggaaatcggtcaaaagagaaccatgctgacctaggcatcttcgttaagtctattataaacgggggtgcggcatcaaaggacggccgtttacgggtgaacgatcagctcatcgctgttaatggggagagtttacttggaaagacaaaccaggacgctatggagacccttcgaagaagcatgtccaccgaggggaacaaacggggaatgatacagctcatcgtcgccagacgcatttcgaagtgtaacgagctcaagtcaccgggaagccctccaggaccagaactgccaatcgaaacggcgcttgacgaccgcgaacggaggatttcacacagcctgtatagcggaatcgagggcttggacgagtctccaagcagaaacgccgctctctcccgcataatgggaaagtatcaactctccccgacagtgaatatgccgcaggacgataccgtgattattgaagatgatcggttgcctgtgcttcccccacacctctccgaccagagttcaagctcctcccacgatgacgtggggtttgttacagcagacgccggaacatgggcaaaggcagcaatcagcgacagtgccgattgttccctttctccagacgtcgatccagtcctagcttttcagagagagggctttggccgtcaaagtatgtcagagaaaaggacaaaacagttctcagatgctagccagctggactttgttaagactaggaagtcgaagtctatggatctcggaagcagcccatcgcgagatgtcggtcctagcctcggcttaaagaagtctagcagtctggaatcactccagacggctgtggcagaggtgacactgaacggggatattccctttcatcgtccacgcccaaggatcatacgaggaagagggtgcaatgaatcctttagggcagctatcgacaagtcttacgataaacctgcagtggatgatgacgacgaggggatggagacattagaggaggataccgaggagtccagccggtcgggtagagaaagcgtgagtacagcgagtgatcagccttcacattctctcgaacgtcagatgaatggtaatcaagaaaagggcgataagacagaccggaaaaaggataagaccgggaaggaaaaaaagaaagacagggataaagaaaaggataaaatgaaggccaagaaaggtatgttgaaaggcctcggagatatgttccgaatccaagctaagacgcgggaattccgcgagaggcaagcgcgagagcgagactacgcggagatccaggattttcacaggacatttggttgtgatgacgaattgatgtacgggggagttagctcttacgaaggctctatggccctgaacgcccgacctcagtcccccagagagggacacatgatggacgccctctacgcccaggtcaagaaaccgcgtaacagcaagccgagtccagtcgatagcaatcggtctactccaagcaaccatgataggatccagcgactgcgacaggaattccagcaggctaagcaggacgaggatgtggaggatcgcagaagaacttattccttcgaacagccctggccgaacgcccgtccagccacacagagcggtcggcacagcgtgagcgttgaagtgcaaatgcagagacaaagacaggaagaacgcgaatcatctcagcaggctcaacgtcagtacagcagcctgcctaggcaaagtaggaagaacgctagcagcgtgtcccaggatagttgggagcagaattactcccccggtgagggatttcagagtgccaaggagaaccccaggtattctagctaccagggctcccgcaacggatatcttgggggtcacggttttaatgcaagggtgatgctggaaacacaggagctcctcaggcaggagcagaggcgcaaggagcagcagatgaaaaaacagcccccatctgaaggccctagtaattacgactcatacaagaaggtgcaggatccatcttatgctccacccaagggtccgttccgccaggacgtacctccatctccatcccaggtcgctcgtctgaatcgactccagacccctgaaaaaggcaggcctttttattcatag

SEQ ID NO: 234062 - DNA, 2244 bp, synthetic construct
  misc_feature 1..2244: note = Description of Artificial Sequence: Synthetic coding sequence
  source 1..2244: mol_type = other DNA
atggtgaaactcgttgaggttcccaatgatgggggaccactcggcattcacgtcgtcccattttctgccagaggcggtagaacccttggtttgcttgtgaaaaggttggagaagggagggaaggcagaacacgagaacctgttccgggagaacgattgtatcgtacgcataaatgatggagatctgcgcaaccgaagattcgagcaagcccagcacatgttcagacaggcaatgcgcacccctatcatatggttccatgtggtccctgctgcaaacaaggagcagtacgaacaactctctcagtcagagaaaaataattactatagctcaaggttctccccagattcccagtacatcgataaccggtccgtgaacagtgccggacttcatacagttcagagagcccctcgtctgaatcatccaccagagcagatcgacagccacagcaggttaccccactctgcgcatccatctggtaagcccccttctgcacctgcctcagcccctcagaacgtgttcagtacaacggtgagtagtggctataacacaaagaaaattggaaaaaggcttaacattcagcttaagaaaggcactgagggactcggcttttctatcacgagccgggacgtcactatcggcggttccgcacctatctacgtcaaaaatatcctccccagaggagcagcaatacaggacgggaggctgaaggccggtgataggctcatagaggttaacggagtggacctggttggtaagtcccaagaggaggtcgtgagtttactgcggtccacgaagatggagggaactgtgagccttctggtctttaggcaggaagacgccttccatccacgagagctcaaagctgaggacgaagacatagtgctaactcctgacggtacgagggaattcctgacgtttgaggtgcccttgaatgacagcggctcagcgggacttggtgtttcagtcaagggcaacagaagcaaggagaaccacgccgatcttggtatcttcgtgaagtcaattatcaacggaggggcagcatcgaaggatggcagactgcgcgtgaatgaccagctgatcgccgtcaatggcgagagcctcttgggtaaaacaaatcaggatgcaatggagacactgcgcagatctatgtcgactgaggggaacaaacgaggcatgatacagttgatcgtggcccgacggatctcaaaatgcaatgagctgaaatcaccaggatcaccacctggacccgagttacctatcgagactgccttggatgatagggaaaggcgaatctcccatagcctatactccggaattgaggggctggacgagagtccaagccgaaacgcagccctcagcagaattatgggtaagtatcagctcagccccacggttaacatgccacaggatgacacagtgatcatcgaagatgatagactgcccgtgctgcctccacatctgagtgaccagtcaagctcctctagccacgacgacgtgggctttgtgactgccgatgccggaacttgggcaaaggccgcaattagtgattcagccgattgctccctttcccctgacgtcgaccccgtcctcgctttccagagggaaggtttcggccgacagagcatgagtgagaagcgtacaaaacaatttagcgatgcttctcaattggactttgttaaaaccaggaagtcaaagtcaatggatctcgtagccgatgagacgaagttgaataccgtggatgaccagaaggcaggatctcccagtcgggacgtgggccctagccttggcttgaaaaagagttccagcctggaaagcctacagacagctgtggctgaagtcacacttaatggcgacattccgtttcaccgacccaggccacgaatcattaggggaaggggttgcaacgaatcatttcgggctgcaatcgacaagagttatgacaagccagcagtggacgacgatgacgagggtatggagaccctggaggaagacaccgaagagagttccaggagcggtcgggaatctgtcagcactgcctctgaccagccatcccactctctggagcgacagatgaacgggaatcaggagaaaggcgataaaaccgacaggaagaaggacaaaacgggcaaggaaaaaaaaaaggaccgcgataaggagaaagacaagatgaaggccaagaagggcatgctgaagggtctcggcgatatgttttccctggcaaaactgaaaccagaaaagcgctag

SEQ ID NO: 234063 - DNA, 3801 bp, synthetic construct
  misc_feature 1..3801: note = Description of Artificial Sequence: Synthetic coding sequence
  source 1..3801: mol_type = other DNA
atgaaagtgacagtctgtttcggtcgtactcgagttgtcgtcccctgcggggacggtcacatgaaggtattttcccttattcagcaggccgtgaccagataccgcaaagcgatcgcgaaagacccgaattactggatccaggtccatcggctggagcacggggacggcggtattctggacctggatgacatcttatgcgatgtggctgacgacaaagataggctagtggccgtgtttgacgagcaagacccacaccacggtggtgatgggacatccgcctcatcaactggaacccagtctccagaaatatttggaagcgagctggggacaaacaatgttagtgccttccagccctaccaggctacgagtgagatcgaagtcacacccagcgtgctcagggctaacatgcccctgcacgtcagaaggagttccgatcccgcactgatcggcctgtcaacaagcgtgtctgatagtaacttctcaagtgaagagccctctcgcaaaaaccctaccaggtggagcaccaccgctggatttctcaagcaaaataccgccggaagccccaagacgtgtgatcggaaagatgaggacggaacagaagaggacaatagtcgtgtagagcctgtgggacatgctgacaccggattggagcatatacctaacttctcgctggatgatatggtgaagctggttgaagtgcccaacgacggaggccctctcggtatccacgtggtgcccttcagcgcaagaggcggaaggaccctcgggctgctggtgaaacgtctggagaaaggcggaaaggccgagcacgaaaatcttttccgcgagaacgattgtatcgtgcggatcaacgacggcgatctcagaaaccgtcgattcgagcaggcacagcatatgttcaggcaggcaatgaggaccccaatcatctggttccatgtggtaccagcagcaaataaggaacagtacgagcagctgtcccaatcagaaaagaataactattactcatcccggttttcaccagacagccaatacatagacaatcggtccgtaaacagcgctggtctgcacaccgttcaaagggccccacggctgaaccacccgccagaacagatagactcccacagccggctgcctcattctgctcatccctccgggaaaccacccagcgcacctgcttctgccccacaaaatgtgtttagcacaacagtgtcttctggatacaacaccaagaaaatcggcaagaggctgaacattcagttgaaaaagggtaccgagggactcggtttctcgataacgtctcgggatgtgacaatcggcggttctgccccaatttacgtgaagaacatcttaccacggggtgccgcaattcaggacgggagattaaaagctggtgacaggctgatagaagttaacggcgtggaccttgtgggtaagagccaagaggaggtggtgtcacttctgcgctctacaaagatggagggaactgtgtccttgctcgtatttagacaggaggacgcgttccacccgagggagctcaaagcagaggacgaggacatcgtcctcactcccgacggcaccagggagttccttaccttcgaggttcctctgaatgatagcgggtctgctggcctaggagtgagtgtcaaaggcaatcgatctaaggagaatcatgctgatctggggattttcgtgaaaagcattattaacgggggagcggctagcaaggacggcagactgcgggtgaatgatcagctgattgctgtgaatggtgagtcactcctcggtaaaaccaaccaagacgccatggaaacgctgaggagaagcatgtccaccgaaggcaataagagaggaatgattcagctcattgtggccaggcgcatctcgaaatgtaacgagctgaaatctccagggtcgcccccaggcccagaactgcccatcgagactgcgcttgatgaccgtgagcggaggatttctcatagtctgtatagtggcatcgaaggactcgacgagtccccatcacgcaacgcagccctctcccggatcatgggcaaataccagttatcccccactgtcaatatgccgcaagacgataccgttataatcgaagacgatcgtctgcccgtgctcccacctcacctgtcggatcagagctcatctagcagccatgatgacgtgggcttcgtgaccgccgacgcgggtacttgggccaaggcagctatatcagatagcgccgattgttctctctcgccggacgtggaccccgtactggccttccagcgcgaggggtttggcagacagattgccgatgaaacaaagctgaacacagttgacgaccaaaaggcaggttccccgtcccgggacgttggaccctcattgggcctgaagaaaagcagctccctggaaagtctccagactgccgtcgcagaggtgacccttaatggagacataccatttcatcgacctaggccaaggatcatacggggacggggttgcaatgaaagctttcgggctgctatcgacaagagctatgacaaaccagccgtggacgacgacgacgagggaatggagactctggaggaggatactgaagagagctcgcgaagtggtcgggaaagtgtgagcactgccagcgatcaaccgagtcactctctcgagaggcagatgaatggcaaccaggaaaagggggacaaaaccgatcggaagaaggacaaaacaggaaaggagaagaagaaagatagagacaaggaaaaagacaagatgaaagccaaaaagggtatgctgaaggggctgggtgatatgtttaggtttgggaaacaccgaaaggatgacaagatcgagaagactggcaaaatcaagatccaagagtcatttacaagtgaagaggaacggatcaggatgaaacaagagcaagagcgtatccaggccaagacacgagaatttagagagcgccaggctagggagcgggactacgccgagatacaagatttccacagaacttttggctgcgatgacgaactgatgtacggtggcgtgtccagctacgagggcagcatggctctgaacgcacgccctcagtctccacgcgaaggccatatgatggatgccctgtacgcccaggtgaagaagccaagaaacagcaagcccagccccgtggattccaaccgctcgacacccagcaatcacgacaggatacagcgcctacgtcaagaattccagcaggctaaacaagatgaggatgtggaagataggcgacggacctattccttcgaacagccatggccaaacgcacggccagccactcagtcaggtcggcattccgtgtccgtggaagttcagatgcaacgacagaggcaagaagagcgggaaagttcacaacaggcccagcggcagtactcttcactccctcggcagagtcggaaaaatgccagcagtgtttcacaggattcttgggagcaaaattacagtcctggggagggtttccaatctgcaaaggagaacccccgatattcttcttaccagggttctcgcaacggatatcttggcggtcacggctttaatgcccgtgtgatgctggagacccaggaactccttaggcaggagcagcggaggaaagagcagcagatgaaaaaacagccgccaagcgagggaccatcaaactacgactcttataagaaagtgcaagatccttcttacgctccaccaaaaggcccattcaggcaagacgtgcctccatcaccttcccaagttgcaaggctcaatcggctccagactcctgagaagggaagacccttctactcatag

SEQ ID NO: 234064 - DNA, 4023 bp, synthetic construct
  misc_feature 1..4023: note = Description of Artificial Sequence: Synthetic coding sequence
  source 1..4023: mol_type = other DNA
atgaaggtgacggtttgcttcgggcgaaccagggtggtcgttccctgcggcgatggtcacatgaaggtattcagcttaatacagcaggctgttacccggtatcgcaaggcaatcgcaaaggatccaaactattggatccaggtgcacaggctggagcatggtgatggaggcatcttggacctagatgatatcttatgtgatgtggctgacgacaaagatcgtctagtcgctgtcttcgacgaacaggatcctcaccacggcggagacgggacctcagccagttctacaggcacccagtcccccgaaatctttggaagcgaactgggaaccaataatgtgagcgcctttcagccatatcaggccacaagtgaaatcgaagtgaccccatcggtgctacgggctaatatgcctctgcacgttcggaggagctcagatccagcattaatcggcctctctacttccgtgtcagactctaatttctcatccgaggaaccctcaagaaagaatccaacacgatggtccactacagcaggttttcttaagcagaacacggcaggctctcccaagacgtgtgataggaagaaggacgaaaattatcgatccctccctcgcgatacgtcaaactggagcaatcaattccaacgggataacgcccgttctagcttgagtgcttctcaccccatggttggcaagtggcttgagaagcaagagcaggacgaagacggtactgaggaagataattctcgcgttgaaccagtggggcatgctgacacaggcctcgaacacatacccaatttcagcctggacgatatggtcaagttggttgaggtgccgaacgacggcggacctctcggaattcacgttgtgcctttcagcgctcggggagggaggaccctgggattactcgtgaagcgcctcgagaagggcggtaaggccgagcatgaaaacctttttcgggaaaacgactgcattgtgcgcatcaatgacggggacttgcggaaccgcagattcgaacaggctcaacacatgtttagacaagccatgcgcactcccattatctggttccacgtggtgcccgctgccaacaaggaacagtacgaacagttgagtcagtctgaaaaaaataactactactctagccggttcagccccgactcacagtacattgataacaggtccgttaactccgcagggttgcatacagttcaaagagctcctcggctaaatcatcctcctgaacaaatagactctcatagccgtctgcctcactcggcacatccgtccggaaagccaccctctgctccagcttcggcgcctcagaatgtctttagcactaccgtttctagtggttacaacacaaaaaagattggaaagcgacttaacatacagctgaagaagggcaccgaagggttgggcttttccattacgtcccgtgatgttactatcgggggatcggcacctatttacgtcaagaacatccttcctaggggcgctgctatacaggatgggcgtcttaaagctggagatcgccttatcgaagtaaatggtgttgacctggttggaaaatctcaggaagaagtggtgtctttgctgcgcagtaccaaaatggagggtacagtctcccttctggtttttagacaagaggacgccttccacccgcgtgagttaaaggccgaagacgaggatattgtcttaacaccagacggcacgagggagtttctgaccttcgaggtccccctgaacgattccggctctgccggtctcggagtctctgtaaagggaaataggagcaaggagaatcacgcagacctcgggatatttgtcaaatcaatcattaacgggggtgcagcttcgaaagacggacggctgagggtaaacgaccagctgattgcagtgaatggggaatcgctgctcggtaaaactaaccaggacgctatggaaaccctccgacgatctatgagtaccgagggcaacaaaagggggatgatccagctgatcgttgcgagacgcatttccaaatgcaacgagctgaagagccctgggagccccccaggacccgaactgccaattgagactgcgctggatgatagagagcgccgaatctcgcatagtctgtattctggcatcgagggtctggacgagtccccttctcgaaacgctgccttgtcccgcatcatgggcaagtatcagctatcccctaccgtcaatatgccgcaggatgataccgtcatcatagaggacgacaggttgccggtcctgccacctcacctctctgaccagagctctagctcctcacatgacgacgtcggattcgtcacggccgacgctggtacctgggctaaagccgctatcagcgacagcgctgactgttcgctgagcccggacgtggaccccgtgttggcatttcagagagagggattcggaaggcagtctatgagcgaaaaaagaaccaagcagttctcggatgccagccagctcgactttgtcaagactcggaagagcaagtcaatggacctcggtatagctgacgaaactaagctgaatacagtggacgatcagaaagccggaagcccctctcgcgatgtaggaccgtctctcggcctgaaaaagtctagctctctggagtccttacagaccgcagtggccgaagttacgttgaatggtgacattccattccatagaccacggcctaggatcatcagaggaagaggctgcaacgagtcatttcgagccgcaatcgataaaagctatgacaaacccgcagtcgatgatgatgacgagggtatggagacattggaagaagatactgaggagagttccagatccggccgagagagcgtgtctaccgcaagtgaccagccatctcactctcttgagcgccagatgaatgggaatcaggagaaaggggacaagacggaccggaagaaggataagacaggcaaagagaagaagaaagatcgagataaagagaaagacaaaatgaaagctaagaagggaatgctgaagggccttggagacatgttcaggtttggtaagcaccgcaaagacgataaaatcgagaagactggcaagataaaaattcaagaatcttttacatcagaagaggagaggatccgaatgaagcaggaacaagaaagaattcaggccaagactagagagtttcgcgagcggcaggctagggagagagactacgcagagattcaggatttccacaggacctttggctgcgacgatgagctgatgtatgggggagtaagcagttatgagggatccatggccttaaacgctcggcctcagtcaccgagggaaggccacatgatggatgctttgtacgctcaggtcaaaaagccacggaacagtaagccgtcacccgtcgatagtaatagaagcaccccgtcaaaccatgatcgaatccaacggttgcgccaggagtttcaacaggcaaagcaggacgaggacgtggaagacagaaggaggacttactcgtttgagcaaccctggccaaacgctagaccggctacacaatccgggaggcacagcgtctccgtggaagtgcagatgcagagacagagacaggaagagagggagagttcccagcaagcgcagcgccaatactcatccctgccacgacaatctcggaagaacgcaagctccgtgagtcaagactcttgggaacagaactactccccaggcgagggtttccaatccgctaaggagaatcccaggtacagctcttaccagggtagtagaaacgggtacctcggcggacatgggttcaatgcccgagtgatgctggagacacaggaactcctgcgccaggagcaacggagaaaagaacagcaaatgaaaaagcagccacccagtgagggacccagtaattacgactcctataagaaggtgcaggatccttcctacgccccaccaaagggccctttcagacaggacgtgcctcccagtcccagtcaggtcgctaggcttaatcgactgcagacccctgagaaagggaggccattctacagttag

SEQ ID NO: 234065 - DNA, 1119 bp, synthetic construct
  misc_feature 1..1119: note = Description of Artificial Sequence: Synthetic coding sequence
  source 1..1119: mol_type = other DNA
atgaatcgctctcacaggcatggggctggttctggctgcctgggcaccatggaggttaagagcaagtttggggctgaattccgtcgcttctccctggagaggagtaaacctgggaagtttgaagagttctacggcctactacagcacgtacataaaattccgaatgtggacgtgctagtgggatacgccgacatacacggtgacctgcttcccattaacaatgacgataattaccacaaggcggtgtcaactgctaatcccctccttcggatctttatccagaaaaaagaggaagccgactattctgcgttcggcacagatacgctgattaaaaagaaaaatgtgttaacaaatgtgctcaggcctgataatcatcgcaaaaagcctcatattgttatcagtatgccccaggactttagacccgtttcttccataatcgatgtcgacattctgccggagacacaccggagagtgcgcttgtacaagtatggaaccgagaagcccctcggcttttacattagagatgggagctccgtgcgggtgactccccacgggctggaaaaggtccctggcatctttatctctagactggtgccaggtggcctggcccagagcactggactgctggcggttaacgacgaagtcctggaagtcaatggaatcgaagttagcgggaaatctcttgaccaggtgacggatatgatgatcgctaacagcaggaacctgataattaccgtaaggcctgcgaaccagagaaataatgtggtccggaattcacgcacttcaggttcgagcggccaatcaaccgacaacagcttgctcggatacccccagcaaatcgaaccttcattcgaacctgaggacgaagactcagaagaggatgatataataatcgaagataatggtgtaccacaacaaatccctaaagccgttccaaatacggaatctctggaatcattgacccaaattgagctgagcttcgagagcggtcagaatggatttatcccttctaacgaggtgtccctcgccgctattgcatcatcctccaacactgagttcgagactcatgcccctgaccagaaattgctggaggaagacggcacgataatcacactctag

SEQ ID NO: 234066 - DNA, 1131 bp, synthetic construct
  misc_feature 1..1131: note = Description of Artificial Sequence: Synthetic coding sequence
  source 1..1131: mol_type = other DNA
atgaataggagttttcataaaagtcagaccttgagattctacgattgcagcgcggttgaggttaagtccaaattcggggctgagttcagacgctttagtttggatcgacataagcctggaaagtttgaagacttttataagttggtggtgcacacgcaccacatctccaatagcgatgtgaccatcgggtacgccgatgtgcatggagacttgctcccaattaataatgacgacaatttctgtaaagccgtcagtagtgcgaatcccctcttgcgggtgtttattcaaaagcgggaggaggccgaaagaggctcccttggcgctggctctctgtgtaggcggcgacgggctttgggagcattgcgggatgaaggcccaaggcggcgtgcacatcttgatatcggactccccagagacttccgacccgtttcatccattatcgacgtggatctcgttcccgaaacacaccgcagggtgagactgcatcgccacggatgcgaaaaaccactgggattttacatccgcgatggggctagcgtaagagtcactcctcacggactcgagaaggtccccggtatattcatatctcggatggttcctggcggactggctgaatcgaccggcctgctcgcggtgaatgacgaagtgctcgaggtcaacggaattgaggtggccggaaagacactggaccaggttaccgacatgatgattgccaatagccataacctgattgtgacagtgaagcctgccaaccaacggaataatgtcgtccggggtggtcgagccctgggtagctctgggcctccctcagacggcacggctggttttgttgggccacccgcaccacgtgttttgcagaatttccatcctgatgaagccgaatccgatgaggacaatgacgtggtgattgaggggactcttgaacctgccaggccccctcagactccaggggctccagctggctctctgtcacgggtcaatggagccggactcgcgcagcgtctgcagcgtgatctggctctcgacggaggtctccagcggctgctatcttccctacgggctgaccccaggcactctctggctctgccacccggaggggtggaagaacatggccctgcagtgacactttag

SEQ ID NO: 234067 - DNA, 1236 bp, synthetic construct
  misc_feature 1..1236: note = Description of Artificial Sequence: Synthetic coding sequence
  source 1..1236: mol_type = other DNA
atggccgaggccgagctgcataaggaacgcctgcaggcaatcgccgagaaaagaaagcgacagacggagattgagggaaagagacagcaactggatgagcaaatactgctgctgcaacatagcaaatccaaagtcttgcgagaaaagtggctgttgcagggcattcccgcaggtactgctgaagaagaggaagcacgcaggagacagtcagaggaagacgaattcagagttaagcagttggaggacaatatccaacgcctggagcaagaaattcagactctagaaagcgaggagagccaaatcagcgctaaggagcagataatcctggagaaacttaaggaaacagaaaagagtttcaaggacttccaaaaaggcttctctagtaccgatggtgacgcagtaaattatatctcaagtcagctgccagacctacctatactgtgttctaggacggcagaaccttctcctgggcaggacggcacttcccgggctgccgcagtgtatgcgatggagattaacgtggagaaagacaagcagactggcgaaaccaaaattctatctaccagtacgatcggccctgagggagtacaccagaagggagtaaaggtgtatgacgatggtaccaaggtagtgtatgaggtcaggtctgggggtactgtggtggagaacggggtacacaaattgagtacgaaagatgtggaggagctgatacagaaagcagggcagtctagcctgggcggtggacatgtcagtgagagaactgtcatagcagacggaagcttatctcacccaaaagagcacatgctgtgcaaagaagctaaactcgaaatggtgcacaagagtcgaaaggatcattcatctggaaaccccggacagcaggcgcaggcccctagcgccgctgggccagaagctaatttagatcaacctgtgaccatgatctttatgggatatcagaatatcgaggacgaggaggaaaccaaaaaggtcctgggctatgatgagactatcaaggctgaactcgttctgatcgatgaggatgacgagaaatctctgcgagaaaaaaccgtcacagacgtgagcacaattgacggaaacgccgctgaattagtaagtggacggcctgtaagtgacacgacggagccttcatctccagagggaaaggaagaatcactcgccacagaacctgcaccaggaacgcagaaaaaaaagcgctgccagtgctgcgtggttatgtag

SEQ ID NO: 234068 - DNA, 1140 bp, synthetic construct
  misc_feature 1..1140: note = Description of Artificial Sequence: Synthetic coding sequence
  source 1..1140: mol_type = other DNA
atggagatggccgaagctgagctgcataaagagcgactgcaggccatagcagagaagaggaagaggcagacagaaattgaggggaagcggcagcaattggatgagcagatacttctgctccagcactcgaaaagtaaggtcctgagggaaaaatggttactccagggaatacccgcaggcactgcagaagaagaagaagccagaagacggcagagtgaagaggacgaattccgcgtgaagcagttggaagacaatatacagcgcctggaacaggaaatccagaccttagaatctgaagagagccaaatctcggcaaaggaacagattattctggaaaaattgaaggagactgagaagtcctttaaagactttcagaaaggtttcagtagcaccgacggagccgtgtacgctatggagatcaacgttgagaaagacaaacagacaggagagaccaaaatactctccacttctaccatagggcctgaaggcgtgcaccagaaaggagtcaaggtgtacgacgacggaacaaaggtagtctacgaggtccgctccggtgggacagtggtcgaaaacggggtccataagctcagtacaaaagatgtggaagaactcatacagaaggcaggacagtcctccttgggtggagggcacgtcagcgagaggacagtgatagcagacggaagtctgtcgcatccaaaagagcacatgttgtgcaaagaagccaaactggagatggtgcataagagcaggaaagatcacagttccgggaacccagggcagcaggcccaggctccctccgccgcaggcccagaagcgaatctggatcaacccgtcactatgatattcatgggatatcagaatatcgaggatgaggaggagacaaagaaggtgttggggtatgacgagacaataaaagcggagctggtattgattgatgaagatgacgaaaagtctctgcgggagaaaactgtcacagatgtttccactattgatggcaacgcagccgagttggtctctggcaggccggtgtccgacactacagaaccgtccagcccagagggcaaggaggagtccctggccaccgagccggctcctggaacacagaaaaaaaagagatgccagtgctgtgtcgtgatgtag

SEQ ID NO: 234069 - DNA, 1242 bp, synthetic construct
  misc_feature 1..1242: note = Description of Artificial Sequence: Synthetic coding sequence
  source 1..1242: mol_type = other DNA
atggagatggcagaggccgaactgcataaggagcgcctccaggccattgctgagaagcgcaagaggcagacagagattgaaggaaagcgacaacagttagacgagcaaatcttattactacaacatagtaagtctaaggtcttacgggagaagtggctgctccagggtatcccagcaggcaccgctgaggaagaggaggcccgtagacggcaatcagaggaagacgagttccgggtaaagcaactcgaggacaatattcagagacttgagcaagagatccaaactctggagtccgaggaatcccagataagcgccaaggagcaaataatcctcgagaagctcaaagagacagaaaagagctttaaggacttccagaagggtttctctagcacagatggtgatgccgtgaactacatcagctctcaattacctgacctgccaatcctgtgctcgagaaccgccgaacccagtcctggacaggacgggactagccgcgctgccgctgtctatgccatggaaattaacgtggagaaggataagcagacaggtgagactaaaatactgtctactagcacaattggcccagagggcgttcatcagaagggagtcaaggtgtacgatgatggtaccaaagtagtatatgaagtaaggtcaggcggaacggtggtggaaaatggagttcacaagttgtcaacaaaagacgtagaggagctgatccagaaggcaggccagtctagtcttggaggaggccatgtttcagagcgcacagtaattgccgatggttccctgtcccacccaaaggaacacatgctttgtaaggaggctaagctggaaatggtacacaaatctaggaaagatcactccagcgggaatcccggacagcaggcccaagccccatccgctgccggacctgaagccaatttggatcagcccgttacgatgatttttatgggctatcagaatatcgaagatgaggaagagacaaaaaaagtgctcgggtacgatgagaccatcaaagcagaactggtgctgattgatgaggacgatgagaagagtttacgcgaaaagaccgtcacggacgtaagcactatcgacgggaatgcagccgaattggtgagcggtagacctgtgtcggacaccacagagccgtcctcgccagaagggaaagaggagtccctggctaccgagccagctccaggcactcagaagaagaagcggtgccagtgttgtgtagttatgtag

SEQ ID NO: 234070 - DNA, 1167 bp, synthetic construct
  misc_feature 1..1167: note = Description of Artificial Sequence: Synthetic coding sequence
  source 1..1167: mol_type = other DNA
atgggcagagctcggaggttccaatggccattgctcctcctgtgggcagccgctgccggacccggagccggacaggaagttcagaccgaaaatgtcacggtggccgagggaggggtagcagagattacttgccgccttcatcagtatgacgggtcgatcgtcgtcattcagaatcctgcgcgacagaccctattcttcaacggcacccgcgcattaaaggacgagcgctttcagctggaggagtttagccctcgcagagttcgcatccggctgagcgacgccagactcgaagacgaaggtggatacttctgccagctgtacactgaggatacgcaccaccagatcgccaccttgaccgtcttggtcgccccagaaaatccggtcgtcgaggtgcgggagcaggctgtcgaagggggtgaagtggaacttagctgtctggtgcccagatccaggcccgcagcgactttgcgctggtacagagaccggaaggaattgaagggcgtgagttcttctcaggagaacggcaaggtctggagtgtggcatctaccgtcagatttagggttgaccgtaaagacgatgggggtataataatatgtgaagcccagaatcaggcgctgcccagcggacactccaaacaaacccagtacgtgctagacgtgcagtacagccctacagccaggatccatgcctctcaagccgttgtgagagagggtgacacactggtgctcacctgcgccgtgaccgggaaccccaggccaaatcagatccggtggaacagggggaatgagagcctccccgagagagctgaagcggtcggggagacactgacacttccagggctggtctctgcggacaatggcacctatacatgcgaggcctccaacaagcacgggcacgcacgcgctttgtacgtgttagttgtttacgatcctggggctgttgtcgaagcccagaccagtgtgccatacgcaattgtcggtgggatcctggccctgctcgtgttcctcatcatctgcgtgctcgttggcatggtctggtgctccgtccgccagaagggctcctacttgacacacgaagcctcggggctggatgagcagggggaagccagggaagcgttcctgaacgggagcgacggacataagcggaaggaggagttttttatctag

SEQ ID NO: 234071 - DNA, 1068 bp, synthetic construct
  misc_feature 1..1068: note = Description of Artificial Sequence: Synthetic coding sequence
  source 1..1068: mol_type = other DNA
atgggcaagcttgttgcactggtcctgctgggcgtgggcctctccctagtaggagagatgttcttggctttcagagagcgggtgaacgcctcgcgggaagttgaaccagtggaacccgagaattgtcacttaatcgaggagttagaaacaggtagcgaagatctcgaaattttgcccaatggcctggctttcatatcatccggactcaaatatcctggcattaaatcatttaatccgaatagtccgggaaaaatactgttaatggatttaaacgaggaagatcctaccgtgctcgagctgggcatcactggatcgaaattcgatgtcagttcttttaatccacatgggatctcaaccttcactgacgaagataatgccatgtatttgttggtggtgaatcatcccgacgcaaaaagcactgtggagttattcaagtttcaggaggaggagaagtccctcttacaccttaaaactattcggcacaagctgctcccaaatctgaatgacatcgttgccgtcggacctgagcacttctatggtaccaacgaccattatttcctcgacccatatctgcagtcctgggaaatgtaccttggccttgcatggtcctatgtggtgtactacagcccatctgaggtccgagtagtagctgaggggtttgacttcgccaatggcataaatatctcaccggacgggaagtatgtgtatattgcagagctgctggcccataagattcatgtttacgaaaaacatgccaattggacgttgacacctctgaagagcttagacttcaatacccttgtcgataacatcagcgtggaccctgagactggcgatctctgggtgggatgtcacccaaacggaatgaaaatcttcttctatgatagcgagaacccacctgccagcgaggtcctgcggatccaaaacatactgaccgaggagcctaaagtcacacaggtgtacgctgagaacggcacagtgctgcagggctcaactgtggcatccgtttacaagggcaagctccttatcggaacagttttccacaaggccttgtactgcgaattgtag

SEQ ID NO: 234072 - DNA, 1017 bp, synthetic construct
  misc_feature 1..1017: note = Description of Artificial Sequence: Synthetic coding sequence
  source 1..1017: mol_type = other DNA
atggcagcgggttgtagcgaagcgcctcgccctgcggctgccagtgatggtagtctcgttggccaggctggagttttgccctgcctggagcttcccacatatgctgcagcgtgtgcactggtaaactcaaggtattcatgcctggtagctggaccacatcagcgtcacatagccctgtcacctaggtaccttaaccggaaacgcacaggtataagggagcaactcgacgccgagctgcttcgatatagcgaatccctcctcggggtcccaattgcttatgataatattaaggttgtcggcgaactgggcgacatctacgatgaccaggggcacatccacctgaacatcgaggcggactttgtgatcttttgtcccgagcccggtcaaaaactgatgggtatcgtgaacaaggtttcatccagccacatcggctgtttagtccatggctgtttcaatgcgtccataccaaagcctgaacagctctcagctgagcaatggcagactatggaaatcaatatgggcgacgagctggagtttgaagtttttaggctggactcggacgccgctggggtcttttgcatccgtggtaagcttaatatcacctcactgcagtttaaacgcagcgaggtgtctgaagaggttactgagaatggaaccgaggaggcagccaagaagcctaagaagaaaaaaaaaaaaaaggaccccgagacatatgaggtcgacagtggcaccacgaaattggctgatgatgccgacgacacaccgatggaagaaagcgctctgcagaacactaataacgccaacgggatatgggaggaggaacctaaaaaaaaaaagaagaaaaaaaagcaccaagaggtgcaggaccaggatcctgtatttcaaggaagtgattcttcggggtatcaatccgaccacaagaagaaaaagaaaaaaagaaagcactccgaagaagctgagtttacaccacctctgaagtgcagtccaaagcggaagggtaaatctaactttctttag

SEQ ID NO: 234073 - DNA, 1059 bp, synthetic construct
  misc_feature 1..1059: note = Description of Artificial Sequence: Synthetic coding sequence
  source 1..1059: mol_type = other DNA
ggcgctgcaggaggatgcggattggcaggggatagggccggtctaggagaaagactgctcgccctgcgtaaccgcctgaaagcatcaagagaggtcgaatccgtcgacttgccgcattgccatctcataaagggtatcgaagctgggtcggaggacatcgacattctgccgaacgggctagccttcttcagtgtaggcctgaaattcccaggactgcactcctttgccccagataaaccaggaggaatactgatgatggacctgaaagaggagaaacccagagccagagagctccggattagcagagggttcgaccttgcaagttttaaccctcacgggattagcacttttatcgacaatgatgatacagtctatctgttcgtagtgaaccaccccgagttcaaaaatacagtcgaaattttcaagttcgaagaggcagagaacagtttgctccacctgaagaccgtgaaacacgagttgttaccgtcagtaaatgatatcacagctgtgggaccagctcacttttatgctactaatgatcactatttctcggacccgtttttgaaatacctggagacttatctgaacctgcactgggctaatgtggtctactacagtcccaacgaggtcaaggtggtggccgaagggtttgattcagccaacggcatcaacatctccccagacgataaatatatctatgtagccgacatcctcgcccatgaaatccatgttctggagaagcacactaacatgaatctcacacagctgaaggtcctcgagttggatacattggtagataacttatccatcgacccaagttctggggatatttgggtcggctgtcaccccaatggacaaaagttgtttgtgtacgaccctaataatccaccgtcttcagaagtgctccgcatccagaacatcttgagcgaaaaaccaaccgtcacaacagtctacgcgaacaacggcagcgttctccagggcagtagcgtggcatctgtctatgacgggaagctgctcatcggcaccctctatcatcgcgctctttactgtgaactctag

SEQ ID NO: 234074 - DNA, 1128 bp, synthetic construct
  misc_feature 1..1128: note = Description of Artificial Sequence: Synthetic coding sequence
  source 1..1128: mol_type = other DNA
atggcgcctcccaccgagttgctggcacgtcctgaaagaggatccgcccctggttccagagccatgggcaggctcgtggcagtgggactcctaggcatcgccctcgcattgttgggtgaacgactcttggccctgagaaaccgactgaaggccagcagggaagtcgaatctgtggatcttccacactgccacttaattaaaggcattgaggcaggatcggaagatatcgatatcttgcctaacggactagcgttcttttctgtcggccttaagtttcccggactccactcctttgccccagataaacccggtggcatactgatgatggatctcaaggaggagaagccacgagccagagaactgagaataagccgcggatttgacttagccagtttcaaccctcatggaattagcacattcattgataacgatgatactgtgtatctgttcgtagtgaaccatccagagtttaaaaatactgtggaaatttttaaattcgaagaggcagaaaattctttactgcaccttaagactgtcaagcacgagctgctgcctagcgtgaacgacatcacggccgtcggtccagcccatttctatgccacaaatgatcattacttctccgatcccttcttgaagtatctggaaacatacttaaacctgcactgggccaatgtggtgtactactcccctaacgaggtgaaagtagtggctgagggatttgactctgcaaacggcataaatattagccccgatgacaagtatatttacgtagctgacattctagctcacgaaatccatgtcctggagaaacatacgaacatgaatctcacccagttgaaggtgttggagctggatacgctcgtggataatctctccatcgacccgtcttccggtgatatctgggtcggctgtcatcccaatggccaaaagctctttgtctacgacccaaataaccccccaagctccgaggtgctgagaatacaaaacatcctgtctgaaaagccgaccgttaccaccgtctatgctaacaatggttcagttctacaggggtcatcagtggcttctgtctacgacgggaagctgttaattggaaccttatatcaccgggctctgtattgtgagctttag

SEQ ID NO: 234075 - DNA, 1029 bp, synthetic construct
  misc_feature 1..1029: note = Description of Artificial Sequence: Synthetic coding sequence
  source 1..1029: mol_type = other DNA
atgggcaggcttgtcgcagtgggacttttgggaattgctttggcactgcttggagaacggctcctggccctgagaaatagactaaaggcgagtcgggaagttgaatcggtcgacctccctcattgccacctgattaaaggcatcgaggccggaagtgaagatattgacatattgccaaacggattagcgtttttcagtgttggactgaagttcccgggactgcacagctttgcgcctgataagcctggtggcatactcatgatggaccttaaagaggaaaagccgcgagcacgcgagttacgtattagcagaggatttgacctggcctcttttaacccccacggcatttcgacgttcatcgataacgagttcaagaatactgtcgaaatattcaagttcgaagaagccgagaactctctgctacacctaaagaccgtgaaacatgaacttctgccttctgtgaacgatataactgccgtggggcctgcccacttttacgctaccaacgaccattatttttccgaccccttcctcaagtatctggagacttaccttaacctacattgggccaatgtcgtgtattatagcccgaacgaggtgaaagtggtagctgagggattcgactcggccaacggaataaatatttcccccgatgacaagtatatttacgtcgctgatatcctggcacacgagattcacgtgctggagaagcacactaacatgaacctcacccagttgaaagttctcgagttggatacattggtggataacctgagcatcgatccgagctcaggtgatatttgggtgggttgccatccaaacggtcagaagctgttcgtatacgatcctaacaatcccccttcctcggaagtgcttcgaattcaaaacatactcagcgagaagcccacggtcacaaccgtctacgccaacaacgggtccgtgttgcagggttcgtccgtagcaagcgtgtatgatggaaaactgctcatcggtacactatatcaccgtgcgttgtactgcgagttatag

SEQ ID NO: 234076 - DNA, 1065 bp, synthetic construct
  misc_feature 1..1065: note = Description of Artificial Sequence: Synthetic coding sequence
  source 1..1065: mol_type = other DNA
atgggtaagttggtcgccctggttttgctaggtgtaggactctccctggttggagagatgtttctggcattccgcgaaagggtgaatgcttctcgcgaggtggagccagttgagcctgagaattgtcatctgatagaggagctcgagtcgggatcagaggacatagatatcctgccaagcgggctagcattcattagtagcgggctgaagtaccccggaatgcctaattttgccccagatgaacctgggaaaatcttcctgatggacttaaacgaacaaaatcctcgtgcgcaggctctcgagatctccggaggctttgataaggagctgttcaaccctcatggaattagcatatttatagacaaagataatacagtttatctttatgtcgtcaaccatccgcatatgaagagtaccgtggaaatcttcaagttcgaagagcaacagcgctctctggtctacctcaaaacaatcaaacacgagcttttaaagtccgtcaatgacatagttgttcttggacccgagcagttttacgcaacacgcgaccactacttcactaattcgctgctgtccttttttgaaatgattctagacctgagatggacatacgtcctgttttactcccctagagaggttaaggttgttgctaaaggcttctgtagcgctaacggcattactgtgtctgccgatcagaagtatgtctacgtcgcagacgtggcagccaagaacattcacatcatggagaaacatgacaattgggacctcacccagctcaaagtcatccaactgggcacacttgttgacaaccttaccgtggatcccgcaactggagacatcctcgctggttgccaccccaaccccatgaagctgttgaattacaaccctgaggatcctcctgggtcggaagttttaaggatacagaatgttctgagcgagaagccgagggtaagcaccgtctacgccaataatggctctgtcctccagggaactagtgtcgcaagtgtgtatcatggcaaaatccttattggaacagtgttccacaaaactctttactgcgagctgtag

SEQ ID NO: 234077 - DNA, 1572 bp, synthetic construct
  misc_feature 1..1572: note = Description of Artificial Sequence: Synthetic coding sequence
  source 1..1572: mol_type = other DNA
atgatgctgcggggaaacctaaagcaagtgcgaattgagaagaatcccgctaggctaagggcgcttgaatccgcggtgggcgaatcagagccagcagcagcagctgctatggccctggctttggccggtgaacctgctcccccagctccagcccctccagaagaccatcccgatgaagagatgggttttaccattgatatcaagtcctttctaaaaccaggtgagaaaacgtatacccagcgttgtagattatttgtaggcaatcttccaaccgatataaccgaggaagattttaagagactgttcgagagatacggagagccatccgaggtgtttatcaaccgtgacagaggcttcgggttcatccggctggagtcacgaaccctagctgaaatcgccaaggcagagctcgatggcaccattcttaagagcagacccttgagaatcagatttgctactcatggtgccgctttgaccgtgaagaacctgtccccggtggtgtctaacgagctgctagaacaagcatttagccagtttggcccagtggagaaagccgtcgttgtggtggacgaccgaggaagagcaaccggtaagggtttcgtggagttcgctgcaaagccccctgcgcgtaaggccctggagagatgtggagacggcgcattcctgctaactacaacacccagaccagtgatcgtagaaccaatggagcagtttgatgacgaggacgggctacccgaaaagttgatgcaaaaaacccagcagtaccataaggagagagaacagcctcccagattcgcccagccagggacatttgagttcgaatacgccagcagatggaaagcgcttgatgagatggaaaaacaacagcgtgagcaggtcgaccgcaatatccgcgaggcgaaagagaagctcgaggcagagatggaggctgctagacacgaacatcagctaatgctgatgaggcaggaccttatgcgccgtcaggaagagctgcggcgattggaggaactcagaaatcaagagctccagaaacggaagcagatccaactgagacacgaggaggagcacaggaggcgagaggaggagatgatccgccacagggagcaggaggagctccggagacagcaagaggggttcaagcccaattacatggaaaaccgcgagcaggagatgcggatgggcgatatgggcccaaggggggctattaatatgggagatgctttctcacccgctcccgctggaaatcaggggcctcctccaatgatgggcatgaatatgaacaaccgcgcaaccatccccggtccacccatggggccagggcctgccatgggccctgaaggtgcggctaacatgggaacccccatgatgcccgataatggcgcagtccataatgacaggttcccgcaaggcccaccttctcagatgggatcccctatgggctctcgcacagggagtgagacccctcaggcaccgatgtctggtgttggaccggtaagcggcggaccgggaggctttgggcgaggatcccagggcggaaattttgaaggaccgaacaaaaggagaagatactag

SEQ ID NO: 234078 - DNA, 1392 bp, synthetic construct
  misc_feature 1..1392: note = Description of Artificial Sequence: Synthetic coding sequence
  source 1..1392: mol_type = other DNA
atgggattcaccatcgatattaagagctttttaaagccaggtgagaaaacatatacccagaggtgtagactctttgtcggcaacctgcctacagatataaccgaagaggatttcaaacgactcttcgaaagatacggcgagccctctgaggtgtttataaatagggatagggggtttggtttcataagattagagtcccgcaccctggccgaaatcgccaaggcggagttggatggcactatcctcaaatctcgcccactgagaatccgattcgcaacacatggagcggctctgaccgtgaagaatctgtctcctgtagtatcaaatgagctcctggaacaggccttcagccaatttgggccagtggaaaaggcggtcgttgtggttgacgaccgtggccgtgccactggcaagggcttcgtggaattcgccgcaaagccaccagcgaggaaggctctggaaaggtgtggcgatggagcctttctgcttacaacaaccccacgtcctgtgatcgttgaacccatggagcagttcgatgatgaggacggcctgccagagaaactgatgcagaaaactcagcaatatcataaggagagagagcagccgcctcggtttgctcaacctgggacgttcgagttcgaatacgcgtcacgttggaaagcattagacgagatggagaaacagcaacgcgagcaggtggatcgtaatattcgggaggcaaaggaaaagctggaggctgagatggaggcagcgcgacacgagcatcagctcatgcttatgaggcaggacctgatgaggaggcaggaggaattacgcaggctagaagaattacggaaccaagagctgcagaaacgcaagcagattcagctgcgccatgaggaagagcatcgaagacgggaagaggagatgatccgacaccgtgagcaggaggaactgcgccgacaacaggagggattcaagcccaactacatggagaacagggagcaggaaatgagaatgggagatatgggacccagaggagccattaacatgggtgacgccttctcacccgcacccgctgggaaccagggcccacctcccatgatgggcatgaacatgaataacagagctaccattccgggtccaccaatggggccaggccctgccatgggcccagagggcgctgccaatatgggcacgcctatgatgccggataacggcgctgtacacaacgaccgtttcccacaaggccctcccagtcaaatggggagccctatgggttccaggacaggctctgaaacaccccaggctcctatgtccggggtgggtccggtttcaggcggaccagggggatttggccgaggatctcaaggcggaaattttgagggaccgaataagcgcagaagatattag

SEQ ID NO: 234079 - DNA, 747 bp, synthetic construct
  misc_feature 1..747: note = Description of Artificial Sequence: Synthetic coding sequence
  source 1..747: mol_type = other DNA
atgatgcttaggggaaacttaaagcaggttaggatcgaaaagaatcccgcaagattacgagccctggaatccgcggttggtgaatcggagcctgcagcagctgcagctatggcgctggctctcgcgggtgagcccgcaccaccggctcctgcacccccagaggaccacccagacgaggagatggggttcacaatcgacataaaatcgtttctcaaaccaggggagaagacctacacccagagatgtagactgtttgtgggcaatctgcctactgacatcactgaggaggacttcaagcgattgttcgagagatacggggagccatcagaggtcttcatcaaccgcgaccggggatttggatttattcgacttgaatccaggacgctcgctgagatcgccaaggctgaactcgacggtactatcctcaaatctagaccactgagaatccggtttgccacgcatggagccgcactgaccgtgaagaatttgagccctgttgtgtcaaacgaattgctggaacaggccttttctcaatttgggcctgtcgagaaagctgttgtggtagtagacgacagaggcagggctacgggtaagggatttgtggagtttgctgctaagccacctgcccgaaaagcgctcgagcgctgcggggacggggcattccttctaacaactactcctcgcccagtgatagtggagcctatggaacaattcgatgatgaagatggtctgcccgagaagctctag

SEQ ID NO: 234080 - DNA, 309 bp, synthetic construct
  misc_feature 1..309: note = Description of Artificial Sequence: Synthetic coding sequence
  source 1..309: mol_type = other DNA
atgtctgagaaatcagttgaggccgcagcggaactgtccgctaaagacctgaaagagaaaaaagaaaaggtcgaggaaaaggcctctagaaaggagcgcaaaaaagaagtggttgaggaagaggagaacggggctgaggaggaggaagaggaaaccgccgaggacggggaagaggaggacgaaggcgaagaggaggacgaagaggaagaagaagaggatgacgagggaccggctctgaagagagcagccgaggaggaagatgaggcagaccctaagcgccaaaaaaccgaaaacggagcctcagcttag

SEQ ID NO: 234081 - DNA, 315 bp, synthetic construct
  misc_feature 1..315: note = Description of Artificial Sequence: Synthetic coding sequence
  source 1..315: mol_type = other DNA
atgtccgagaagagcgttgaggccgcagcagagctatccgcaaaggatctcaaagagaagaaggagaaagtggaggaaaaagcgagtcgcaaagaacggaaaaaggaggtggtcgaagcgcctgtgccactggtggtgatggtgggaaaggcctgctcacagccagaagccacaccgtctcccggaccacacagacggcgtcgtaccggtttacggagaaagaagaaaaagctcccaagaatggaaagaagaaaaatgaagggcaagaaaaaaatgcgcaagaaaaagaagaggatgatgaagggaccgaggtag

SEQ ID NO: 234082 - DNA, 306 bp, synthetic construct
  misc_feature 1..306: note = Description of Artificial Sequence: Synthetic coding sequence
  source 1..306: mol_type = other DNA
tctagggacccagcctgtcgcgcagccgagttaagcgccaaggatttgaaagagaagaaagagaaggtcgaagagaaagcctcccggaaggagcgaaagaaggaggtcgtggaagaagaggaaaatggggctgaagaggaggaggaggagacagcggaggatggggaagaggaagatgagggggaagaggaagacgaagaggaagaggaggaggacgatgaagggccagccttgaaaagagcagcagaggaggaggatgaagccgatcctaaaagacaaaaaaccgagaacggcgcatcggcctag

SEQ ID NO: 234083 - DNA, 528 bp, synthetic construct
  misc_feature 1..528: note = Description of Artificial Sequence: Synthetic coding sequence
  source 1..528: mol_type = other DNA
atgcaacggaggctcgttcagcagtggagtgtggccgtcttcctgctgtcttacgctgtcccctcttgcggacgctctgtcgagggattgagtagacgcctcaagcgggctgtctccgagcaccagctgttgcatgataaggggaaaagcatacaagacttacgacgcaggttctttcttcatcatctaatcgcggagattcatactgctgaaattagagccacaagcgaggtgtcgccaaattctaagcccagcccgaatactaagaaccatcctgtccggtttggcagcgacgatgaggggaggtacctgacccaggaaaccaacaaggttgaaacatataaagaacaaccattaaagacccctggcaagaaaaaaaagggcaaaccgggtaagcgtaaagaacaggagaagaaaaagcgtcggacccgatctgcctggctggattccggtgtaacagggtctggcctggagggagaccacttaagcgatactagtactacttcccttgagctggattcaaggtag

SEQ ID NO: 234084 - DNA, 630 bp, synthetic construct
  misc_feature 1..630: note = Description of Artificial Sequence: Synthetic coding sequence
  source 1..630: mol_type = other DNA
atgcagcgcagattggtgcaacagtggagcgtcgccgtgttccttctttcctacgcagtgccttcatgcggcagaagtgtcgagggcctgagccggagactgaaaagagctgtttcggagcaccagttgcttcatgacaaggggaagtccatacaggacctgcgtcgacggttcttcctacatcatctcatcgcggaaatccataccgccgaaatcagggcaacaagtgaagtgtcacctaactcaaagccttctccgaacaccaagaatcacccggtgcgcttcggctcggacgacgagggaagatacctgacacaggaaacaaataaagtggaaacgtacaaagagcaacctcttaaaacacctggaaaaaagaaaaaagggaagccaggaaagcggaaagaacaagaaaaaaagaagcgcaggactaggtccgcgtggctcgattctggagtgacaggttccggactagaaggagaccacttgtccgataccagcactactagcctggaacttgattcacggaccgcactcctctggggcctgaaaaagaagaaagagaacaatcggagaacccaccacatgcaactaatgatttcccttttcaagtctcccctgctgcttctttag

SEQ ID NO: 234085 - DNA, 528 bp, synthetic construct
  misc_feature 1..528: note = Description of Artificial Sequence: Synthetic coding sequence
  source 1..528: mol_type = other DNA
atgcaacggagacttgtgcagcagtggtctgtggccgtatttctgttaagctatgctgttccgagctgtggtagatcagttgaaggcctttcgagaaggctaaagagggccgtcagcgagcaccaattgttgcacgataaggggaagtcaattcaggaccttagaagacggttcttcctacaccatctcatcgcagaaatccacaccgccgagattagggccacgagcgaagtgtctcctaatagcaaacccagcccaaataccaagaaccaccctgtgcggttcgggtctgatgatgaaggtcgctaccttacccaggagactaacaaggtcgagacctacaaggaacagccattaaagactcccggaaagaaaaaaaaaggtaaaccaggcaagaggaaggagcaggagaagaaaaaaagacggacaaggtccgcatggttagactcaggggtcaccggttcaggcctggagggagatcatctgagcgacacatcgaccacttcgctggaactcgactcacgatag

SEQ ID NO: 234086 - DNA, 534 bp, synthetic construct
  misc_feature 1..534: note = Description of Artificial Sequence: Synthetic coding sequence
  source 1..534: mol_type = other DNA
atgcaacggaggctggttcagcagtggtccgttgccgtttttttactgtcatacgcagtgcctagctgtgggaggagtgttgaaggattgtccaggcgattgaagcgtgcagtgtcagaacaccagctgctccacgacaagggcaaatcaatccaagacttgcgcagacgcttctttcttcaccacctcattgcagaaattcacacagcagagatcagggccaccagcgaggtgagtccaaatagcaagccaagtcccaatacaaaaaaccaccccgtacgctttggatctgacgacgagggtaggtaccttacacaggaaacaaataaggtcgaaacctacaaagagcagccactcaagactcctggaaagaagaagaaagggaaacccggaaaacggaaggagcaggagaaaaagaagagacggacacgcagtgcctggctcgatagtggcgttacgggatccggtctggagggcgaccacctatccgacaccagcaccacatccctggaactggactcccggcgacattag

SEQ ID NO: 234087 - DNA, 528 bp, synthetic construct
  misc_feature 1..528: note = Description of Artificial Sequence: Synthetic coding sequence
  source 1..528: mol_type = other DNA
atgcagaggcgattggttcagcagtggtccgtggcagtgtttctgctttcgtatgccgtgcctagctgcggacggtctgtggaaggcttgtcacggcgactgaagcgcgctgtgtccgagcatcagctgcttcatgataagggaaagtctattcaagatttgcgtcggagattcttcctgcaccatctgatcgcagaaattcataccgccgaaatcagagctaccagcgaggtttcacccaattcaaagccatcaccgaatacaaagaaccaccctgtgcggttcggttccgacgacgagggaagataccttacccaggagacgaataaagtcgagacatacaaggagcagccattgaagacgcccggaaagaaaaaaaaaggaaaacctgggaagcgcaaagagcaagagaagaaaaagaggaggacccggtctgcatggctggactcaggggtgaccggatctggcctggagggcgatcacttatcagatacctctactacaagcctggagctcgacagcaggtag

SEQ ID NO: 234088 - DNA, 81 bp, synthetic construct
  misc_feature 1..81: note = Description of Artificial Sequence: Synthetic coding sequence
  source 1..81: mol_type = other DNA
acagcactcttgtggggactgaagaaaaaaggcaagcagcagaagaacaccagctatgctactaacgatttgataatctag

SEQ ID NO: 234089 - DNA, 630 bp, synthetic construct
  misc_feature 1..630: note = Description of Artificial Sequence: Synthetic coding sequence
  source 1..630: mol_type = other DNA
atgcaacggagattggtgcagcagtggtctgtcgcagtgtttctgctgagttatgctgtgccttcgtgtggtcgatctgtcgagggactgtcaagaaggctgaaacgggcagtatctgaacaccagctgctgcatgacaagggaaaatctatccaggacttgaggaggagattctttctgcaccatctaatagctgagatacataccgccgaaatccgggcaacgtctgaggtgtcgcccaacagcaaacccagccctaacaccaagaatcatcccgtccgctttggctcagacgacgaaggtaggtaccttacacaggagaccaacaaggtcgaaacctacaaagagcaacctttaaagactccaggaaaaaaaaaaaagggcaagcctggtaaaaggaaggagcaggaaaagaaaaagaggcgcacaaggtcagcctggttagactctggcgtgaccggttctggtctggagggggatcacttaagtgataccagtacaacgtctctcgaactcgactctaggaccgctttgctttggggcttgaaaaagaagaaagaaaacaacaggcggactcaccatatgcagttgatgatctccctgttcaagagccctctccttttgctctag

SEQ ID NO: 234090 - DNA, 534 bp, synthetic construct
  misc_feature 1..534: note = Description of Artificial Sequence: Synthetic coding sequence
  source 1..534: mol_type = other DNA
atgcaaaggcgactggtgcagcaatggagcgtagcagtgttcctcttgtcttatgctgtcccaagctgtggaagaagtgtggaaggactgtcccgccgactgaagcgcgcagtgtcagagcatcagctgcttcatgataagggcaagagcatccaggatctccggagacgctttttccttcaccaccttatcgccgagatccacacagccgaaattcgggcaacatctgaggtttctcccaactccaaaccttccccaaatactaagaatcatcccgtccggtttggcagcgacgatgagggacgatatctcacccaggagacaaataaggtggagacatacaaggagcagccccttaaaaccccaggtaaaaagaaaaaaggaaagccagggaaacgaaaagaacaagaaaagaagaagagacgtaccaggagtgcatggttggattctggtgtcacaggatctggccttgagggtgaccacctttccgacactagtacgacaagtcttgagctcgattccagacgacactag

SEQ ID NO: 234091 - DNA, 519 bp, synthetic construct
  misc_feature 1..519: note = Description of Artificial Sequence: Synthetic coding sequence
  source 1..519: mol_type = other DNA
atgcaaaggcggttggtccagcaatggtcagtggccgtttttctgctgagctacgccgtcccgagttgcggaaggagcgttgaagggctgagcaggcgattgaagcgcgctgtgagcgagcaccaactgctgcacgataaaggaaagtccatacaggatctgcggcgacgctttttcctgcaccacctgattgccgaaatccacactgccgagatcagagccacgtcggaagtctccccaaacagtaaaccctcacccaacactaaaaatcaccccgtgaggtttggctcagacgacgaaggaagatatctgactcaagagacaaataaggtagagacttacaaggaacagccccttaagacgcccggaaagaagaagaaagggaaaccaggtaaaagaaaggagcaggagaaaaagaagagacggactagaagtgcttggctggactctggcgtgaccggctctggacttgaaggagatcacctttcagataccagcacgacaagtctcgagctgtag

SEQ ID NO: 234092 - DNA, 534 bp, synthetic construct
  misc_feature 1..534: note = Description of Artificial Sequence: Synthetic coding sequence
  source 1..534: mol_type = other DNA
atgcagagacgtctggttcaacagtggtctgtcgctgtcttcctgctaagctacgctgttccttcgtgtggtcgaagtgttgagggactgtctcgaagactgaaacgtgccgtatcagaacaccagctgctgcacgataagggcaagagcatccaggatcttagaaggaggttcttcctgcatcacctcatcgcagagatccatactgctgagattcgcgcaacatcagaggtctcccccaattctaaacccagccctaacacaaagaaccaccctgtgcgttttggctcagatgacgagggaagatacctgacccaggaaactaataaggtggagacctataaggaacagcccctgaaaacgccaggcaaaaaaaaaaaagggaagccgggaaaaagaaaggagcaggagaaaaaaaaacgcaggaccagatctgcttggctggatagcggagtcacaggctccggtcttgagggggaccatctgagcgacacttctactacaagtctggaattggactcacgcagacactag

SEQ ID NO: 234093 - DNA, 891 bp, synthetic construct
  misc_feature 1..891: note = Description of Artificial Sequence: Synthetic coding sequence
  source 1..891: mol_type = other DNA
atggtcgccgagaaagaaactctgtcactcaataaatgtcccgataaaatgccaaaacggactaaactcctggcacagcaaccacttcctgtgcatcaacctcatagcctggtgtctgagggatttactgtcaaagccatgatgaaaaactccgtagtaaggggaccacccgcagccggtgccttcaaggagcgcccaaccaaacccactgcatttagaaagttctacgagcggggtgattttcctatcgccctagagcacgactccaaggggaataaaattgcatggaaggtcgaaatcgagaagctggattatcatcactacctacctttgttcttcgacgggctctgcgaaatgaccttcccgtacgagtttttcgctaggcaaggcatacacgacatgctggagcacgggggaaataaaatcttgccagtgcttccccagctgattattcctatcaaaaatgctctcaacctgagaaatcggcaggtcatttgtgtcacactgaaggtgctgcaacatctggtggtgagcgcagaaatggttgggaaagcgcttgtgccttactatcggcagatattgcccgtcctgaatatctttaaaaacatgaacggaagttatagcctcccacgcctagagtgctcaggcgcaataatggccagatgcaacttagaccatttggggtcatctgacccacctacaagcgccagccaagtggctgaaatcattgtgaattccggcgatggcatcgactactctcaacagaagcgcgaaaatattggggatctaattcaagagactctggaagccttcgaacgctacgggggagagaatgcttttattaacataaaatatgtcgtgcccacgtacgagtcttgtctgctgaactag

SEQ ID NO: 234094 - DNA, 774 bp, synthetic construct
  misc_feature 1..774: note = Description of Artificial Sequence: Synthetic coding sequence
  source 1..774: mol_type = other DNA
atggttgccgagaaagagaccctcagtttaaacaagtgtcccgataagatgcctaaacggactaaactgctggcacaacagccccttcctgtacaccagcctcactccctggtttccgaaggtttcactgtaaaggccatgatgaaaaactcggtggtgcgaggccctcctgctgccggagcattcaaggagcgcccaacgaaaccaactgcctttagaaagttttatgagagaggtgattttcccatcgccttggaacacgactccaagggcaacaagatcgcttggaaggtggagatcgagaagttggactatcatcactatctgcccctgtttttcgacggactgtgtgaaatgacattcccgtatgagttcttcgctcgccagggcattcacgacatgttggagcacggtggaaacaagattctgcctgttttgccccaactgatcattcccatcaaaaacgctcttaacttgcggaaccgtcaagtgatttgcgtgacattgaaggtccttcaacacctcgtagtaagcgctgagatggtaggcaaggctctggtgccctattataggcagattctacccgtattaaacatttttaagaatatgaacgtgaactccggtgacggtatcgactactcccagcagaagagagaaaatataggtgatctgattcaggagacactggaagcctttgaacgttacggcggagagaatgcatttattaacatcaagtatgtcgttccgacatacgagtcttgcctgctgaactag

SEQ ID NO: 234095 - DNA, 774 bp, synthetic construct
  misc_feature 1..774: note = Description of Artificial Sequence: Synthetic coding sequence
  source 1..774: mol_type = other DNA
atggtcgccgagaaggagaccttaagtctgaacaaatgccctgacaagatgcccaaacgcaccaagctactggctcagcaaccactgcctgttcaccagcctcacagcttagtgtctgaagggttcaccgtgaaggctatgatgaagaatagtgtggtgcgtggtcctccagcggcaggtgccttcaaggaaagaccaaccaagcctacagcattccggaaattctacgagcggggtgatttccccattgccttagagcacgacagcaagggcaacaaaattgcctggaaagtggaaatagagaaactggattaccatcattacctacccttgttcttcgacggcctctgtgagatgacttttccttatgaatttttcgccagacagggcattcacgatatgctggagcacggcggtaacaagattctgccggtgctgcctcagctgataattcccattaagaacgccttgaacttgagaaatcggcaagttatttgtgtgacattaaaggttcttcagcatttagtcgtgtccgctgagatggtgggcaaagccttggtaccttattatcgccagatcttgccagtgctgaatattttcaagaacatgaacgtcaatagcggcgacggcatagactactcgcagcaaaagcgggaaaacataggtgaccttattcaagagacactggaagcttttgaacggtatggcggagagaacgctttcatcaacatcaagtatgtagtgcccacctacgaatcatgcttgctcaactag

SEQ ID NO: 234096 - DNA, 825 bp, synthetic construct
  misc_feature 1..825: note = Description of Artificial Sequence: Synthetic coding sequence
  source 1..825: mol_type = other DNA
atgagcggggagtgtcagagcccccattgtcctggcacatccgcagagttcttctttaaatgcggggctcaccctacatccgacaaagagacatctgttgcattgcatctcatagctactaacagcaggaatatcacatgcatcacttgtaccgatgtgagaagccctgttctggtttttcagtgtaatagtaggcacgtgatttgccttgattgcttccatctgtattgcgtgacacgtctgaatgaccgacagtttgttcatgatccccagctcggctacagcttaccttgcgtagccggttgtcctaattcactcataaaagaacttcaccactttcgaatcctgggcgaggagcagtacaacaggtatcagcagtacggagccgaggagtgcgtgctgcagatggggggtgttctctgccctagacccggatgcggagccggtctcctccccgaacccgaccagagaaaagttacctgcgaagggggtaacggacttggttgtggcttcgccttctgcagggagtgtaaagaggcatatcacgagggcgagtgcagcgccgtgtttgaggctagtgggacgacaacacaggcctatcgagtcgatgaaagggccgctgaacaagcccgttgggaagcagcttctaaagagaccataaaaaaaacaaccaagccttgtccacggtgtcatgtgcctgtagagaaaaacgggggttgcatgcacatgaagtgccctcagcctcagtgccggcttgaatggtgctggaactgcggatgcgagtggaatcgcgtttgtatgggagaccattggtttgacgtgtag

SEQ ID NO: 234097 - DNA, 1107 bp, synthetic construct
  misc_feature 1..1107: note = Description of Artificial Sequence: Synthetic coding sequence
  source 1..1107: mol_type = other DNA
atgattgtgtttgtcagattcaactccagccatgggttccctgttgaagttgactcggatacatccatttttcagcttaaagaagtggttgccaagaggcagggggtgccagcagatcagctgcgagtgatcttcgctggcaaggaactccgaaacgattggaccgttcagaactgcgacctggaccagcagtccatcgtccatatcgtgcagcggccatggcgaaagggtcaggaaatgaacgcgactgggggtgacgaccctcgcaatgctgcgggtggatgtgaaagagagcctcaatctctcacgagggtcgacctgtcttcttcggttctgccgggagactccgtgggtctcgcggttatactacacaccgactcccgtaaagactctccacccgcaggatcgcccgcaggacgctccatatataattctttctatgtttattgtaaggggccatgccagagagtgcagccaggcaaactgcgggtgcagtgttcaacttgtcggcaagctactctgacacttacgcaagggccaagctgctgggatgatgtactaatcccgaatagaatgtcaggcgaatgccaatcaccccattgtccgggaacgagcgccgaatttttttttaaatgcggtgcccacccaaccagcgataaggaaaccagtgtggctctgcatctcatagccaccaactccagaaacatcacttgtataacgtgtactgacgttaggtcccctgtgctagttttccaatgtaattctaggcacgtcatctgtctggattgctttcacttgtattgcgttacccgactcaatgaccgacagttcgttcatgatccccaactcgggtactcccttccatgcgtggcgggatgtcccaactctcttataaaagaactacaccacttcaggattcttggcgaggaacagtacaacaggtaccagcagtacggtgcagaagagtgcgttttgcaaatgggcggtgtgctctgtcccagacctgggtgtggggctggtcttttgcccgaacctgaccagaggaaggtaacatgcgaaggcggtaatggcctgggctgtggatacggccaacgtaggactaagtag

SEQ ID NO: 234098 - DNA, 825 bp, synthetic construct
  misc_feature 1..825: note = Description of Artificial Sequence: Synthetic coding sequence
  source 1..825: mol_type = other DNA
atgtctggggagtgccagtcaccccactgccctgggactagtgctgagttctttttcaagtgcggagcccaccccacaagcgataaagaaacttccgtggcacttcacctgatagccacgaattctcggaatatcacatgtattacctgcactgatgtgcgctctccagtgttggtatttcaatgtaattcgagacacgttatctgtttagactgttttcacctgtactgtgtgacacgtttgaacgatagacagtttgtacatgacccacaactggggtactccttgccttgtgtggccggatgccctaacagtttaatcaaggaactccatcattttaggattctgggagaggagcaatacaacaggtaccaacagtatggcgcagaggagtgcgtgctgcagatgggcggagtcttatgcccccgtcccggttgtggggctggcctccttccagagccagatcagagaaaagtgacctgcgaagggggtaatggcttgggttgtggttttgctttttgccgggaatgtaaggaggcttaccacgaaggtgagtgctcagctgtgttcgaagcctcgggaacgaccacacaggcttaccgagtggacgagcgggctgccgaacaggccaggtgggaggccgcaagcaaagaaacaataaaaaagaccactaagccatgccccaggtgtcacgtccctgttgaaaagaacggtggatgtatgcatatgaaatgcccgcagccccagtgcaggttggagtggtgttggaattgtggctgcgagtggaacagggtgtgtatgggggaccattggttcgacgtgtag

SEQ ID NO: 234099 - DNA, 657 bp, synthetic construct
  misc_feature 1..657: note = Description of Artificial Sequence: Synthetic coding sequence
  source 1..657: mol_type = other DNA
atgaacgcaaccggcggagatgatcccaggaacgcggctgggggttgtgagagggaaccccagagtctcaccagggttgacctgtcaagttctgtcctgccaggagattcagtgggcctcgccgtgatcctgcacacggattctcgcaaagacagtccacccgcagggagtcctgcaggacgatccatctacaatagcttctatgtgtactgtaaaggaccttgtcagcgagtccagcctggtaagctcagagtgcagtgttccacttgcagacaggctaccctgacgctgactcaagggcctagctgttgggatgacgttctcatacccaatcgcatgtctggagagtgccaaagcccccactgccctggaacgagtgccgaattctttttcaaatgtggcgctcaccctacaagtgacaaagaaacaagcgttgctctgcatctgatcgccactaacagtaggaacataacctgcataacgtgcaccgacgtccggtctcctgttctggtatttcagtgcaactcgagacatgtgatttgtttggattgctttcacctgtactgcgtgaccaggctgaacgaccgtcagtttgtgcacgatccccaactaggttatagcctaccttgcgttgtttctctgcttccatctcagtag

SEQ ID NO: 234100 - DNA, 951 bp, synthetic construct
  misc_feature 1..951: note = Description of Artificial Sequence: Synthetic coding sequence
  source 1..951: mol_type = other DNA
atgatagtattcgtgaggtttaattcatcgcacggattccccgtggaagttgacagcgacacatcgattttccaactgaaggaggtcgtcgctaaacgtcagggagtccctgccgatcaactgcgcgtgatcttcgctggtaaggaactgagaaacgattggacagtgcaagaattctttttcaaatgtggggcacacccaacttccgataaagagacctccgttgccctgcatcttattgctaccaattctcgcaatatcacttgcatcacttgcaccgacgtgcgcagcccggtgctagtattccagtgtaactctaggcacgtgatctgcctggattgttttcacctgtactgtgtgacacggctgaacgatcgccagttcgttcacgacccccagctgggctatagtctcccctgtgtggctgggtgtcctaatagcttgattaaggaattacaccacttccggattttgggcgaagagcagtacaatagataccagcagtacggcgcagaggagtgcgtgctccaaatgggaggtgtgctttgccccaggcctggatgtggggcaggactcttgcccgagccagatcagaggaaggtcacctgtgaaggtggcaacgggctaggatgcgggttcgctttctgccgggaatgcaaggaggcctaccatgagggcgagtgtagcgcagtttttgaggccagtggcactacaacacaagcgtacagagtcgatgagagggccgcagaacaggctcgctgggaagcggcaagtaaagagactatcaagaagacgaccaaaccgtgtcccagatgccatgttcccgttgagaaaaatgggggatgcatgcatatgaagtgtcctcaaccccagtgcaggttggagtggtgctggaattgcggctgcgagtggaacagggtttgcatgggagatcactggttcgatgtgtag

SEQ ID NO: 234101 - DNA, 1314 bp, synthetic construct
  misc_feature 1..1314: note = Description of Artificial Sequence: Synthetic coding sequence
  source 1..1314: mol_type = other DNA
atgatcgtctttgttcggttcaactcttcacacggtttccctgttgaggtcgattcagataccagcatttttcagctgaaagaagtcgtggccaagaggcagggcgtgccagccgaccaactgagggtgattttcgcagggaaggaattgaggaatgattggactgtccaaaactgcgatctggaccagcaaagcatcgtacatattgtgcaacgtccctggcgcaaaggacaggagatgaatgccaccggaggagacgatcctcgcaatgccgcagggggttgtgagagggagccccagtctctgacccgggtggacctcagttcgagtgtactgccgggtgactccgtgggacttgcggtaatcctgcacaccgactctcgtaaagattctccaccagctggcagccctgcgggacggtccatatacaactccttttatgtgtactgcaagggcccatgccaaagggtgcagccgggaaagctgcgggttcagtgttccacatgccgtcaggctacattgacactcacccaggaattcttttttaaatgtggagcccaccctacaagtgataaggagacttccgttgctctacatctcatagccactaactctagaaacattacttgcataacctgcaccgacgtccgtagcccagtcctcgtcttccagtgtaattctcgtcacgtgatctgtctggactgtttccatctgtattgcgtgacgcgtcttaatgaccggcagttcgtccacgatccacagctgggctactccctgccctgtgttgcagggtgtccaaattctctgataaaagaactgcatcactttaggatccttggtgaggaacagtacaacagataccagcagtacggcgctgaagagtgcgtgctccagatgggcggagtcctgtgtccgaggccgggatgtggcgcaggactgctgcctgagccggatcaacgtaaggtgacatgcgaaggtggcaacggcctagggtgtgggtttgccttttgtagagaatgcaaagaagcctatcatgaaggagagtgcagcgcagtgttcgaggcaagtggcaccacaacacaagcttatcgcgttgatgagagggcagccgagcaggcaagatgggaagctgcctcaaaagaaacgatcaagaagaccaccaagccatgtccaagatgccacgttccggtagagaaaaatgggggttgcatgcatatgaagtgccctcagccacaatgccgattggaatggtgttggaattgcgggtgtgagtggaacagagtgtgcatgggagaccattggtttgatgtctag

SEQ ID NO: 234102 - DNA, 1398 bp, synthetic construct
  misc_feature 1..1398: note = Description of Artificial Sequence: Synthetic coding sequence
  source 1..1398: mol_type = other DNA
atgattgtgtttgtgagatttaattcctcgcacggtttccctgtggaggttgatagcgatacatccatttttcagctgaaagaggtcgtggccaagaggcagggtgtgcctgccgatcaactaagggtcatcttcgcaggtaaggagctacgcaatgactggactgtgcagaattgcgacttagaccagcaatcaattgtccatatcgtgcagcgcccatggagaaagggacaggaaatgaacgctaccgggggagatgacccacgcaacgcagccggtggctgtgagcgcgagcctcagtctctgacccgtgtggacctgtcaagctccgtactgccaggggacagtgtcggtttagctgttattctccacactgattcccgcaaggacagcccccctgcagggtctcccgcaggtagatccatctacaacagcttctatgtgtattgtaagggcccatgccagcgcgtgcagccagggaagctaagagtccagtgcagcacgtgcagacaggcgacactcacactgacacaaggccctagttgttgggacgacgtgttgatccccaaccgaatgagcggcgagtgtcaaagccctcactgtcctggcacttctgcagagtttttctttaagtgtggtgcccacccaaccagcgataaggagacctcagtagcactgcacctcatcgctaccaactccaggaatattacctgcattacctgcacggatgtcagaagtcctgtattagtcttccaatgcaacagccggcatgttatctgtctggactgttttcacctgtattgtgtgaccagactgaatgatcgccagtttgtgcacgatccacagctagggtactcactgccgtgcgttgccggttgccccaacagcctcattaaagagcttcaccacttccgcatcttaggggaggaacagtacaaccgctatcagcagtatggagcggaagaatgtgttctgcagatggggggagtcctgtgccccaggcctgggtgtggggctggcctgctccctgaacccgaccagagaaaagtgacttgcgagggaggcaatggtctgggatgcggatttgctttttgtagagaatgtaaagaagcttaccacgagggagagtgttcggcggtgttcgaggccagcgggactactactcaggcttatcgggttgatgaacgggcagctgaacaggccaggtgggaggctgcaagtaaggaaaccattaagaagaccaccaaaccatgcccgagatgccatgtcccagttgaaaagaacgggggatgtatgcatatgaagtgtccacaaccccagtgtaggctggagtggtgttggaactgtggctgcgagtggaatcgagtttgcatgggcgatcattggttcgatgtctag

SEQ ID NO: 234103 - DNA, 612 bp, synthetic construct
  misc_feature 1..612: note = Description of Artificial Sequence: Synthetic coding sequence
  source 1..612: mol_type = other DNA
atgagcggcgagtgtcagtccccccactgccccggaacctccgccgagttcttttttaaatgcggggctcatcctaccagcgataaggaaacttccgtggctctccacctcattgctaccaattcacggaacataacctgtattacatgtacggacgtgaggagccccgttctggtctttcagtgtaactcgcgccacgttatctgcctcgactgctttcacctgtactgtgtaaccaggctaaacgaccgccaattcgtccacgaccctcagctaggatattcgctcccgtgcgtggcgggttgtcccaacagcctgatcaaagagctgcaccattttcgcatcctgggcgaggaacagtataatagataccagcagtatggggcagaagaatgcgtcctgcagatgggaggcgttctttgcccaagacccggttgcggggctgggctcttgcctgagccagatcagcgtaaggtcacatgtgagggcggaaatgggctcggctgtgggtttgccttttgcagggagtgtaaggaggcctaccacgagggcgaatgtagcgccgtgtttgaggcgagcgggacaactacccagcatagcggctgcacatag

SEQ ID NO: 234104 - DNA, 429 bp, synthetic construct
  misc_feature 1..429: note = Description of Artificial Sequence: Synthetic coding sequence
  source 1..429: mol_type = other DNA
tcggtgtttgtcaggttcaactcgtcacacggatttcctgtggaggtggacagtgacaccagtatctttcagttaaaggaggtggtagctaaacgccagggtgtccccgctgaccagctgagggtgattttcgcagggaaggaactgagaaacgactggaccgttcagaattgcgaccttgaccagcagtccatcgttcacattgtacagcgaccttggcgcaagggccaggaaatgaatgctactgggggagacgaccctcgcaatgctgccggaggttgtgaacgtgaaccgcagtcgctgactcgcgtcgatctttccagtagcgttttgcccggtgactcggtcggactcgctgtcatcttacatactgattcacggaaagacagcccacccgctggttcacccggaaattgcctgcatgggtag

SEQ ID NO: 234105 - DNA, 429 bp, synthetic construct
  misc_feature 1..429: note = Description of Artificial Sequence: Synthetic coding sequence
  source 1..429: mol_type = other DNA
atggctgcagtggttgctgccaccgctctgaaaggaaggggggctcggaatgctcgggttctgagagggattctagctggcgctacggctaataaagctagccataatagaactcgcgcactccagtctcactcatctccggagggtaaggaggagcccgagccgctgtcacctgaactggagtatatcccacgtaaacggggaaaaaatcccatgaaggccgtagggctggcgtgggccatcggattcccatgcgggatattgctgttcatattgacgaaaagggaggtggataaggatcgcgtgaagcagatgaaggcgcgacagaatatgcggctgtctaatacgggcgagtatgaaagccagagattcagagcatcatcacagtcggcaccaagtccagacgtgggctctggcgttcagacctag

SEQ ID NO: 234106 - DNA, 1086 bp, synthetic construct
  misc_feature 1..1086: note = Description of Artificial Sequence: Synthetic coding sequence
  source 1..1086: mol_type = other DNA
atggcttggcaggggtggcctgctgcctggcagtgggtggccggatgttggctcctcctggtcctggtgctggtgctcctggtgtccccaagaggctgcagagccaggcgcggactgagaggtttactgatggcccacagccagcgtctgttatttaggatagggtactcgctgtatacgaggacctggctgggataccttttctatcgccaacaactgcgccgtgctagaaaccgctatcctaaaggccactctaagacacagccgcgtctctttaatggcgtgaaagtgctgccaatcccagtgctgtcagataactacagttacctgatcattgatacacaggctcagctcgccgtcgctgtagacccgtccgaccctagggctgtacaagcttccatagaaaaagagggcgttaccctggttgccattctctgcacccataaacactgggaccatagcgggggtaatcgagacctctcccgacgtcacagagattgccgcgtgtacggatctcctcaagatgggattccctatttgacacatcctctctgccatcaggatgtcgtgagcgtgggccgtttgcaaattcgggcactggccactcctggacatacccaaggacacctggtgtatctgcttgacggcgagccatataaagggccttcttgcctctttagtggagacctgctgtttctaagcggctgtgggcgaaccttcgagggaaacgcagaaactatgctttcttcactagacaccgtgctcgggctgggcgatgataccttgctgtggcccggtcacgagtacgctgaggagaacctgggattcgctggagtagtggagcccgagaacctagctcgcgaacggaaaatgcagtgggtccagcgccagaggctagagcgcaagggaacctgcccttcaacccttggggaggaaaggtcttacaatccgttcctccggacgcattgcctggcactgcaggaagctttaggccctggccctggtcctaccggcgacgatgattacagcagagcccaattgttggaggaactgaggagactcaaggacatgcacaagagcaagtag

SEQ ID NO: 234107 - DNA, 1158 bp, synthetic construct
  misc_feature 1..1158: note = Description of Artificial Sequence: Synthetic coding sequence
  source 1..1158: mol_type = other DNA
atggctgcagtggtcgcagcaacagccttgaagggcagaggagccagaaacgccagggttttgagaggcatcctggccggagccactgccaataaagctagccacaatcgtacccgggctcttcaaagccactcatccccggaaggcaaagaggagccagaacctctgtctcctgagctggagtacataccacgcaagcgcggaaagaatccaatgaaggcagtgggcctggcgtggtactccttatatacacgtacttggctgggataccttttttacaggcaacagctgcggagagcaaggaaccgctatcccaagggtcattcaaaaacacagccgcgattatttaatggcgtaaaagtcttgccaattcccgttctctctgacaattatagctatctgatcattgatacacaggcacagctcgccgtggccgtggatccatcagacccccgagccgttcaggcgtccatagagaaggaaggggtgactctggtggctatcctgtgcactcacaagcattgggatcactccggtggcaaccgcgacctttctaggaggcacagagactgtcgggtgtatggatcacctcaggacggcattccttatctcacgcacccactgtgtcatcaggatgtggtgtctgtcggcaggctccagattcgggcactcgccacgcccggtcatactcagggtcatctcgtctatttgttggatggagagccttataagggcccttcctgcctcttttctggtgatttgttgtttctgtcggggtgcggtcggacatttgaaggcaacgcagagacaatgctttccagtctggataccgttctgggcctcggagacgataccctgctatggccaggtcacgaatacgccgaggaaaacctggggtttgctggtgtcgttgagccagaaaaccttgccagagaacgaaagatgcagtgggtgcagaggcagcgacttgagcgcaaaggcacatgccctagtacactgggcgaagaaaggagctacaacccctttctgaggacgcattgtctggccttacaggaggctctagggccaggaccaggaccaactggcgacgatgattacagcagggcgcaactgctggaagagctccgacggctcaaagacatgcataagtccaaatag

SEQ ID NO: 234108 - DNA, 1455 bp, synthetic construct
  misc_feature 1..1455: note = Description of Artificial Sequence: Synthetic coding sequence
  source 1..1455: mol_type = other DNA
atggcagctggcggagaccacggctcacctgactcatatcggtcccctctggcctcccgctacgccagccccgaaatgtgtttcgtgttcagtgacaggtacaaattccgcacctggcgccaactttggttatggttggcagaagccgagcagacactcggcctgcctatcaccgacgagcaaattcaggaaatgaaatcaaatctcgagaacatcgacttcaaaatggcagccgaagaagaaaaaaggctgagacatgacgtgatggctcatgtgcacacattcggacactgttgcccaaaagcagcagggattatccatttaggcgctacttcctgttacgtaggcgacaatacagatctgattatcctgcgcaacgccttagacttgctgctgccaaagcttgccagagttatttcccgtctcgcagattttgcaaaagagcgtgctagcctcccaactctgggcttcactcacttccaacccgctcaactgactactgtgggaaagcgctgctgtttgtggatccaggacctgtgcatggaccttcagaaccttaagcgcgtgcgggacgatctcagatttcgcggtgttaaaggtacaaccgggacgcaggcctcttttcttcagctgtttgagggggacgatcacaaagtggagcaactggacaagatggtgacagagaaggctggcttcaagcgggctttcatcatcacaggccaaacatatacccgtaaagtggacattgaggtcctgtctgtcctggcatccctgggcgcttcagtccacaaaatatgcacagacattcgattgctcgcgaatcttaaagagatggaagaaccattcgaaaaacagcagattggatcctcagccatgccttataagaggaatcccatgcggtccgagcggtgttgttccctggccagacacttaatgacactggttatggatccactgcaaactgcttccgtgcaatggtttgaacggacactggatgactctgccaataggcgcatctgcctggcagaagcctttctaacagctgatacaatcctgaacactttacaaaatatcagcgagggccttgtggtatatccaaaagtaattgagcgtcgtatacggcaggaattgccctttatggcaacagaaaacataataatggcgatggtgaaggccggaggcagtcggcaggattgccatgaaaagattagggtcctgagccagcaggcagcctccgtagtaaaacaggaaggaggtgacaatgatctcatcgagcggatccaggtcgacgcttatttctccccaattcattcccagttagaccatttgcttgatccatcttcatttacgggcagagcatcccagcaggtccagcggttcctggaggaggaggtctatcccctgctcaagccttacgagtccgtcatgaaagtgaaggctgagctgtgtctctag

SEQ ID NO: 234109 - DNA, 237 bp, synthetic construct
  misc_feature 1..237: note = Description of Artificial Sequence: Synthetic coding sequence
  source 1..237: mol_type = other DNA
atggtgggcctgaagaagaagtcagccgatgatgttaagaaagtgttccacatgcttgacaaagacaagtccgggtttatcgaggaagatgaacttggttttattctgaagggattctctcccgacgctcgagacctgtctgccaaggagacaaagatgcttatggccgcaggagataaggacggagatggcaaaatcggagttgacgagttttccactctcgtggccgagagctag

SEQ ID NO: 234110 - DNA, 333 bp, synthetic construct
  misc_feature 1..333: note = Description of Artificial Sequence: Synthetic coding sequence
  source 1..333: mol_type = other DNA
atgtcgatgaccgacctcctcaacgctgaagacattaaaaaagccgtgggagcgttcagtgccaccgattcttttgatcacaagaagttctttcagatggtggggttgaagaaaaagagcgcggatgatgtaaaaaaggtatttcacatgttggacaaagataaaagtggctttatcgaggaggacgagttgggcttcatcctgaagggtttctccccagacgctcgggatctaagcgctaaggaaacaaaaatgcttatggccgcaggtgacaaggatggggatggaaagattggagtcgacgaattctctactctggtggcagaatcttag

SEQ ID NO: 234111 - DNA, 306 bp, synthetic construct
  misc_feature 1..306: note = Description of Artificial Sequence: Synthetic coding sequence
  source 1..306: mol_type = other DNA
atgtctatgaccgatctgcttaatgccgaggatatcaagaaggcagtgggagcattctcagctactgattcattcgaccataagaagttttttcaaatggtgggcttgaaaaaaaaatccgcggacgatgtgaaaaaagttttccacatgctggataaggacaagagcgggtttattgaggaggatgaattggggttcatcctgaaagggttttcacctgatgccagagacctcagtgccaaggagactaagatgctcatggctgctggcgataaggacggagacggtaagattggggtggactag

SEQ ID NO: 234112 - DNA, 984 bp, synthetic construct
  misc_feature 1..984: note = Description of Artificial Sequence: Synthetic coding sequence
  source 1..984: mol_type = other DNA
atgtccgatctgcaggaggaaggaaaaaacgcgataaatagtccgatgagccccgctctggtcgatgtgcacccggaggatacccaactcgaagaaaacgaagagaggaccatgattgatcccacctccaaggaggatcctaaattcaaggagttagtgaaggtactgctggactggatcaacgacgtgcttgttgaagagcgtattatcgtgaagcagctggaagaagacctttacgatggccaggtccttcaaaaactcctggaaaaactcgctggttgcaagctcaatgtggctgaggtgacacaatctgagatcgggcagaagcaaaagctccaaacagtactcgaggcggtgcatgatctgctccgccctagagggtgggctctaaggtggtcggtggatagcatccatgggaaaaatcttgttgctatactgcacctacttgtgtctttagccatgcactttagggcgccaattcggctgccagaacatgtgaccgtccaagtggtggtggttcgcaagcgggaaggactgcttcattcatcccacatttcagaagagctgaccactacaactgaaatgatgatggggaggtttgaacgtgacgctttcgataccctctttgaccacgccccagacaagctttcagtggtaaagaagtccctgattacattcgtgaacaagcacctgaataagctgaatctggaggtcacggaattggaaacccaatttgccgatggggtgtacctcgtgctcctgatgggcttgctggaggattacttcgtgccgctccaccacttctacctgactcccgaatcatttgatcagaaggtgcataatgtgtctttcgcctttgagcttatgttagacggaggattgaaaaaacccaaggctcggccagaggatgtcgtcaatctagatttaaaaagtacgctgcgggttctctacaacctattcaccaagtacaaaaatgtggaatag

SEQ ID NO: 234113 - DNA, 1239 bp, synthetic construct
  misc_feature 1..1239: note = Description of Artificial Sequence: Synthetic coding sequence
  source 1..1239: mol_type = other DNA
atgctgggaatcataccgcttcccttcgggaagccacagccccagtctcggaggcggcctctacgccctcccagtgcctcaagtgcaagtagaccagctcgcggaagcctccggcgagccatggctacttccccccagaagtccccctcagtccctaaatctcccaccccaaagtccccaccttcccggaagaaggatgattcctttctcggcaaactgggcggaacgttagcgaggagaaagaaagcaaaggaagtgtcagagctccaggaggagggcatgaatgctatcaacctgcccttatcccctattccattcgaactcgacccggaggatacaatgttggaagagaacgaagtaaggactatggtggatcccaattcccgatctgaccctaaactgcaagagctcatgaaggtgctgatcgattggatcaatgacgtgctggtgggtgaaaggatcattgtgaaggatctcgcagaggacctatacgacggccaagttctccagaaattgtttgaaaaactggagtcagaaaagctgaacgtcgctgaggtgacacagagcgaaatcgcgcagaaacagaagctgcagactgttttggagaagattaacgagacgctgaaactcccccctcgtagcattaaatggaatgtcgatagcgtccacgcgaagtcactggtggccatcttgcaccttttggtcgccctatcgcagtatttcagagcacctatccggttgcctgaccacgtcagcatccaagtcgtcgtcgtacaaaagcgggagggaatcctccagtccagacagatacaagaggaaatcactggcaacactgaggcccttagtggtcgccacgagcgagacgcctttgacacactgtttgaccacgcccctgataaacttaacgtagtgaaaaagacgctgattacatttgtgaacaagcacttgaacaagctcaaccttgaagtgaccgaattggagactcagtttgctgatggggtgtatctggtgctcctgatgggccttctagagggatacttcgtccccctacacagtttttttctgacccctgactccttcgaacagaaagtccttaatgtcagtttcgcttttgagcttatgcaggatggcggtctggagaaacccaaacccaggcctgaggacattgttaactgcgatctgaaatcaacccttcgtgtactatacaatctcttcacaaaatatcgcaacgttgagtag

SEQ ID NO: 234114 - DNA, 873 bp, synthetic construct
  misc_feature 1..873: note = Description of Artificial Sequence: Synthetic coding sequence
  source 1..873: mol_type = other DNA
atgaatgcgattaacctgccactttctccaattccatttgaattggaccccgaagacactatgctggaagagaatgaggtgcgtacaatggtggacccaaactctcggtccgatcccaagctgcaggagttaatgaaagtgttaatagactggatcaacgatgtccttgtcggcgagcgcattatcgtcaaggatctggctgaggacctgtatgatggacaggtgctgcagaagctgttcgaaaaactggaatcagaaaaactaaacgttgccgaggtaacccaaagcgaaattgcccagaagcaaaagctgcagaccgttctggagaagataaatgagacacttaagctgccccctcgctctatcaagtggaacgtggatagcgtccatgccaagagcttggttgctatcttacatctgctggtggctcttagtcagtactttcgtgctcctatccgcctgccagaccatgtgagcatccaggtggtggttgtgcagaagagggaagggattctgcaaagcaggcagatccaagaagagattacggggaatacagaggccctcagtggcaggcatgaaagagacgccttcgacacattgttcgaccacgcgccagacaaactgaacgtcgtgaagaaggtcggaaaaggctgtctcgggtggacagagggctcagaaatgcagcagaatattgggaagacgcacccatgctcactgcgggctagctgccagaattggtggcatcatctgacatcggctcacactgggctgtcgccgcttccttctatgtacctgagtgttccacattggatgctgcatctaggtctcttcccgagcatctctatgaactccctctcgagtcatcccggatag

SEQ ID NO: 234115 - DNA, 1119 bp, synthetic construct
  misc_feature 1..1119: note = Description of Artificial Sequence: Synthetic coding sequence
  source 1..1119: mol_type = other DNA
atggccacatcaccacagaagagtccctctgtcccaaagagccccactcccaagagccctccatcccggaagaaggatgacagctttctgggaaaactcggagggacactggctcgcagaaagaaggcaaaagaggtttccgagctgcaggaggaagggatgaacgctatcaacctcccactaagccccatccccttcgaacttgacccagaagatactatgttggaagaaaacgaggtccgcactatggtggatcctaactcccgatctgatcccaagctccaggagctgatgaaagtcctcatcgactggatcaatgacgtgttggtcggagaacgaattattgtgaaagatctggccgaggacctgtacgatggacaggtcttacagaaactctttgaaaaactggaaagtgaaaagctcaacgtcgccgaggtgactcaatcggaaattgcccagaagcagaagctacagacagtgctggagaaaattaacgaaactctcaaactaccaccaaggtcaatcaagtggaacgtcgattcagtgcacgctaagagtctggttgcaatcctgcatttacttgtagcactgagtcagtacttccgggcaccaatccggctccccgaccacgtgtccattcaagttgtagttgtgcagaaaagagagggaatcctgcagtcccgccagattcaggaagagatcaccggtaacactgagtatgtgtctagccggcataagcgggacgccttcgacactctgtttgatcacgcgcctgacaaactgaacgttgtaaagaagaccctgatcacttttgttaacaaacacttgaataagctgaatcttgaggttactgagctcgaaactcagtttgcagatggcgtctatctggtccttctaatgggtttgttggagggctatttcgtgcctctgcattctttttttcttacacccgacagcttcgaacagaaagttctcaatgtgagtttcgcattcgaactgatgcaggatggtggcttggaaaagcctaaacctaggcctgaggacatcgtcaactgcgacctgaaatccactctgcgagtgctgtacaatttgtttacaaaatacagaaacgttgaatag

SEQ ID NO: 234116 - DNA, 1119 bp, synthetic construct
  misc_feature 1..1119: note = Description of Artificial Sequence: Synthetic coding sequence
  source 1..1119: mol_type = other DNA
atggctacctctccacaaaagagcccaagcgtacccaagtcaccgacacccaaaagtcctccttcgaggaagaaagatgatagcttcttgggaaagctcggcggtactctggcacgcagaaaaaaagctaaggaggtgagtgaattgcaggaagagggaatgaacgcgattaatttgcctttaagcccaatcccattcgaactcgatcccgaggatacaatgctggaggagaacgaggtccggaccatggtggatcccaatagccgctccgacccaaagctccaggaacttatgaaagtccttattgattggattaatgacgtgctagtgggggagcgcatcatcgtgaaggatctggcagaagatctgtacgacgggcaggttctgcagaagctctttgagaaactcgagtccgaaaagctaaacgtggcggaggttactcagagcgagatcgcacagaaacaaaaactgcagaccgtgctggaaaagatcaacgagaccctgaaactgccgccaaggagtattaaatggaacgttgacagtgtccatgccaagtcactcgtggccatcctccacctactggtggcactaagccagtacttccgggctccaattaggctacccgaccatgtatccatccaagtggtggtggtgcagaagcgggaaggaattctacagagtagacaaatccaggaagagattacaggaaacacagaagccctgtctggacgccacgagagagacgccttcgacactctgttcgaccatgcacctgacaagttaaatgtggtcaaaaaaacactgatcacatttgttaacaaacacctgaataagcttaacctcgaagttaccgaactcgagacccagtttgccgatggcgtatatctcgtccttctgatggggctactggaaggttacttcgttccactccactctttcttcctgacaccggattcttttgaacagaaggtgctgaatgtcagctttgccttcgagctcatgcaggacggcggactcgaaaagccaaagccacggccagaggacatagtgaactgtgatttgaagagtaccctgcgtgtcctgtataacctgttcaccaagtacaggaacgttgaatag

SEQ ID NO: 234117 - DNA, 1095 bp, synthetic construct
  misc_feature 1..1095: note = Description of Artificial Sequence: Synthetic coding sequence
  source 1..1095: mol_type = other DNA
atgagttctgcgccacggtctcccacacccagaccacggcgaatgaaaaaagatgagtcctttcttgggaaactcggcggaactcttgctcgcaaacgacgggcaagagaggtatctgacctccaggaagaggggaagaatgcaattaattcccccatgagcccagctctggtggacgtgcaccccgaagatacccagttggaggagaatgaagagaggaccatgatcgatccgacttctaaggaggatccgaaattcaaagagctagtgaaagtcctgctcgattggattaacgatgtgcttgtagaggaaagaatcattgtgaaacagctagaggaggatctatatgatggccaagtgctccagaagctactggagaaactagcgggttgtaagcttaacgtagccgaagtaacccagagtgagatcgggcaaaaacagaaattgcaaactgtcttggaggcagttcacgatctactcaggcccaggggatgggcccttagatggtctgtagatagtatacatggcaaaaacttggtggccattctgcatcttttggtgtccctcgccatgcacttcagggcccctatccgtctgcctgagcacgtgactgtgcaggtggtcgttgttagaaaacgggaaggcctactgcactcctcccatatcagtgaagagctgactactacgactgaaatgatgatgggccgatttgaacgagacgccttcgacaccctgtttgaccacgctcccgataagctatccgtcgtcaagaagagtctgattaccttcgtgaataagcacctcaacaaactcaacttggaggttaccgagttagagactcaattcgcagacggagtatacctcgtcctcctcatgggactactagaggactatttcgtgcctctgcaccacttttacctgactccggagagtttcgatcagaaggtgcacaatgtttcgttcgcattcgagctgatgcttgatggtggactaaagaaacctaaggcacggccagaagatgttgtgaatctcgatttgaagagcactttgcgggtactatataacctattcaccaagtacaaaaacgtggaatag

SEQ ID NO: 234118 - DNA, 1194 bp, synthetic construct
  misc_feature 1..1194: note = Description of Artificial Sequence: Synthetic coding sequence
  source 1..1194: mol_type = other DNA
atgcaccatgtgtttaaggaccatcagcgaggcgaaaaaagggggttcctgtcaccagagaataaaaattgccgacggctcgagctgcggaggggatgcagttgcagctggggcctatgcagtcaggcgcttatggcttctctcgccggtagtctgctccccggaagtgacagatccggcgtcgaaacctccgaatacgcccaaggcggtgtatcagatcttcaggaggaaggcaagaatgctatcaacagtccaatgagcccagccctagttgacgttcacccagaagatacacaacttgaggaaaatgaggagcgaacaatgatcgatccgaccagcaaggaggacccaaagttcaaagaattggtgaaggtcctgctcgactggatcaacgatgtattagtggaggagcggatcatcgtgaaacagctggaagaagacctatatgacgggcaggtgctccagaagttgctagaaaagctcgctgggtgtaaactgaatgtggctgaggtgacccagtccgaaatcggtcagaagcagaaactgcagacagtgcttgaggccgtgcatgacctccttagacccaggggctgggctctgagatggagcgtagatagtatccacggtaaaaaccttgtggccatactgcacctcctcgtgtcccttgcaatgcatttcagggcaccaataaggctcccagagcacgtgaccgtgcaggtcgtggtcgtgagaaaacgagaaggcctcctgcactctagtcatatatccgaggagcttacaactacaaccgaaatgatgatgggtagattcgagcgcgatgcctttgacaccctcttcgatcacgcaccagacaagctgtcggttgtgaaaaaaagcctgatcaccttcgtgaataaacacttgaataaactcaatctcgaagtgaccgagctcgagactcagttcgccgacggcgtgtatctggtcctgttgatgggactactggaggactacttcgtccccctgcaccatttctatctgacgcctgagtcgttcgaccagaaggtgcacaatgtaagtttcgcctttgagctgatgctggacggtggtcttaagaagcccaaggccaggcccgaggacgttgttaatctggacctgaagagtacactgagagtgctgtataacttgtttaccaaatacaagaacgtcgagtag

SEQ ID NO: 234119 - DNA, 996 bp, synthetic construct
  misc_feature 1..996: note = Description of Artificial Sequence: Synthetic coding sequence
  source 1..996: mol_type = other DNA
atggaaccagaatttctgtatgacttgcttcaacttcctaaaggggtagaaccacctgctgaggaggagttgtccaagggaggtaagaaaaagtatctgcctccaaccagcaggaaggaccctaaatttgaagagttacaaaaagttttgatggagtggattaatgcaaccctattgcctgagcatattgttgtgcgatccctcgaggaagatatgttcgatggactcattctgcaccacctcttccagagattagccgcactgaagttagaggcagaagacattgcacttactgcaacatcccaaaaacataagctaactgtggtgctcgaggcagttaatagatctttgcagctggaagagtggcaggcaaagtggtcagtcgagtccatctttaacaaagatctccttagcactcttcacctactcgtggctcttgcaaagcggttccagccggacctatccctcccaacaaatgtgcaagtggaagtgattaccattgagtccaccaaaagcggtctcaaaagcgaaaaattggtggaacagctaactgagtactccaccgacaaagacgagcctcccaaggacgtgttcgacgagttattcaagctagcacctgaaaaagtaaacgctgtcaaggaggctatcgtcaacttcgtgaatcagaagctcgatagactcggccttagtgtgcaaaatcttgacactcagtttgcggacggggtaatcctccttctcctgatcggccaattagaggggtttttcctgcatctgaaagagttctaccttacacctaactcgccagctgaaatgttacacaacgtgaccctggcgctcgagcttctgaaggacgagggattgctgtcatgtcctgtttcccccgaggacattgtgaacaaagacgctaagagcaccctcagggtgctatacggtctattctgcaaacatacccagaaggcacaccgcgaccgcaccccacatggcgcaccgaattag

SEQ ID NO: 234120 - DNA, 81 bp, synthetic construct
  misc_feature 1..81: note = Description of Artificial Sequence: Synthetic coding sequence
  source 1..81: mol_type = other DNA
atggagccagagttcctctatgatctgttacagctacccaagggcgttgagccacccgctgaggaagagctgagcaagtag

SEQ ID NO: 234121 - DNA, 93 bp, synthetic construct
  misc_feature 1..93: note = Description of Artificial Sequence: Synthetic coding sequence
  source 1..93: mol_type = other DNA
atggaacccgagttcctctatgacttgcttcagctgcccaaaggggttgagcctcccgcagaagaagagttatcgaagggagtctgtccatag

SEQ ID NO: 234122 - DNA, 996 bp, synthetic construct
  misc_feature 1..996: note = Description of Artificial Sequence: Synthetic coding sequence
  source 1..996: mol_type = other DNA
atggagccagagttcctatacgacttgctgcagctgcctaaaggggtggagcccccagccgaagaagaactgtcaaaagggggtaagaagaaatacctgcccccaacatcacgcaaggacccgaaattcgaagagctccagaaagtactgatggagtggattaatgctaccttgctcccggagcacattgttgttcgctctttagaagaggacatgtttgatgggctgattctgcaccacttgtttcagcgcctagccgctctgaagctggaggcagaggacattgccctgactgcaaccagtcagaagcataagctgaccgtggtgctggaagcagtgaatagatcactgcaactcgaagaatggcaggcgaagtggtccgtggaatcaattttcaacaaggacctgctgagtacactgcaccttcttgtagcccttgccaaaagatttcagcccgacctctctctaccaacaaatgttcaggtcgaagtgatcaccattgaaagcaccaaaagcggactgaagtcagaaaagttagtggagcaattgacagagtattctactgataaagacgagcctcccaaagacgtctttgatgaactgtttaaactggcccctgaaaaggtaaatgcagtgaaggaggcgatcgtcaacttcgttaaccagaaactggacagactgggactgtctgtgcagaaccttgatacgcagtttgccgatggggtgattctgcttctgcttattggacaattggagggattcttcttgcacctcaaggagttttatttgactcccaatagcccagccgaaatgttgcacaacgtcaccctcgcactggagcttttaaaggacgaagggctgctaagctgtcccgtgtcaccagaggatattgttaacaaggacgccaagagcaccctcagggtgctgtatggactgttttgcaaacacacccagaaagctcatcgcgatcggactccacacggcgctccaaactag

SEQ ID NO: 234123 - DNA, 996 bp, synthetic construct
  misc_feature 1..996: note = Description of Artificial Sequence: Synthetic coding sequence
  source 1..996: mol_type = other DNA
atggaacccgagttcctgtacgacttgctgcagctgccaaagggcgtggaacctcctgctgaagaagagctctcgaaagggggtaagaagaaatacctgcctcctacgtctcgtaaagatcccaaattcgaggaactgcagaaggtgctgatggagtggattaacgcgacactgctccctgagcacatagtggttcggtcccttgaggaagacatgttcgacgggctgattcttcaccatctttttcagcgactggcagctctcaagttggaggccgaagacattgcactaacagccacgtcccagaaacacaagctgacggtcgtgttggaagccgtcaataggagcctccaactggaggagtggcaggccaagtggtctgtggaatcgatcttcaacaaggatttgttgtcgactcttcatttgctggtcgcccttgccaagcggttccagcccgatctctctctcccaaccaatgtgcaggtggaagtcataacgatcgagagcaccaagtccggcctcaaaagtgagaagcttgttgaacagctaacagagtactcaaccgataaggatgagcccccaaaagatgttttcgacgagctatttaagttagccccagagaaagttaatgccgtgaaggaggctattgtcaattttgtgaaccaaaagttggatcgtttaggactgagcgtccagaatctcgatacacagtttgccgatggcgtgattctgttactcctgattgggcagctggagggtttttttctgcacttgaaggaattctacctgacaccgaattcgcctgcagaaatgctccacaatgttaccctggctctggagctgctgaaagacgaagggctacttagctgccctgtgtcccccgaagatattgtcaacaaagacgctaaatctacactccgggtactgtatggcctgttttgtaagcacacccaaaaggcgcacagggatcggactcctcatggtgcaccaaactag

SEQ ID NO: 234124 - DNA, 414 bp, synthetic construct
  misc_feature 1..414: note = Description of Artificial Sequence: Synthetic coding sequence
  source 1..414: mol_type = other DNA
atggtgcccgcaaaggagcaagttcctggaagatgtgactcgacacagcggtgttttcccggtccgtccaattggacaggggcaggaggcagggcaggaagtcagccgtttgtgggagacgggactctgggaactcccaacttttgttgggatcacaaggagaaaagagcagcagagtcgcaactgcaggcctgggaagctatggaaccggagttcctctatgatctgctacagttgcctaaaggagtagagccccctgccgaggaggagttgtctaagggtggcaaaaaaaagtacctcccgccaaccagtcgtaaagatcctaaatttgaggagcttcagaaacacacgtggccctcaccggtgactggcaccggggacacgatttgcggcttggcaaggaagacttggtag

SEQ ID NO: 234125 - DNA, 1083 bp, synthetic construct
  misc_feature 1..1083: note = Description of Artificial Sequence: Synthetic coding sequence
  source 1..1083: mol_type = other DNA
atggccgcagagagaggtgccggtcaacagcagagccaggagatgatggaagtcgatcgacgggtcgagtccgaagagagtggggatgaggagggcaagaagcatagctcgggaattgtagctgatttgtcagaacagtccctcaaggatggggaggagcgaggagaggaagacccagaagaggagcacgagctgcccgttgacatggagacgatcaatctcgacagagacgccgaggatgtggacctgaaccattaccggatcggaaagatcgagggctttgaggtactcaaaaaggtgaaaactctttgtctgagacagaatctgataaaatgcattgaaaatctcgaggagctgcaatcccttcgagagctcgatttatacgacaaccaaataaagaaaatcgagaatctcgaagctctgaccgagctggaaattttggatatctcttttaatctgcttaggaatatagaaggagtggataagctaacaaggctgaaaaagttattcttagtgaataacaagatctcaaagattgagaatctttcaaacctacaccagctgcagatgctggagttgggcagcaatcggatcagagctatcgagaacattgacacactgaccaacctggaatctctcttcctcggcaaaaataagattacaaagctccagaacctggacgcactgaccaatctgaccgtactgtccatgcagagcaaccggctgacaaagatcgagggtctgcagaatttagttaaccttcgcgaactgtacctgagccacaatggtattgaagtcatcgagggccttgagaataataataagctgactatgctggacatcgccagtaaccgcatcaagaagatcgagaacatcagccacctgacggaactacaggaattctggatgaatgacaacctcctggagagctggtccgatcttgatgaactcaagggggctaggagtctggagacagtgtatctggagcgaaatccactccagaaggatcctcagtataggaggaaggtcatgctcgctctaccaagcgtaagacagatagatgccacctttgttcgcttctag

SEQ ID NO: 234126 - DNA, 3993 bp, synthetic construct
  misc_feature 1..3993: note = Description of Artificial Sequence: Synthetic coding sequence
  source 1..3993: mol_type = other DNA
atggaagacggagggctgacagccttcgaagaagatcagaggtgtctgtcgcaaagtcttccgctaccagtgtctgcagagggacctgctgcacaaactaccgcagaacctagtaggagtttttctagcgcccaccgtcatctgtcgcgtcggaatgggttgagtcgcctttgccagagccggactgcactgtctgaagaccggtggtcctcttattgtctgtcttcccttgcagctcagaacatctgtacgtccaaacttcattgtcccgctgcgccagaacacaccgacccctcagaacctcgcggaagtgtgagctgctgttcccttctacggggtctgtcatcaggctggtctagtccactcttgccagccccagtttgtaatccaaacaaggctatcttcaccgtcgacgctaagactacagagatcctggtggctaacgacaaggcttgcggtctgctgggttattcaagtcaggatttgatcgggcaaaagttgacacagttctttttgcgtagcgacagcgatgtagtcgaggccttgagtgaggagcacatggaagcagatgggcacgcagccgtggtctttggaacagttgtcgatatcatcagcaggtccggagagaaaatccccgtgtcggtgtggatgaagcggatgaggcaagaacgcagactgtgctgcgtcgtcgtccttgagcccgttgaaagagtgagcacatgggtggcctttcagtcagatgggaccgtcacctcctgcgactcattattcgcacacctgcacggatatgtatccggagaagatgtggccggacagcatattaccgacctgatcccctccgttcagctcccaccctccggccagcacattccaaagaacctgaaaattcagagatcggtaggccgagcacgagacggcacaaccttccctctctcactcaagctgaagtcacagccttccagcgaagaagcgacaactggcgaggcagcccctgtcagcgggtaccgcgctagcgtgtgggttttttgtactataagcgggttaatcacactgctgccagatggcacgattcatggcattaaccattccttcgccctgacactttttggttacggcaagacagagctgttaggaaagaacattacattccttatccctggtttttattcctacatggatttagcttacaattcttcgcttcagttgccagacctggcgagctgtcttgatgtcggcaatgagtccgggtgcggagagcgaactctcgatccctggcaaggacaagatcccgcagagggcggacaggatccgagaattaacgtagttctggccggaggccacgtcgttcccagggacgaaattcggaagctcatggaatcccaggacatattcacaggcacccagactgaacttatcgctggaggtcagctgctgtcttgtctgtctcctcaaccagcccctggtgtagataatgtcccagagggctcgcttcccgtgcacggagaacaggctctgccaaaagatcaacagatcaccgcgctgggcagggaagaaccagtggctattgagtcacctggacaggacctgcttggcgagtcaagaagcgaacctgtggatgtgaagcctttcgctagctgcgaagacagtgaggctcctgtaccagcggaagacggcggttccgacgcaggaatgtgtggactttgccagaaggcccaactcgaacggatgggggtttccggaccatcagggagtgacctctgggccggagccgcagtggccaagcctcaggcaaaaggacagctcgccggtggttcgctgttgatgcactgcccctgttatggttcagaatggggattgtggtggaggtctcaggacttggctcctagccccagcggcatggctggcctcagttttggtacccccacgctcgacgagccatggctgggggttgaaaacgatagagaggaactccaaacctgcttaataaaggaacagctgtcacagttgtctcttgctggcgctctggacgttccccatgcagagcttgtccccacggagtgtcaggccgtaactgcgccagtcagctcgtgcgacctgggtggtagagacttatgcggcggatgtaccgggtcttcaagcgcttgttacgccctggcaaccgatctgcccggaggtcttgaggccgtcgaagctcaggaggttgatgttaacagtttttcttggaacctgaaggaactgttcttttccgaccagactgaccaaacatccagcaattgcagctgcgcgacctccgagttacgggaaactccgtcgtccctcgcggtgggcagtgatccagacgtgggctccctgcaagaacagggcagttgtgttctggatgacagggagctgctcctcttgaccggaacgtgcgttgatttagggcaagggaggcgctttcgggagtcttgtgtgggccacgatccaactgaaccgctggaagtctgtctggtgtcatcagaacattacgcagcctcagatagggagtctccgggacatgtcccctctaccctggacgcaggcccagaagacacatgcccatccgctgaagaaccacggctgaatgttcaagtgacatcaaccccagtcatcgtgatgcggggagccgctggactccagcgtgagatacaagaaggagcctactccggaagttgctaccatagggatggcttgaggctcagtattcagtttgaagtgagaagggtggagctccaaggcccaacccccctgttctgctgctggctggtgaaagatttgctgcactctcagagagacagcgctgcccgaaccagactctttttggcaagcctgccgggatcaactcattcaaccgctgctgagctgacgggcccaagtctggtcgaggttttgcgtgctcgcccatggttcgaagagccacccaaagctgtggagctcgaaggtctggccgcatgcgaaggggaatacagccagaagtacagcactatgtctcctctgggctccggcgctttcggttttgtctggacggcagtggacaaagagaagaacaaggaggtcgttgttaagttcattaaaaaagagaaggttctggaggactgttggatagaggaccccaagctgggaaaagtgaccctggaaatcgcgatactctcaagggtcgagcacgcgaatataataaaggtcctggatattttcgagaaccagggatttttccaactggtgatggagaagcacggcagcggtctggatctcttcgcgttcattgaccggcatcctcgcctggacgagcccctggccagctatatcttcaggcaagttagggccggtcagagcaggctcgtgtccgcagtgggctatttaaggttgaaggacattattcatagggatataaaggacgagaatatagttattgcagaggactttacgattaagctcatcgattttggaagcgccgcatacttggaacggggtaaactattctacacattctgcggtacgatcgagtactgcgcacccgaagtgttgatggggaacccttaccggggaccagaacttgaaatgtggtcactgggagtcaccctgtacactctcgtatttgaagaaaacccattctgtgaacttgaagagaccgttgaagccgctatccacccgccatacttggtgagcaaagaactgatgagcctagtctctggactgctccagcctgtccccgagagacgaactaccctggaaaagctggtcacggacccttgggttacacagccagtgaacctggctgattatacttgggaggaggtcttccgggtgaacaagcctgaaagcggagtgctttcagccgctagtctggaaatgggtaatcgctctctgagcgatgtggcccaagcccaggaattgtgtgggggaccagtcccaggagaagctccaaatggccagggttgccttcatcccggagatccccgacttctcacatcttag

SEQ ID NO: 234127 - DNA, 3972 bp, synthetic construct
  misc_feature 1..3972: note = Description of Artificial Sequence: Synthetic coding sequence
  source 1..3972: mol_type = other DNA
atggaagacgggggacttacagccttcgaagaggatcaaaggtgcctgagtcagtcgctccccttgcccgtgtccgctgaaggtcccgctgctcagaccaccgctgagccgtctcgtagcttctcaagtgcccacagacacctgagccgacgcaatggactgagtcgcctctgtcagtctcgcactgctttgagtgaggatcgctggagtagctattgcctctctagtctggccgcacagaatatatgcacctcaaaactacattgcccggctgcacccgaacatacagacccaagtgaaccacgaggttccgtgtcttgttgtagcctgctgagggggctgtcttcaggctggtcatccccactcttgccagcccctgtctgtaaccccaataaggcaattttcaccgtagacgccaagacaaccgagattctggtggctaatgacaaggcctgtggcctgctgggctattcttcacaggatctcattgggcagaaactgacgcaattcttcctgagaagcgacagcgacgtcgtcgaagcactctctgaagagcacatggaagctgacgggcacgctgcggtagtgtttggaacagtcgtcgacatcatctcgagatcaggagaaaagatccctgtcagcgtctggatgaagcggatgaggcaggaaaggagactttgctgcgtagttgttttggagcctgtggagagggtgtcaacatgggtggccttccagagtgacggcaccgtcacgtcttgcgacagtctgtttgcgcatttgcatggatacgtcagtggagaggacgtagccggacagcacatcacagacctgatcccttcggtccaactgcccccttcagggcaacacatccccaagaatttaaagatacagcggtccgtcggccgagcaagagacgggacgacatttcctctttcccttaaactgaagtcccagccgtcgagcgaagaggccacaactggagaagccgcaccagtttccggatatcgggcttcggtctgggttttctgtactatcagtggactgataaccctcctgcctgatggtaccattcatggaattaaccattcctttgccctgaccctcttcggatatgggaagacggagctgctcgggaaaaacatcacttttttgattcctggattctattcctacatggatctggcatacaactcctccctgcagcttcccgatttggcaagctgcctggacgtcggaaacgagtcgggttgtggtgagagaaccttagacccgtggcagggtcaggatccagctgagggcggacaggatccccgaataaatgtcgtcctggcaggcggacacgtcgtgccccgtgatgagattcggaaactgatggagagccaggatatatttaccggaacccagactgagctgatcgccggaggacagctcctgtcctgcctgtctccgcagccagcccctggggttgacaacgtgcccgaggggagtctgcccgttcacggggagcaggccctgcctaaagaccagcagatcaccgctttgggcagggaggagccagttgccatcgagagcccaggacaggacttgctaggcgagagccggtcagaacctgtggatgtgaaaccttttgccagttgtgaggatagcgaggccccagttccagcggaggacggcggatccgatgccggtatgtgcggcctgtgtcagaaagctcagctggagcggatgggtgtatccggacccagtggcagcgacctgtgggccggtgcggctgtggcaaagccccaggctaaggggcagttggcgggtgggtcactgttaatgcactgtccctgttacgggtccgaatggggactctggtggcgttcccaggatttggccccttcaccaagtgggatggccggtctgtccttcggcactccaacattggacgaaccctggttgggggtagaaaatgatcgggaggaacttcagacctgtttaatcaaagagcagctgagccaactttctctggccggtgccctcgatgtgccccatgctgagctggtgcccactgagtgccaagcagtaacagcgcctgtgtccagttgcgatctagggggacgggacttgtgcggcggatgtaccggaagctcttctgcctgctacgctttagcaacagacttacctggcggtctggaagccgtggaagcacaggaagttgacgtaaacagcttctcctggaacctcaaggagctattctttagcgatcagacagatcaaacaagcagcaactgtagttgtgccacgagcgaattgcgcgagaccccgagcagccttgctgtggggtcagatcccgacgttggatcgttacaggagcaaggatcttgcgtgttagatgaccgggaactgttgctgctgacgggaacttgcgtggatctggggcagggtagacggtttcgtgagtcctgtgtgggccatgatccaacagagcctttagaagtgtgcctagtttcctcagaacactatgctgcttcagatagggagtctccaggccatgttcctagtacccttgacgctggacctgaagacacctgcccgtccgcagaggagccccgactgaatgttcaggtgacctcgacacccgtcattgtcatgagaggcgcagcaggattgcagcgagaaatacaggagggagcatactccgggtcctgctaccacagggacgggttgcgcctttctatccagtttgaggtgcggagagtggagctacaaggcccaacacctctgttctgctgttggctcgtcaaagacctccttcactctcagcgggatagcgccgcacggacaagacttttcctcgccagcctgcccggatcaacgcacagcacagctgcggaactcactggaccatctttggtcgaggtgctcagggcccgtccatggttcgaggagcctcctaaagcggtggagctggaaggactggctgcgtgcgagggagagtacagccagaaatacagcaccatgtcccctttgggctctggcgcattcgggttcgtgtggaccgccgtggacaaagagaaaaataaagaggtcgttgtgaaattcataaaaaaagagaaggtcctcgaggattgctggattgaagatccaaagctcgggaaggtgacactggagattgctatactctcaagagtggagcacgccaacatcatcaaggtgcttgatattttcgagaatcagggcttcttccaactcgttatggaaaagcatggctccggcttggacctgttcgccttcatcgaccggcacccacgtttagacgagcctctggctagttatatctttcggcagcttgtatccgcggtgggatacttacgcctgaaagacattatccatcgtgacatcaaggacgaaaatatcgtcatcgccgaagactttaccattaagcttatcgattttgggtcggcggcttacctcgaaagaggcaaactgttttacaccttctgcgggaccattgaatactgtgcaccggaggtgttgatgggaaacccatacagggggccagaattggaaatgtggagcctgggtgtgaccctgtatactttggtgttcgaagaaaaccctttctgcgaactggaggagaccgtggaagccgctatccatccaccatatctcgtatccaaagagctgatgagcctggtctctggactgcttcaaccagttcccgaacgtcgaacaacactggaaaagttagtgaccgatccctgggtgactcagcccgtgaacctggccgactatacctgggaagaggtgttccgagtgaacaagccagagagcggcgtattgtccgcggcatcgctggaaatggggaatcgatctcttagtgatgtggcacaggcccaggagctttgtggtgggccagtgccaggtgaggcccctaatggtcaaggctgtctccatcccggagatccgagacttctgacttcttag

SEQ ID NO: 234128 - DNA, 378 bp, synthetic construct
  misc_feature 1..378: note = Description of Artificial Sequence: Synthetic coding sequence
  source 1..378: mol_type = other DNA
atggaggatggtgggcttaccgcttttgaagaagaccagcgctgtctttcccagtccctgccccttcccgtgtcagcagaggggcctgctgcacagacaaccgcagagcccagccgctccttctctagcgcccatagacatctcagtcggaggaatgggctatctcgtttgtgtcaaagcagaacagccctttccgaggaccggtggtcaagttactgtctctcgagcctggctgcccagaacatttgtactagcaagctacattgcccggcagcacccgaacacaccgacccttctgaaccaagaggaagcgtcagctgctgtagcctgttgcggggacttagcagtggatggtcttctcctcttttgccagcctag

SEQ ID NO: 234129 - DNA, 3324 bp, synthetic construct
  misc_feature 1..3324: note = Description of Artificial Sequence: Synthetic coding sequence
  source 1..3324: mol_type = other DNA
atgaagcgcatgcgccaggagaggaggttgtgctgcgttgttgtgctcgagcctgtggagagagtcagtacttgggttgcttttcagagtgatggaaccgtgacgagctgtgactcactgtttgcacacttgcatgggtacgtgtccggcgaagatgtggccggacagcacatcaccgacctgattccgagcgtgcagctacctcctagtggtcagcacattcctaaaaacttgaagatccagcggagtgtaggacgcgctcgcgatggaacaacttttccactgagcctaaagctgaaatcgcagccaagttctgaagaggctacgaccggggaggccgcacccgtgtccggatatagagctagtgtctgggtattttgtactatctctgggctgattaccctcctgcccgacggcactattcatggtattaaccatagcttcgcccttaccctgtttggctatgggaagacagaactcttagggaagaacatcacttttttaattcctggcttttattcgtatatggacttagcgtataattcatcgctacagctgcccgacttggcgagttgtcttgatgtcggtaacgagagcgggtgtggagaacgtaccctggacccctggcaggggcaggatcccgcagagggaggacaggaccctcggattaacgtggtcttagccggtgggcacgtagtcccacgagatgagatccggaaattgatggaaagccaggacatctttaccgggacacagaccgaactcatagcgggaggccagctgctcagttgtctgtcccctcagcccgctcccggtgtagataacgtgcccgaagggtctctgcctgtgcacggcgagcaggccctgcccaaagatcagcaaataactgctcttggccgagaggagccagtggccatcgagtcccccggacaggacctactgggagagtcacgctctgaacctgtcgacgtcaaaccttttgcatcctgtgaagactcagaggcccctgtgcctgctgaggacggcggaagtgatgccggtatgtgcggcctgtgccagaaggctcagttggaacggatgggggtgagtggtcctagcgggtctgacttatgggccggagctgctgtcgccaagccccaagccaagggacagcttgcgggaggctctctgctaatgcactgtccatgttatggctctgagtggggcctatggtggcgctcgcaggacctcgccccttccccctcaggcatggcgggtctgagttttggcactcctacactcgacgaaccatggcttggggtcgagaacgatcgcgaagaactgcagacttgcttaatcaaggagcagctcagccagcttagcttagccggagccctggatgtgcctcatgctgagttagtgcccacagagtgtcaggccgtgacagctcctgtgagcagttgcgatctcggaggtagagatctgtgtgggggatgcacaggcagcagtagcgcctgctatgccctggccaccgatctgccagggggtctggaggctgtggaggcccaggaggtcgacgtaaatagtttcagttggaaccttaaggagctgttcttttctgaccagacagaccagacttcaagcaattgctcttgtgccacatccgaactcagagagacccccagcagccttgctgtgggcagcgatcccgacgttggctcactgcaagagcagggctcatgcgtgttagatgatcgcgaactgctactgttgactggcacctgcgttgacctgggtcaaggaagaagatttagggagtcctgtgtgggccacgaccctaccgaaccactcgaagtctgcctcgtcagttccgagcattatgctgcaagtgatagagagtctcccggacacgtaccatccacactcgacgcagggcctgaagacacatgtccaagcgccgaggaaccacgattgaacgttcaggttacatcaacgcccgtgatcgtcatgagaggagccgctggattacagagagagatccaggagggcgcttatagtggaagctgttaccatcgcgacgggcttaggctctccatacagttcgaggtgcgtcgggtggagcttcagggaccgaccccattgttttgctgttggctggtcaaagatcttctgcattcccaacgggatagtgccgctcgcaccagactgttcctggcctccttaccgggatccacccactctacagcagcggaattgaccgggcctagcctagttgaggtgctgcgcgctagaccttggttcgaggaaccgccaaaagcagtggagctggaaggactcgcagcttgtgaaggagagtacagccaaaagtatagtacaatgtcccccctggggagcggggctttcggatttgtgtggacagctgtcgataaagaaaaaaacaaggaggtggtagtaaagtttatcaaaaaagagaaggtccttgaagactgctggatagaggacccaaagctaggaaaagtgaccttggaaatcgccatactgtcaagggttgagcacgcaaatattataaaggtgctggatatcttcgagaaccaggggtttttccagttggtgatggagaaacatggcagcggactggacctctttgcctttattgataggcaccctcgtttagacgagcctcttgcttcctacatatttcggcagctagtgtccgcggtgggatatctgagactcaaagacatcatccatagggacattaaagacgagaatatcgtgatcgcggaagacttcaccatcaagcttattgatttcggctctgccgcatacctggaaaggggtaagctgttctacaccttctgtgggaccattgagtactgcgctccagaagtgcttatgggtaatccttaccggggtcccgaactcgaaatgtggagcctgggcgtgactctgtacactctggtatttgaggaaaatcccttttgtgagctggaagagactgtcgaagccgcaattcaccctccctatttggtgtctaaggaactcatgtcgctcgtttcaggactgctgcagccggtaccagaacggcgaactacactggaaaagttggtgactgatccttgggtgacacaacctgtaaacctggccgattacacatgggaggaagtgttccgggtgaataagcccgagtccggggtgctaagcgccgcttccctggagatggggaaccggtctctgtcagacgttgcgcaggcccaggagctgtgcggcggtccagtgcctggcgaggccccaaacggtcaggggtgtctgcacccaggcgatccgcgtctcttgacttcttag

SEQ ID NO: 234130 - DNA, 3414 bp, synthetic construct
  misc_feature 1..3414: note = Description of Artificial Sequence: Synthetic coding sequence
  source 1..3414: mol_type = other DNA
atggggtttcctgactctgcgcgagcgggtcaacgcagtctggtcgacatcatttccagaagcggggagaagatccccgtcagtgtgtggatgaagcgcatgaggcaagagaggcgactatgttgtgtcgtcgtgctggagccagtggaacgagtgagcacatgggttgcatttcaatccgacggcacagtgacctcatgtgactctttgttcgctcatctgcacggctatgtctccggggaagacgtggctggacaacacattaccgatctgatacctagcgtgcagctgccacccagtggacaacatatcccgaaaaacctcaagatccagcggtctgtcggtagagcacgagacgggacgacattccctctgtcattgaaactaaaatcccaaccaagctcagaggaggcgaccaccggcgaggccgctcctgtatcgggctacagagcttcagtttgggtattttgtactattagtggtttgatcacgctgctgccagatggtacaatacacggcatcaaccactcgtttgccttaactctgttcggctacggcaaaaccgagcttttaggcaagaacattacttttctcatcccaggattttactcatacatggacctcgcatacaatagctccctgcagttgccagatttagcctcttgtctggatgttgggaatgagagcgggtgtggtgagaggactctggatccttggcaggggcaggaccctgcagagggaggacaggatccccgtattaatgtcgtactcgccggaggacatgtcgtcccccgtgatgaaatcaggaagctcatggagagtcaggatatcttcaccggtactcagactgagttgatcgcgggaggccagctgctgtcctgcctttccccccagccagcccctggcgttgacaatgtacccgaaggcagtcttcccgtgcacggagagcaggccctgcccaaagaccaacagatcaccgctctgggaagagaagaaccagtagctattgagtcgcccggacaggatttactgggcgagagcagaagtgagccggtggatgtgaagcccttcgcctcgtgtgaagattcggaggcacctgtacccgcagaagatggcggttcagacgccggaatgtgtggcttgtgccagaaggctcaactcgagaggatgggtgtgtcaggtccctctgggagcgacctgtgggccggtgcagcagtcgcaaagccgcaagctaaggggcaacttgcaggcggatcacttctcatgcattgcccctgttatggatcagagtggggcctgtggtggcggtcccaagatctggcccctagccctagtggaatggcgggactctccttcggaacacctaccctggatgagccttggttgggagtggaaaatgaccgtgaagaattgcagacatgcttaattaaggaacagctgtctcagctttcacttgccggtgccctcgatgttccacatgcagagttggtacccaccgagtgccaggccgtgacggccccagttagctcttgcgacctgggtggcagggacctgtgtggaggatgcaccggctcatctagtgcctgttatgccctggccaccgacctccctggcggacttgaggctgtggaagctcaggaggttgacgtgaattccttctcatggaacctgaaggagctcttcttcagcgatcaaacggatcagacttccagtaactgctcatgtgcgaccagcgaactgagggaaacaccttcttccctagctgttgggtctgacccagacgtgggttctctgcaggagcagggcagctgcgtacttgatgaccgcgagctactgctgctgactgggacgtgcgtagatctgggtcaagggcgacggttcagagagtcctgcgtaggccacgatccaacagagcccctggaggtctgcctcgtgtcctccgagcattacgccgcttccgatcgcgaaagtccaggtcatgtaccttcaacgctggacgcaggtccagaggatacatgcccctcagctgaggaacctcgcttaaatgtgcaggtcaccagcacgccagttatagtgatgcggggagcagccggtttacagcgcgagatccaggaaggtgcttacagcggatcctgttaccacagggacggcttgagactatcaatacagttcgaggtgcgcagagtggaactgcagggccctacgcctctgttttgctgttggctggtgaaggatctactgcattctcagagggactcagccgctaggactagactgtttcttgcatcgctccccggatctacccatagcacagcggctgaattgacggggccaagtctggtcgaagttcttagagcaagaccatggtttgaggaaccccctaaagccgtggagctggaagggctggccgcttgtgaaggcgagtatagccagaagtacagtacaatgagtcccctgggctcaggagcttttggattcgtttggactgccgtggacaaagaaaaaaataaggaagttgtcgtgaagttcattaaaaaggaaaaggtgctcgaggactgttggatagaggatcccaaactggggaaggtgaccttagaaattgcgattctgtctcgggtggaacacgcgaacatcatcaaagtgctcgatatcttcgagaatcagggcttttttcaactggtgatggaaaaacacggatccggccttgatctgttcgccttcatagatagacaccctcggctcgatgagcccttagctagctatattttcagacagctggtttcagctgtcgggtatctacgcttgaaagacatcattcacagagacatcaaagacgagaatattgtgatcgccgaggatttcacaattaagctcatcgattttggatccgcagcatatttggagcggggaaaactcttctataccttttgtggaaccattgagtactgtgcgccagaggttttgatgggaaacccctatcgcggtccagagttagaaatgtggagcctcggcgtgacactgtacaccctggtgtttgaggagaatccattttgtgagttagaggagaccgtggaggccgctattcatcccccataccttgtttcgaaagaactgatgtctttggtttcaggtctgctgcagcccgttccagaacgtagaaccacgctagaaaaactggtgacagacccatgggtgacccagccagttaatctcgctgactacacttgggaagaagtattccgagtcaataagccagagtccggggtcctttctgccgcatccttagaaatggggaacaggtccctgagtgacgtggcccaggcgcaagaactttgtggtggtcccgtgcctggagaggctcctaatgggcagggctgtctgcatcctggtgatcccagactcctaacaagctag

SEQ ID NO: 234131 - DNA, 3432 bp, synthetic construct
  misc_feature 1..3432: note = Description of Artificial Sequence: Synthetic coding sequence
  source 1..3432: mol_type = other DNA
atggaggatggcggtctgaccgcctttgaggaagaccagcgctgtttgagtcagtctttaccacttcccgtcagtgccgaggggcctgccgctcagactacggctgagccttccagatccttttcttcagcgcaccggcacctctcccggcgaaacggacttagccggctgtgtcaaagccggacggctttatcagaagaccggtggtctagttactgtctctcctctcttgcggcacagaatatatgtaccagcaagctccactgtcctgctgccccagaacataccgaccccagtgagccacgcggtagtgtgagctgctgttcactactcaggggactgagcagcggctggtcctcccctcttctgcctgcccctgtctgcaatcctaacaaagccattttcaccgtggacgccaagactacagaaattttggttgctaatgataaggcttgcggactcctggggtacagtagccaggaccttatcggtcagaaactgacccagttttttctgagatccgacagtgacgtggtggaggctctgagtgaggagcatatggaagccgacgggcatgccgcagtagttttcgggacagtggtggacataatctcccgttccggagaaaaaattcccgtatctgtttggatgaaaaggatgagacaagaacgcaggctgtgttgcgtggttgtccttgaacccgtcgaacgagtgtcaacttgggttgcatttcagagcgacgggacggttacaagctgtgactctttgtttgcccacctgcacggatatgtgtccggggaggacgtggccggtcaacacattaccgacttaatcccatcagttcaactacctccatctggacagcatattccgaaaaacttgaagattcagcgctccgtgggacgggcacgtgatgggaccaccttccccttgagcctgaagctcaagagccagccgagttccgaagaagctaccactggcgaggcggcacctgtgagtggctatagggcttccgtatgggtcttctgtaccatctcagggctgattactctgctgcccgacggtacaattcacggaatcaatcactctttcgctcttacgctgttcggttatgggaaaacagagttgctggggaagaatattactttcctgattcctggtttttatagttatatggatcttgcctataatagctccctccagctccctgatctagctagctgcctggatgtgggcaacgaaagtggatgtggggagcggaccctggacccttggcagggccaggaccccgcagagggcggtcaagacccaaggattaatgtggtgctagccggaggtcacgtggttccgcgtgacgagattaggaagctgatggagagtcaagacatctttactggaactcagaccgaactaatcgcagggggacagctcttgagctgtctgtcccctcagcctgcacctggcgtagataatgtgcccgaagggtcgctccccgtgcacggtgaacaggcccttccaaaggatcagcagatcacagctctgggacgtgaggagccagtagcaatcgaatccccaggacaggatctcctgggcgaatcccgaagcgagcctgtggatgtcaaacctttcgccagttgcgaggactctgaggcccctgtcccagcggaagacggcggttccgatgccggaatgtgtggactgtgtcaaaaagcccaactcgagcggatgggggtgtctgggcctagcggctctgacctgtgggccggagcagcagtggcgaaaccacaggccaagggacagctggcaggcggatcactgctcatgcattgcccgtgctatgggagtgaatggggactgtggtggcggtctcaagatttggctccctcacctagtgggatggccggactgagctttggcacgcctacgctggacgagccatggttgggtgtggaaaacgaccgggaggagcttcagacatgcctcatcaaagaacaactaagccaactctctctggccggagcattggacgttcctcatgcagagctggtgccaactgagtgccaagctgttaccgcaccagtgtcatcgtgcgatcttggcggacgggacctttgcggcggatgtactggctcttcatctgcctgctacgctctggcaaccgatttaccagggggtctagaggcggtggaggcccaagaggttgacgtaaatagcttctcctggaatttgaaagaactcttcttctcagatcaaaccgaccagacgtctagtaattgttcttgtgctaccagtgagttaagagagactccaagttccttggctgtgggctccgatcccgacgtcggatccctgcaggagcagggatcatgcgtgcttgatgatcgcgagctgctgctactgaccggcacctgtgtggacctaggacagggtaggcgtttccgagagtcctgcgtgggacatgatccgacggagcccctggaggtgtgtctggtcagcagtgagcattacgcagcatccgaccgtgaatcgccagggcacgtgccttccaccctggatgccggacctgaagacacgtgtcccagtgccgaggagccaaggctaaatgtccaagtaacttccactcccgtgatcgttatgagaggagcagccggactccagcgagagatccaagagggcgcttatagtgggagctgctaccaccgtgacggtctcaggctgagtatccagttcgaagtcaggcgagtagagctgcaagggcctactcctctattctgttgctggctggtaaaggacctgttgcactcccagcgggactccgccgctaggactcggttgttcctagcttcgcttcctggttcaacacactccaccgccgcagagctcacaggtcccagtctagtggaggtattgagggccagaccctggttcgaggagcccccaaaggcagtggagctcgaaggattagcagcttgcgaaggtgagtactcccaaaagtattcaaccatgtcacctttaggaagtggcgcattcggctttgtgtggaccgctgttgacaaagagaaaaataaggaagtcgtggtgaagtttattaagaaggagaaggttctggaggattgttggatagaggaccccaaactaggaaaggtcaccctggagattgctattcttagccgagttgaacacgcaaacatcatcaaggtgctggacatcttcgagaaccagggcttctttcagctcgtgatggaaaaacatggaagcggcctcgacctcttcgcttttatcgaccgccaccccagactggatgaacctctcgcaagttatattttccgacaagtaagagctggacagagtagagtgtcggtgaatgctgggttaggtgcgtgggtcaggtggttgcaacggtccgtgattcacacccgcttttcactatag

SEQ ID NO: 234132 - DNA, 1314 bp, synthetic construct
  misc_feature 1..1314: note = Description of Artificial Sequence: Synthetic coding sequence
  source 1..1314: mol_type = other DNA
atggtccagatgatgagacaattcctgtatagagtcctgcctgaggattcatataaagttactaccgggaagctgcacgttagtttgacacgcttgaccgatggcgaaaatgttgtggtatccgagttcaccagcaaggaagaactgatcgaggctctgtattgcagctgttttgtgcctgtgtactgcgggctgatccccccaacctaccgtggcgtgagatacattgatggcggattcaccgggatgcaaccatgcgcattttggaccgatgccatcactatctcaactttctccgggcaacaggacatctgcccacgcgattgccccgctatcttccatgacttccggatgtttaattgtagttttcagtttagcttggagaatattgcgagaatgactcatgcgctgttcccgccagatctggtgatcctgcacgactactattatcgcggttatgaggatgctgtcctttacctgaggcgtttgaatgccgtataccttaacagctcctctaaaagggtgatttttcccagagtagaggtgtattgtcagattgagctggcccttggcaatgagtgtccagaacgtagtcagcctagcttacgcgctcggcaggccagcctggaaggcgctactcaaccacacaaggaatgggttccaaaaggcgatggccgaggtagccacggccctcctgtgtcgcagcctgtgcaaaccctggagtttacctgtgaatcacccgtcagcgcgcctgtgtctcccctggaacagccacctgcccaacccctggcatcctcaacaccactgtccctgtcaggcatgcctccagtttcttttccagccgtacacaaacccccatcatctacccctggctcttctctgcctacccctcctccgggattatctccgttgagcccccagcagcaggtgcagccctctggctctcctgcccgatcgctgcactcccaggctccaacaagcccccgtccgtcgctggggccatccacagtcggcgctcctcagaccctgcccaggtcctccttgagcgctttcccggcacagccaccagtggaagagctgggtcaggagcagcctcaggctgttgcactccttgtcagctccaagcctaaaagcgcagtacctctcgtacatgttaaggagaccgtgtcaaagccctacgtgaccgagtctccggcagaggactcaaattgggtgaacaaggtattcaagaaaaataaacaaaagacctccggcacacgtaagggtttccctagacactcagggtccaagaagccttctagcaaggtgcagtag

SEQ ID NO: 234133 - DNA, 1599 bp, synthetic construct
  misc_feature 1..1599: note = Description of Artificial Sequence: Synthetic coding sequence
  source 1..1599: mol_type = other DNA
atggaggaacaggtattcaaaggcgacccagacacaccacactcgatttccttctcaggctccggtttcctgagtttttatcaggcaggcgcagttgatgctcttcgagacctggctcccaggatgctggaaaccgctcataggttcgccggtacatccgctggagccgttattgcggctctcgcaatatgcgggatcgagatggatgaatacttacgtgttcttaatgtcggcgtggccgaggtgaagaagagtttcctaggccctctgtcgccttcatgcaaaatggtccagatgatgagacagtttctttaccgagtgttacccgaggatagctacaaagtgacaactggcaagttgcacgtgtctctgacaagacttaccgatggcgaaaatgttgtggttagtgagttcacgagcaaagaagaattgattgaagctctttactgtagctgtttcgtcccagtgtattgcggtctgataccaccaacttatcgcggagtgcgatacatcgatgggggttttactgggatgcagccttgtgctttttggaccgacgctatcaccatttctacattctccggccagcaagacatttgcccaagggactgccctgccattttccacgacttccgcatgttcaactgttcctttcagtttagcctggagaatatcgccaggatgacccatgccctgttccccccagatctggtaatcctgcacgactactactaccgtggatacgaggatgcagtactctaccttcgaaggctgaacgctgtgtacctcaacagttcttctaagagagtgattttcccaagggttgaggtatattgccaaatcgaactagcccttggtaacgagtgtcccgagcggtctcagccgtcactacgagctagacaggcatcgctggagggggctacccaaccccataaggagtgggtgccaaaaggcgatggtcgtggtagccacgggccacccgtgtcccaaccagtccagacgctggaatttacatgcgaaagtccagtgtcagccccagtgtctccactagaacaacccccagcacagccattggcttcaagcacaccgttaagcttgtcgggcatgccccctgtgagctttcctgccgtgcacaagcctccatcgtctaccccgggatcaagcctgcccacccctcccccaggcctgtccccattatccccccaacaacaggttcagccttctgggtcccccgcacgatctctccactcccaggcgcctacttctcctcgcccatcgcttggtccatccaccgtaggcgcaccgcagacgctccctcgtagttccttgtcagcatttcctgcccagccccctgtagaagagctaggccaggagcagcctcaagcagtggccctcctcgtctcctcaaaaccgaagtccgcagtccctctggtgcatgttaaagaaaccgtctctaaaccatacgtcaccgagtccccggctgaggactcgaactgggtgaataaggtcttcaaaaaaaataagcagaaaacctctggcactaggaagggatttccgagacactctgggagcaaaaaacccagttcaaaagttcagtag

SEQ ID NO: 234134 - DNA, 1602 bp, synthetic construct
  misc_feature 1..1602: note = Description of Artificial Sequence: Synthetic coding sequence
  source 1..1602: mol_type = other DNA
atggaggaacaagtgttcaagggcgatcctgatacacctcattccattagcttcagcggaagcggctttctgtctttttaccaggctggggcagtggacgcacttcgcgacctggccccaagaatgctcgagactgcccatagatttgccggaacatcagctggggctgtgattgctgcactcgccatttgtggcattgagatggatgaataccttagggtgttgaatgtcggagtggcagaggtgaaaaaatcattcttagggcctctctccccatcttgcaaaatggtccagatgatgcggcagtttctgtaccgcgtgcttccggaggacagctataaagtcactaccggaaaacttcatgtttccctgactcgcctgactgacggagaaaacgtggtagtatctgagtttacctccaaagaagagttgatcgaagcagccttatactgctcttgcttcgtgcctgtttattgcggcctcattcccccaacctataggggggtcaggtatatcgacgggggattcaccggcatgcagccctgcgcgttctggactgatgccatcacaatttctacattttcaggtcaacaggacatttgcccaagggactgtccagctatctttcacgatttccggatgtttaactgctcctttcagttcagcctggaaaacatcgcacgtatgacccacgctctctttcctcctgatctcgtgattctgcatgattactattatagaggctacgaggatgcggtattatatcttaggagattaaacgcggtgtatctgaattcttcctcaaagagagtcatcttcccccgtgttgaggtgtattgccagattgaactcgctcttggtaacgagtgtcctgagcgcagtcaacctagcctccgagcgcgtcaggcgtctttagaaggagccactcagccccacaaagaatgggtgcccaaaggagacggcaggggcagccacggaccccctgtgagtcagcctgtgcagaccctggagtttacttgcgagtctcctgtctcagccccagtctccccgctggagcagcctcctgcccagcccctggcttccagcacccccctgtcactgagtggaatgccaccggtgagcttccccgcagtacataagccaccatcatcaacgcctggaagttctttacctacccctccaccaggcctgtcccctctctctccacaacaacaagtacagcctagcggttctcctgcccgatccctgcatagccaggcccctacatctcccaggccatccctgggacctagcactgtgggagctccgcagacacttcctcggtcatcactcagtgctttccccgctcagccacccgtagaggaactcggacaggaacaaccccaggccgtggccttgctggtcagctccaaaccaaaaagcgctgtgcctctcgttcacgtcaaagaaaccgtgagcaaaccatatgtgactgaaagccccgcagaggatagtaattgggtgaacaaggtgttcaaaaagaataaacagaaaacaagcggcacaagaaagggtttcccacgccattccgggagtaagaagccatcctcaaaagtgcagtag

SEQ ID NO: 234135 - DNA, 1341 bp, synthetic construct
  misc_feature 1..1341: note = Description of Artificial Sequence: Synthetic coding sequence
  source 1..1341: mol_type = other DNA
atggttcaaatgatgaggcagtttttgtatcgtgtgcttcctgaagatagctacaaggtgactaccggcaaactgcatgttagcctaacccggctcaccgatggcgagaacgttgtggtgtctgagttcacaagtaaggaagaactgattgaggcgttatattgctcttgctttgtgcctgtctactgcgggctcattccccctacatataggggtgtctgggcattcctgaccctgcccccacagcgctacattgacggtgggtttactgggatgcagccatgtgccttctggacggacgctatcactatctcaacattctccggtcagcaggacatctgcccacgcgactgccctgccatcttccacgacttccgaatgttcaactgctcatttcagttttccctggaaaatatcgccaggatgactcatgctctgttcccacctgacctggtgatccttcacgattactactacagggggtatgaggacgccgtgctgtatctgaggagactgaacgcagtatatctgaattccagttcgaaacgtgttatctttccacgggtggaggtatactgtcagattgaactcgcactggggaacgagtgtcctgagcggagccagcctagcttaagagctcgccaagcttccctggagggggcaactcaaccacacaaggaatgggtgccaaaaggagacggcagagggtctcatggacctcccgtgtctcaaccagtgcagacacttgaatttacctgcgagtcccccgtctccgctccagtatcaccactggaacaacctcccgctcaaccactggcatcctcgacacctttgagcttgtccggaatgcctcctgtgtcatttcctgccgtacacaaaccaccatcatctaccccgggttcttctctgccaacaccgccacctggtttgtcacctctcagtccccagcaacaggttcaaccaagcggctcaccggctcgatccctgcacagtcaggcaccgacgtcaccgagaccctcccttggcccatccacagttggggcaccccagactttgcctcgctcatctctgtccgcctttcccgctcagcctccagtcgaagagttaggccaggaacagccccaggctgtcgccctgctggtctcctcaaaacccaagtccgctgttccactcgtccatgtcaaagaaacagttagcaagccatatgtgacagagagccctgccgaagattctaattgggtcaacaaagtgttcaagaagaacaaacagaagacttccggaaccagaaaaggatttcccaggcacagcggaagtaaaaaaccgtcaagcaaggtccagtag

SEQ ID NO: 234136 - DNA, 1515 bp, synthetic construct
  misc_feature 1..1515: note = Description of Artificial Sequence: Synthetic coding sequence
  source 1..1515: mol_type = other DNA
atgttccccagagagaaaacctggaatatcagcttcgctggctgcgggtttctgggagtctactacgttggagtcgcctcatgcctccgggagcatgcccctttcctcgtagcgaacgcaactcacatctacggagcgtctgcaggcgctctgacagcaaccgcactagtgactggggtgtgtctgggcgaggcaggggcaaaattcattgaagttagtaaagaagctcgaaaacgctttctgggacctctccacccctctttcaacctggtcaagattatcagatcttttcttttgaaggtcctgcctgccgactctcacgaacatgctagcggacggttgggcatctcccttactcgggtgagcgatggcgagaatgtgattatttcccacttcaacagtaaggacgaactcatccaggctaatgtctgctcaggttttatacccgtttactgcggtcttataccccctagtttgcagggagtacgctatgtcgacggcggaatcagcgataatctgccattatatgagttgaaaaatactattacagtgtcaccattctctggcgagagcgacatatgccctcaggacagctctacaaacatacatgagttgcgagtgaccaacacgtctatccaattcaatttgcgcaatttgtaccgtctctctaaggctttgttccccccagagcccctcgttctgagggagatgtgtaagcaagggtatcgagatggacttcgcttccttcagcggaacggactcctaaatcgcccaaacccgctgttagccctcccgccagcaaggccccatggaccggaagataaagatcaggctgtagaatctgcccaagctgaggattacagtcagctgcctggggaggatcatatcctggaacatctgcccgcacgactaaatgaggcattgttggaggcctgtgtggagccaacagacttattgacaaccttatcaaacatgctgcctgtccgcttggcgaccgctatgatggtaccttacactctgcctttggagagtgctctgtcctttacaatacgtttactagaatggcttcctgacgtaccagaggatatcaggtggatgaaggagcaaactgggagcatatgtcagtacctggttatgcgggctaaacggaagttgggtcgccacttgccgtcgcggctcccagaacaggtagagttaagaagggtccagagcctgccctcagtcccactgagttgcgcagcttatcgggaggccctgcccggttggatgcggaacaatctgtcactaggcgacgccttggccaagtgggaggaatgtcagcgacagcttctgctcgggctattctgcacaaatgtggctttcccgccagaggcgctacgaatgagagccccagcagatcctgctccagcacctgccgatccagcctcaccacagcaccagctggcaggtcccgctcccctgctttcgacccctgcacccgaggctcgaccggttattggggcactcggtctctag

SEQ ID NO: 234137 - DNA, 1290 bp, synthetic construct
  misc_feature 1..1290: note = Description of Artificial Sequence: Synthetic coding sequence
  source 1..1290: mol_type = other DNA
atgggcttcctcgaagaagaagggaggtggaatctttccttcagtggagctgggtacctgggcgctcatcacgtgggagcaacagaatgtctccgtcagagagcgcctcgcctgcttcagggcgctcggagaatttatggaagttcgagcggggctctgaatgccgtgtctatcgtttgtggcaagtccgtggacttctgttgttcgcacctcctcggcatggttggccaactcgagcggctgtcgctgtccattctacacccagcttacgcgccaattgagcacgtgaagcagcagctgcaggacgctctgccaccggatgctcatgttcttgcatcgcaaaggctgggaattagcttgacacgctggcccgacgggagaaattttctagtgaccgactttgccacttgtgatgaattgatccaggctctagtgtgcacgctttactttccattctactgtgggctcattccgccagaatttaggggtgaacgctacattgacggtgcactatcgaacaacctgccatttgctgattgtcctagcaccattacagtgtcccccttccacgggacggtggatatctgcccgcagtccacgtcaccaaatctgcacgagctgaacgttttcaacttttcatttcagatcagcactgagaatttttttctgggactgatttgtttaataccgccatctctggaggtggttgcggataattgtcgccagggctatctggacgctctgagatttttggaacgcagggggctgaccaaagagcctgtactctggactttggtgagcaaagaaccacccgctcccgcagatgggaattgggatgccggttgcgaccagcggtggaaaggagggctgtctctgaattggaaggttcctcacgtgcaggtaaaagacgtgcctaattttgaacaactctccccggagcttgaggccgcactcaaaaaggcctgtactagggatccctcaaggtgggctcggttttggcacagtgggccaggccaggtgctgacttatctgctgctgccctgcaccctgccatttgagtatatatacttccggtctaggaggcttgtggtgtggctgcctgacgtacccgctgatttatggtggatgcagggcttgttaagaaatatggcacttgaagtcttttctcgcacaaaggcacagctgctcggtccaatctctccacctgccaccagagttctggagacatcccctctccagccccagatcgccccacaccgggaagaactggggcctacacatcaggcatag

SEQ ID NO: 234138 - DNA, 1515 bp, synthetic construct
  misc_feature 1..1515: note = Description of Artificial Sequence: Synthetic coding sequence
  source 1..1515: mol_type = other DNA
atggctgcccaacgcagaagtctcctgcagagcgagcaacaaccttcttggacagacgacctccctctctgccacctgtctggggttgggtcggccagcaatcgtagctactcagcagatgggaagggaaccgaatctcatcctcccgaggactcatggttaaaatttcggtcagagaacaactgcttcttgtatggagttttcaatggatatgacggtaaccgggtgactaacttcgtcgcacagaggctctctgctgaattgctgctaggccaactcaatgccgagcacgccgaagctgacgttaggagagttctcctgcaagcgttcgacgtggtggagaggagctttttagagtctatcgacgacgctttggccgagaaggccagtctgcaaagtcagctccccgagggagtgccacagcatcagctaccacctcaatatcaaaagattctggagcgattgaaaactcttgagcgggaaatttccggcggtgctatggccgtggtcgccgtgctgctcaataataagctgtatgtggctaacgtcggaacaaacagggccctactgtgcaagagtaccgtggatgggcttcaggttacccagctgaatgtggaccacacaactgagaacgaggacgaactgtttcgcctgtcacagctgggattggatgcgggtaaaataaagcaagtgggaataatttgcggacaggagagcacaaggcggatcggtgattacaaagtgaaatacgggtacactgacattgatctgttgagtgcagccaaaagtaaaccaatcattgccgagccggagatacacggggctcaacccctagatggcgtaacaggctttttagtgttaatgagtgaggggttgtacaaagctctggaagcggctcatggccctggtcaagcaaaccaggaaatcgcagccatgatagatacagagtttgcaaagcagacctcgctggatgccgttgcccaggccgtagtcgaccgagtcaagcgcattcacagtgacacatttgccagcggcggtgagcgcgcaaggttttgcccaaggcacgaagatatgaccctgttggtgaggaatttcgggtatcccctcggcgaaatgtcccagccgacaccttctccagcccctgcggctggagggagagtctatcccgtttctgtgccctactcaagtgcccagtctacatccaagacctctgttactctgtcactggttatgccaagtcagggccagatggttaatggagctcatagcgcctcaactctggatgaggccacccccaccctgaccaatcagtctcccacactgaccctgcagtccacaaatactcatacccaaagctcttctagtagctccgatggtggactgttcaggagtaggcctgcgcattctctgcctcctggtgaagacgggcgtgttgagccttatgtggatttcgcagaattttacaggctgtggtctgtggatcacggcgaacagagtgtggtgaccgccccttag

SEQ ID NO: 234139 - DNA, 948 bp, synthetic construct
  misc_feature 1..948: note = Description of Artificial Sequence: Synthetic coding sequence
  source 1..948: mol_type = other DNA
atgggctttctcgaggaagagggtaggtggaacctgtcgttttcaggtgcgggatatttgggagcgcaccacgtgggggctaccgaatgcttgcggcaacgggcaccacgactgttgcagggggcaagacggatctacggcagctcgtctggagcattgaacgcagtgagcatcgtctgcggcaaatctgtggactgccccagtacaattaccgtctcacccttccacggcacagtcgatatctgtccccagagtacgtcacctaacctgcatgagctgaatgtgttcaatttttcatttcagatcagcaccgagaacttttttctgggactgatatgcctgatccccccttctctcgaggtcgtggccgacaattgccgccagggataccttgacgccctgagattcctcgagagacgcggtcttactaaagaacccgtcctctggactcttgtgagcaaggagcccccagcgcctgctgacgggaattgggacgcagggtgcgatcaaaggtggaaaggtggtctgtctcttaattggaaggtcccccatgtacaggttaaagacgtgcccaattttgagcagctcagtcctgagctcgaggcagcccttaagaaggcatgcacccgggatccctccagatgggccaggttctggcacagcggtccagggcaggtgctaacataccttcttttgccctgtaccctgccctttgaatacatatacttcagatctcgcagacttgtggtttggctgcccgacgttcctgctgatctttggtggatgcaaggtctgctgagaaatatggccctagaggtgttcagccgaacgaaagcacaactcttggggcctatatcaccgccagcgacaagagtgcttgaaactagcccacttcagcctcagattgctccccacagagaggaactggggccaacccaccaggcttag

SEQ ID NO: 234140 - DNA, 807 bp, synthetic construct
  misc_feature 1..807: note = Description of Artificial Sequence: Synthetic coding sequence
  source 1..807: mol_type = other DNA
atgggcttcctggaggaagaggggcgttggaacctgagtttctcaggagccggttatttgggagcccaccatgtcggagcaaccgaatgtttaaggcagcgcgctccccgtctgttacagggtgcaaggcgaatctatgggtccagctcaggtgcccttaacgcagtaagtatcgtttgcggcaagagcgtcgatttctgctgttcccacctgttgggtatggtcggtcagttggagaggttgagcctgagcatactacatcccgcatacgcccctatcgagcacgtgaaacaacagctccaggatgcactgccacctgacgctcacgtactcgcatctcagaggcttggaatcagcttgactaggtggcccgacggaaggaactttctggtgaccgactttgcaacatgcgatgagttgatccaggtggtggcagataactgtcggcaaggctacctcgatgctctgcggtttctggagaggaggggactcaccaaggaacccgtgttgtggactctagtgtctaaggaaccacccgcacccgcagatggtaattgggatgctgggtgtgatcaacgctggaagggaggcctctctttgaactggaaagtgccccacgtccaggtgaaagacgtcccgaactttgaacagttgtcgcctgaactagaggccgctctgaaaaaggcctgtacgcgggatccctcaaggtgggccagattttggcattccggtcccggacaggtgctcacttaccttctcctaccttgcacattacccttcgagtacatttacttccgctcccgttag

SEQ ID NO: 234141 - DNA, 948 bp, synthetic construct
  misc_feature 1..948: note = Description of Artificial Sequence: Synthetic coding sequence
  source 1..948: mol_type = other DNA
atggggtttcttgaagaggagggcaggtggaacctatccttctctggtgctgggtacttgggagcacaccacgtgggagccacagagtgtcttaggcagagagcaccccgactgctccagggcgctagaagaatctatggcagctctagcggcgcactaaacgccgtgtctatagtttgcgggaaatcagttgattgcccgtccacaattacagtgtctcccttccatggaaccgtggatatctgtcctcaaagtacaagtcctaatttacatgagttgaacgtctttaatttttcctttcagataagcaccgaaaatttttttttaggcttgatctgcctgattcctccctccctggaggtggtagctgataattgtaggcaagggtacctcgacgctctgcggttcctggaaaggcgtggactgaccaaagaacccgttctctggacccttgtgtccaaggagcctcctgccccagctgatgggaactgggatgccggttgcgaccagcgctggaaaggcggtttgagcctcaattggaaagtcccacacgtgcaggtcaaggatgtgcctaactttgaacagctgagccctgagctggaggcagccttgaagaaggcgtgcaccagggaccccagcagatgggcacgcttttggcatagcggccctggacaggtactgacgtacctcctgcttccttgtacactgccattcgagtatatctatttccgatccaggcgcttggttgtctggctccccgacgtgcccgcagatctctggtggatgcagggactgctgcggaatatggccctggaagtattttcgcgcactaaggcccagctgcttggaccaataagcccaccagctacccgcgttttagagacatctccactccagcctcagatagccccacaccgggaggagctgggacccacccatcaggcctag

SEQ ID NO: 234142 - DNA, 708 bp, synthetic construct
  misc_feature 1..708: note = Description of Artificial Sequence: Synthetic coding sequence
  source 1..708: mol_type = other DNA
atggaggaggagacccatactgacgccaaaatcagagccgagaacgggaccggatctagcccaagagggccaggctgctcacttcgacatttcgcctgtgaacagaatctcctcagtcgacccgatgggagcgcctcctttctgcaaggtgacacaagcgtcctggccggagtctacgggcctgcggaggtgaaggtctctaaggagattttcaacaaagccaccctggaagtcattctgcggccaaaaatcggtcttcccggagtagccgaaaaaagcagagagaggttaatccgtaacacttgtgaagccgtggtcttagggaccctacatccccgaacatctattaccgtggtgcttcaggtggtgagtgacgccggttccctgctggcctgctgtcttaatgctgcctgtatggccctcgtggatgccggagtgcctatgcgcgctctgttttgcggggttgcgtgcgcattggactctgatggcaccttggtgctcgaccctacctcaaaacaagagaaggaagctagagccgtgctgactttcgccctggactccgtcgagcgaaagctattgatgtcgtctactaaggggctctatagcgacacagagttgcagcagtgcttggcggctgcccaggctgcgagccaacatgtgtttcgattttaccgagaatcactccagaggcgatatagcaaaagctag

SEQ ID NO: 234143 - DNA, 4128 bp, synthetic construct
  misc_feature 1..4128: note = Description of Artificial Sequence: Synthetic coding sequence
  source 1..4128: mol_type = other DNA
atggaggcacccctccagactggcatgatgggcacatctagccacggactggccacaaattcatcaggagctaaagtagcggagcgggatggcttccaggacgtgctggcacccggtgagggatccgcagggagaatatgtggagcccagcctgtaccattcgtgcctcaggttctcggggtgatgattggagcaggagtggctgtagtcgtgaccgctgtactcatactcctggtggtaagacggctgcgagtgccgaagacccctgcccctgacgggccaagatatcgctttcgcaaaagagataaagtcctgttttatggcagaaagattatgcgtaaagtctcgcagtctacctcaagtctcgtggacaccagcgtatcagcaaccagccgcccaagaatgcgtaagaagctcaagatgctgaatatagccaagaaaatcctgagaatccaaaaggagacaccgactctgcaaaggaaagaaccaccgccagctgtactggaagccgatctgacagagggcgacctggccaatagtcaccttccaagcgaagttctgtatatgctgaaaaacgtgagagtccttggacactttgagaagcccctttttttagagctgtgtaggcatatggttttccagagactgggacaaggagattacgtttttaggccaggacagcccgacgcttcgatttacgtggtccaggatggcctgctggaactatgcttgccaggtcctgacggtaaagagtgcgtggtgaaagaagtagtgccaggggactcagttaacagcctcctaagcatcctggacgtaatcactggacaccagcatcctcagcggacagtgtccgcgagggccgcacgggatagcactgtccttcgtttgccggttgaggcattctcggccgtcttcaccaagtaccctgagtccttggtccgcgtcgtacagataattatggtcagactccagcgagtgacttttttagccctacacaactacctggggttgaccaacgagctgtttagtcacgaaatccagccactgcgcttgtttccctcacctggtttgcctacccgaacctcacccgtaagaggtagtaagcggatggtgtctacatcggctactgatgagccacgggagactcccggacgccctcctgaccctacaggagctcctcttcctggaccaacaggagatccagtcaaaccaacgtctttggagacaccaagtgctccccttctttcccggtgcgtgtccatgccaggggacatctcaggcctacagggtggacctcgttccgatttcgatatggcctatgagcgtgggaggatttccgtgtcactgcaggaggaagcctccggcggttcattagccgctcctgcacggactcccacacaggaaccgagggagcaaccagctggagcctgcgaatacagctattgcgaagacgagagcgctaccggcggttgccccttcggtccttaccaaggcaggcagacttccagcattttcgaagccgcaaagcaggaactggccaagttgatgcgtattgaagatccttcactgctgaattcacgcgtgttactacatcacgctaaggccggaactataattgcgcgtcaaggagaccaggacgtttctctgcactttgtactgtggggatgcctacacgtctaccagcgaatgattgacaaagcagaagacgtgtgtctgtttgtggcccaaccaggggagctcgttggccagctggcagtcctgacgggcgagcccttgatttttaccctcagagctcagagggactgcacattcctccgcataagtaaatccgacttttatgaaatcatgagagcgcaacccagcgtggtactttcagccgcacacaccgtggcggctagaatgtcacccttcgttagacagatggacttcgccattgactggactgctgtggaggccggacgcgctctgtacaggcaaggggatagaagcgattgcacatatatcgtgctgaacggccgtctgaggagtgtgattcagcggggttctggaaaaaaggagctagtgggtgagtacggcagaggagatctgatcggtgtagtggaagcactcacccggcagccaagggcaaccacagtgcatgcagtgcgcgacaccgagctcgcaaaacttccagaagggactcttggccacatcaagcggagatacccacaagtggttacccgtcttatccacctgttgtcccagaagattctggggaacctgcagcagctgcagggcccattccctgctgggtcaggtctgggcgtgccaccccattccgaactcacaaaccccgcttccaacctagctacagtggctattttgcctgtctgtgccgaggtacccatggtggctttcactcttgaactccaacatgcccttcaggctattggccctactctgctgctcaattctgatataatccgggctcggttaggtgctagtgccctggattccatacaggagttccggttgtcaggctggctggcccaacaagaggacgcacaccgcattgtgttgtatcagactgacgcatctctcaccccttggaccgtacgctgcctaaggcaggctgactgtattctgatcgtagggctcggcgatcaggagcccacactggggcagctggaacaaatgctggagaacactgccgtcagggcactgaaacagctggttttactccacagagaggagggggctgggccaactcgaaccgtggagtggttgaatatgaggagctggtgttcgggccacctccacctacgatgcccacgacgactttttagtagacgtagccctgcaaaactgcacgagctgtacgagaaagttttctctaggcgggctgataggcactccgactttagccgactcgcccgagtcctgacagggaacacaatagcactggtgttgggtggaggtggcgctcgaggctgcagtcacattggagtcctgaaagcccttgaggaggctggtgtgcccgttgatctggtgggcggtacgagcattgggtctttcatcggagcactctacgcggaggagagatccgcttcacgtacgaagcagagggcgagagagtgggctaagagtatgaccagcgtcctggaacctgtgctggacctaacctatcccgtcacttccatgttcacaggcagcgcgtttaaccgctccatccatagggtttttcaggataagcaaatcgaggacttgtggttgccgtatttcaatgtgactaccgacatcaccgcctccgccatgagagtccacaaagacggttctctgtggagatacgtcagggcctcaatgacactgtccggatatcttcctccactctgcgaccccaaagatggccacctgctgatggacgggggatatataaacaacctgcccgcagatattgcccgatcaatgggagcaaaaaccgtcattgccatcgacgtggggtctcaggacgagacagacctctcaacatacggcgatagcctgtcgggctggtggctgctatggaagcgcctcaatccatgggctgataaggtcaaggtgccggacatggccgagattcaaagtcggttggcctacgtgagctgtgtgcggcagctggaggtcgtcaaaagtagctcatattgcgagtacctgcgacctcccatcgactgtttcaagaccatggactttggcaaattcgaccaaatctatgacgtcggctatcaatatggcaaagctgttttcggcggttggagtcgaggcaacgttatagagaagatgctaactgacaggaggtccaccgaccttaacgaaagtagaagggccgatgttcttgcttttccttcaagcggatttaccgatctcgcagagatcgtttctcgaattgaaccccctactagctatgtctcggatgggtgtgcggatggagaggaatccgattgcctgacggagtacgaagaggatgctgggccagactgctcacgggacgaaggcggtagccccgagggagcctctccgtcaacagcctcagaaatggaagaggaaaaaagcattctgagacagcggagatgtttaccccaagaaccgcctggatctgccaccgatgcctag

SEQ ID NO: 234144 - DNA, 3984 bp, synthetic construct
  misc_feature 1..3984: note = Description of Artificial Sequence: Synthetic coding sequence
  source 1..3984: mol_type = other DNA
atggaagctcccctgcaaactggtatggtcctgggagtcatgatcggcgctggggttgcagtggtggtgaccgctgtgctgattcttcttgtcgtgcgacggctaagagtcccgaaaactccagccccagacggccctcgttatcgtttccgcaagcgcgacaaggttctcttctatggcagaaagatcatgcgaaaggttagccagtccacttccagcctggttgacactagcgtatccgccacgtcgcggcctcgaatgagaaaaaagctgaagatgctgaatatagctaagaaaattttgcgcatacaaaaggaaacccccacgttacagaggaaagagccccctcctgctgtgcttgaggcagatctgacggaaggggatttggcaaactcccacctgccatctgaggtgttatacatgctgaagaacgtgcgagtactggggcattttgagaagccgctttttcttgagttatgtcggcatatggtgttccaaagattgggtcagggagattatgtgttcaggcccggtcagccagatgcttccatctatgtagttcaagacggccttctcgagctgtgtttgccaggccctgatggcaaggaatgtgtagtgaaggaggtggtccctggcgacagcgttaattcccttctctctattctcgatgtgattacaggccatcagcatcctcagagaacagtctccgccagagccgctcgtgactcaactgtacttcgtctccctgttgaagctttctcagccgtctttaccaagtatcctgaatcccttgttagggtggtccagattataatggtacgtctccagcgggttacttttttggccctgcacaactacctgggcctgaccaatgagcttttcagccatgagatccagccactccggcttttcccaagcccgggactgcctactaggacttcacccgtccgcggatcaaaaaggatggtgagcacttccgcgacagacgagcctcgagagacaccgggaagaccccctgatcccacaggagcgccattgccaggcccaactggagaccctgtgaaaccaacttccttggagaccccctccgcgccactcctaagcagatgcgtctccatgcccggtgatatatccggactccagggcggaccgcgaagtgattttgacatggcttacgaaagaggtcgcataagcgttagtctgcaggaagaagccagcggcggaagcctggccgcacctgccaggacaccaacacaagaacctagagagcaacccgcaggagcgtgcgaatactcctactgtgaggatgagtctgctacggggggttgtcccttcggcccatatcaaggaagacagacatcgtccattttcgaagccgctaagcaggagcttgccaagctgatgcgtatagaagacccctctctgctaaacagccgcgtgttgttgcaccacgccaaagcaggcactataatagctcggcagggcgaccaggacgtttctttgcatttcgtactttggggctgcctgcacgtgtatcagcggatgatagacaaagccgaggacgtgtgcctgtttgttgcccaaccaggagagttggtgggacagctggctgtgctgaccggcgaaccattaatttttaccttgcgtgcgcagcgggactgtacatttctacgcatttccaaatccgatttctatgaaatcatgcgcgcacagcccagcgtggtgctaagcgcagcccacacagttgctgctagaatgtctccctttgttaggcaaatggattttgcgattgattggactgctgtggaggctggccgtgccctgtataggcagggcgataggtctgattgtacttatattgtgctgaacggacggctgcgttcagtgatccagagaggcagcggcaaaaaggaactggtcggagagtatggacggggtgatttgatcggtgtcgtggaagcgctgactcgtcaaccacgagccaccactgttcatgcggtgcgagacactgaacttgcaaaattgcccgagggcaccctggggcacataaagcggagatatccccaggtggtgacgagactcatccatcttttgagccaaaagattttaggcaacctgcagcagctgcaaggtcctttcccagcagggtcaggacttggagtcccacctcactccgagctgaccaacccagcgtctaacctggcaaccgttgccatcctgccggtatgtgcagaagtacctatggttgcatttaccttggagctccaacacgcacttcaggccatcggcccaacgctgctcctcaatagcgacatcatcagggctaggttaggggcttccgcccttgattccatccaggagtttcggctttccgggtggttagcacaacaagaagacgcacataggatcgttttgtaccaaaccgatgcctccttgaccccttggactgtcaggtgcctgcgacaggcggattgtattcttattgtgggcttaggggaccaagagcccactctgggccaactggagcagatgcttgagaatacggctgtgagagccttgaagcaactggtactgctgcatcgcgaggagggggctggccctacacgcacggtggaatggctgaacatgaggagctggtgtagtggtcacctgcaccttcgctgccctcggcgactattttctcggagatcccccgcaaaactgcacgagctctatgaaaaggtgttctccagacgcgctgatcgccattctgacttttccagactggctagagttctgaccgggaacacaatcgcgctggtcctcggtggtggaggcgcacgcggatgcagtcacattggtgtgcttaaggcattggaagaagccggagtgcccgtggacttggtcggagggaccagcataggtagttttattggggcattatacgcggaggagaggagcgcgagtcgaacgaagcaacgtgcgagggagtgggccaagtctatgacatcggtactggagcccgtgctggaccttacctatccggtgactagtatgttcacgggctcggcttttaaccgaagtatccatcgcgtgttccaggacaaacagattgaagacctgtggttaccctattttaacgtcacaaccgacattacagcatctgcaatgcgcgtccataaggatggaagcctctggcgctacgttcgggcaagtatgacattatccggctacctgccccctttatgtgacccaaaagacggccacctgttgatggacgggggttacattaacaacctccccgctgacattgccaggtctatgggggcaaaaacagtgatcgccattgacgtgggttcccaagacgaaactgacctatctacttacggggactcgctgtctggatggtggctgctatggaagcgcctaaacccttgggctgataaggtcaaggtgcctgacatggctgaaatccaatcccgcctggcttatgtctcctgcgtgagacagctggaagttgtcaaaagtagtagctattgcgagtaccttaggccgcctatagactgcttcaagacgatggactttggcaagttcgaccagatctatgatgttggttatcagtacgggaaggccgtgttcgggggttggtcccggggtaacgtgattgagaagatgcttacagatcgcagatcaaccgatctgaacgaaagtcgccgagctgatgttttagccttcccatcatctggctttacggacctggctgagattgtgtcacggattgaaccacccaccagttacgtgtcggacggttgcgccgacggggaagagtcagactgcttaactgaatacgaggaggacgcgggacccgactgctcccgagatgagggcggtagcccagaaggagcttctccatctactgccagtgagatggaagaagagaagagcatattacgacagcggcgatgcctgcctcaggagcccccagggtcagccaccgatgcttag

SEQ ID NO: 234145 - DNA, 1371 bp, synthetic construct
  misc_feature 1..1371: note = Description of Artificial Sequence: Synthetic coding sequence
  source 1..1371: mol_type = other DNA
atgaggaaagtctcccagagcacatcttctctcgtagacacttcggtctccgccacctctcggccaagaatgaggaaaaagttgaagatgctcaatatcgccaaaaaaatactcaggatccagaaggagacacccaccctccaacgaaaagagccccctccggcagttctcgaggcagatctgactgaaggagacctggctaactcacacttgccaagcgaggtgctgtacatgctaaaaaacgtacgggtgctcggtcacttcgaaaagccactcttcctcgagctctgtcgccacatggtatttcaacgactggggcagggagactacgtcttccgtcctggccagcccgacgccagcatatacgtggtgcaagatggtctgttggagctgtgtctcccgggaccagatggaaaggagtgtgttgtcaaggaggtcgtgcccggagatagcgtcaactctctgctgtctatcctggacgttatcaccggacatcaacacccacagagaactgtgtccgcccgagccgctagagactctacagttctccgcctccctgtcgaagccttctcggccgtcttcacaaaataccctgaatcgctggtccgtgtggttcagatcataatggttcggttgcagcgagtcacgttcctcgctctgcacaactacctgggcctgaccaacgagcttttcagccacgaaatccaacctttgagactgtttccgtcacccggactgccaacacgaacctccccagtcagaggctctaagaggatggtctctacatcggctaccgacgagcccagagagacacctggtagaccccctgaccctaccggggctcccttgcccggtcccaccggcgatcctgtcaagccaacttcactcgaaaccccatctgcgccactgctcagccgatgcgtgagcatgcctggcgacatttctgggctgcaggggggtcctaggagtgacttcgatatggcgtacgagcggggaagaatttccgtttcattgcaggaagaggcaagtgggggttctttggcagctcctgctaggacgccaactcaggagccaagggaacagccggctggggcttgcgagtactcctactgcgaagatgaatcagccacgggtggatgtcctttcgggccataccaggggaggcagaccagctccatttttgaagcagctaagcaggaactggccaagctgatgcgaattgaggacccgagtctgcttaatagtagagttttactccaccatgccaaagccggaacgattatcgctagacaaggcgaccaggacgtgagcggtcctcacacggggcttacctgtcccgagagagggtgtagtgtcgcgttgatgacctag

SEQ ID NO: 234146 - DNA, 3903 bp, synthetic construct
  misc_feature 1..3903: note = Description of Artificial Sequence: Synthetic coding sequence
  source 1..3903: mol_type = other DNA
atggaagcaccgttgcagacaggcatggtgctcggtgtgatgattggggctggggttgcagtggtggtgactgccgtactgatcctcttggtggttaggcggctgcgggtccctaaaactccagctccagacggccctcggtacagattcagaaaaagggataaggttctcttctatggccgtaagattatgagaaaggtatcgcaaagtaccagctctttggttgatacgagcgtttcagctaccagccgaccacggatgcgaaagaagttaaagatgctcaatatcgccaaaaagatacttagaattcagaaagagactcctaccctacagcgcaaggagcctccaccagcagtgcttgaggcagacctgacagagggtgaccttgccaattcgcatctgccatctgaggtgttgtacatgctgaagaacgtgcgcgtgctggggcattttgaaaagccccttttcctagagttatgtcggcatatggtgttccagcggttaggacagggagattacgtgtttaggcctggacagcccgatgccagtatatatgttgtacaagacgggctgctggaactgtgtctgcccggtcccgatggtaaggagtgcgtggtcaaagaagtggttcccggagatagcgtaaactcgctgctgtcgatactggatgtgatcacaggacatcaacaccctcagcgaaccgtgagcgcacgtgccgctagggattcgaccgttctgcgattgcccgtggaggcattcagcgctgttttcacaaaataccccgaatctctggttagggttgtccagattattatggttcgcctgcagagagttacctttctggccctccacaactacctggggctgactaacgaactgttcagccatgaaatacaacccttgaggcttttccccagccccggtctgcccacccgcacttctcccgtgaggggatcgaagcgcatggtgagtacctcagcgacagacgagccgcgtgaaactcctggtagaccgccagaccctacgggtgctcccttgccagggccaacaggggatccagtgaagccaacttcattagagacccccagtgcccctttgctgagcagatgtgtttctatgccgggagacattagtggactgcaaggaggcccacgctctgactttgatatggcctatgagagaggacggatctctgtgagcctgcaggaggaagcgtcaggcggttccctcgccgctccggcaaggaccccaactcaggaaccccgagaacagcctgcaggggcttgtgaatatagttactgtgaggacgaatctgccacaggaggatgcccctttggcccataccagggccgacaaacgtctagtatctttgaggctgcaaaacaggagctagccaaactgatgcgtattgaggatgtctctctccactttgtcctgtggggatgtctgcacgtgtaccaaagaatgatagacaaggccgaggatgtatgtctctttgttgcccagcccggtgaactggtggggcaacttgctgtccttactggagagcccctgatttttacactcagggcccagagagattgtacgtttctgaggataagcaaaagtgacttctatgaaatcatgcgcgctcagccatccgtcgtactgagcgccgcacacaccgtcgccgcacggatgagccccttcgtgagacagatggatttcgctatcgactggactgcagtggaggcaggaagagccctgtacagacaaggggaccgcagcgactgcacatacatcgtacttaacggaagattacggagcgtaattcagcgaggctccggaaaaaaggaattggttggcgagtacggcaggggcgacctcattggtgtcgtggaggccctgaccagacagcccagggcaactacagttcacgctgtgagggatactgagctggccaagttacccgaaggtactctcggccacattaagaggaggtacccccaagtcgttacccgattaattcatctgttatctcagaagattcttggaaatctgcagcaattgcagggcccttttccaggatccggactgggagtgcccccacattcagagctaacgaaccccgcttccaacttggccacggttgctatcctgccagtctgtgccgaggtcccaatggtggctttcactctcgaacttcaacatgctctacaggcgattggcccaacactgctgctaaactcagatataataagggctcgtctgggggcatcagctcttgatagcatccaggagttcaggctatcaggatggcttgcgcagcaggaagatgcccaccgaattgtgctgtaccaaactgacgcctccctgaccccctggacagtgcgttgcctgaggcaggccgattgcattctgattgtcggcttgggagatcaggagcccacacttggccagcttgaacagatgctggaaaatacggccgttagagctctcaagcagcttgtgctgctacacagggaggaaggggcaggcccaacacggactgtcgagtggctgaacatgaggtcatggtgctctggacacctgcacctgaggtgtccccgaaggttgttcagtcggaggtctccagccaaactccatgaactttatgaaaaagttttctccagaagagccgatcgccactccgatttctccagattggcaagggtgttgaccggaaacacaatagccttagtcctgggcggtgggggagcacgcggttgcagccacatcggagttcttaaggcgcttgaggaagccggagtgccggtcgacctggtaggcggtacaagtatcggaagtttcatcggcgcactctacgcagaagagcgatctgcgagtagaacaaagcagcgggcaagagaatgggcgaaaagcatgacaagcgtcctcgaacctgtcctggatttgacataccccgtgacctcaatgttcaccgggtcagcattcaataggtctatccaccgtgtttttcaggataaacagattgaggacctgtggttgccttactttaacgttaccaccgatattacggcctctgccatgcgagtgcataaagatggctcgctttggcggtatgtcagggccagcatgacactgagcgggtacctgccaccgctgtgcgatcccaaagacggccatctgctcatggatgggggatatatcaacaacctgccagccgatatcgcccgttccatgggagctaagactgtaattgcgatcgacgtcggtagccaagacgagactgatttgtcaacatacggggacagcctttcgggatggtggctcctctggaaacgcctgaatccttgggccgacaaggtcaaagtcccagacatggctgagatccagtcacgcctcgcttatgtgtcctgcgtgcgacagctggaagtggtaaagtccagttcatattgcgaatacctgaggcctccaatcgactgctttaaaaccatggactttgggaagttcgatcagatctatgacgtgggatatcagtatgggaaagctgtttttggcggttggtcaagaggcaacgtcatcgagaagatgctgactgatcggcgatctactgatctcaacgaaagcagaagggcagatgtgttagcctttccttcctctggattcactgatctggcagagatcgtatcccgcatagagcccccaacctcttatgttagcgatgggtgtgccgatggggaggagtcggattgccttaccgagtatgaagaggacgctggccctgattgtagccgagatgagggaggttccccggagggcgcaagtccatctacagcttctgagatggaagaggagaaaagtatcctccgacagcggaggtgcctcccccaggagccaccgggttcggcaacagacgcctag

SEQ ID NO: 234147 - DNA, 3954 bp, synthetic construct
  misc_feature 1..3954: note = Description of Artificial Sequence: Synthetic coding sequence
  source 1..3954: mol_type = other DNA
atggaagaagaaaaggatgacagccctcagctgaccggcattgctgtgggcgcactgctggccctcgcactcgtgggagtgctcatcctattcatgttcaggcgactgcggcagttccgtcaggcgcaaccaaccccacagtaccgctttcgcaagagagataaggtcatgttctacggacggaaaatcatgcgaaaggtgaccactctccccaacacactggttgagaacactgccttaccgagacagcgcgcacggaagcggacaaaagtgctgtccctcgccaagcgcattcttcgattcaagaaagagtatccagctttacaacctaaggaacctcccccatccctacttgaggccgacttaacagaattcgatgtgaagaatagccacttgcctagcgaagtcttatatatgctcaagaacgtccgtgttctgggccacttcgaaaagcccctgtttctggagctctgtaaacacatcgtcttcgtgcagctacaggaaggcgagcacgtgttccagccacgtgagccagatccctcgatttgcgtagtgcaggatggtcgccttgaagtctgtattcaggatacagacgggaccgaggtggtggtgaaggaagtgctggcaggcgactccgtccacagtttgctgtcaattttggatatcattacagggcacgccgcaccatacaaaaccgttagcgttagggcggctattccttcgaccatcctccgcttacctgctgctgcttttcatggggtgttcgagaaataccctgagactctggtgcgcgtggtacagataattatggtccgactccaacgtgtgactttcctggcactgcacaattacttgggactgacaacggagctgttcaatgccgaatcgcaagctattccactggtgagcgtcgcttctgttgctgccggtaaagcaaagaagcaggtgttctacggggaagaggagaggttgaaaaagccccctcggctccaggaatcatgcgatagcgatcatggtggaggtaggcccgcagcagccggaccactcctgaaacggtcgcattcagtcccagcccctagcattcgtaagcagatacttgaggagctggagaagcctggcgctggcgatcccgacccctctgcaccccaggggggtcccggttccgcgaccagcgatctgggcatggcatgtgacagggcccgagttttcctccactctgacgaacatcccggaagcagcgtggcaagcaagtcaaggaagtccgtgatggtggctgagatcccgtccaccgtgagccagcattcagaatcacacaccgatgaaactctggcttccaggaagtcggacgctatcttcagagcagccaagaaggacctgcttactctgatgaagctcgaggactcctccctacttgacggtcgtgtggctttgttgcatgtcccagctggtactgtagtgagtagacagggggatcaagacgctagcattctgtttgtagtctcaggtctactccatgtataccagaggaagataggttctcaggaagatacttgcctgtttctaacgcgacctggagagatggtggggcagctggccgtattaactggcgagccactgattttcaccgttaaagctaaccgagactgttcattcctaagtatatccaaggcccacttctatgaaattatgcgaaaacaacctaccgtcgtactgggggtggcccacactgttgtaaagcggatgtcctcatttgtccggcaaattgacttcgctctcgattgggtcgaagtggaagccggacgtgccatttatcggcagggggacaagagcgactgtacttacattatgctctcagggagactgagatctgtcattagaaaggatgacggcaagaaacgtctggccggagaatatggcagaggcgatttagtcggggtggtggagaccctgacccaccaggcgcgtgctacaactgttcacgctgtgagggacagcgaactggctaaattacctgccggagccctgactagtattaagcgccgatatccccaagttgttacgaggctgattcatttgctgggggaaaagattctgggatctctgcagcagggccctgtaacaggccatcaactgggcctgccgacagagggaagcaagtgggatcttggcaatccggctgtgaacctttccacagtggctgtgatgcccgtttccgaagaggtaccccttaccgccttcgctctcgagttggaacatgctctctctgctattggaccaaccctgctgttgaccagtgacaatatcaagagacgcctagggagcgcagcgctggactcagttcacgaatacagacttagttcatggctgggccagcaagaagatacacacaggatcgtgctgtatcaggtggacggcacactcacgccgtggacccagagatgtgtgagacaggccgactgtattctgattgtcggtttgggggatcaggagcctacagttggcgaactggaaaggatgctggagtccaccgcagtgcgggctcagaaacaattaatcctactgcacagagaagagggccctgcacccgcacggacagtggagtggctgaacatgcggtcctggtgcagtgggcacctgcacctgtgctgcccacgcagagttttcagtaggcgctctctgccaaaactggtggagatgtataagcacgtgtttcagcggccaccagacagacactctgacttttctagactcgctcgtgtgctcaccgggaacgcgatagcgctagttctgggtgggggtggcgctcggggttgtgcgcaagtgggcgtcttaaaagctctggccgagtgtggcataccggtcgatatggtaggaggaacttcaataggtgcattcgtgggcgctttgtacagcgaagagaggaactatagtcagatgaggatcagggcaaaacagtgggctgaggggatgacctcactgatgaaggccgcattggacctgacctatccaattaccagcatgttttcaggggctggcttcaactcttcaatcttctccgtgtttaaggaccagcagattgaggacttgtggataccgtacttcgctattaccacagatattacagccagcgccatgagagtacataccgatggaagtctgtggtggtacgttcgggcaagcatgtcactgagcgggtacatgcctcccttgtgcgaccctaaggatggccacctgttaatggacggtggttacattaataatctgccagccgacgtggcaagatctatgggtgccaaagtagtcatcgcgattgatgtcggatctcgcgacgagacagatctaacgaactatggtgacgccctaagcggctggtggctgctatggaaacgctggaatcctttggcaaccaaggtgaaagtgctgaacatggctgaaatacagacccgattggcctacgtttgctgcgtgcggcaattagaggtggttaaatcttccgattattgcgaatatctgcgtcctccaattgacagctattcaacactggattttggtaaattcaatgaaatttgcgaggtgggttaccaacacgggcgaaccgtgttcgatatatggggcaggagcggagtcttagaaaaaatgctgcgagaccagcagggcccttctaaaaaaccagcttccgctgttctgacctgccccaatgcctcattcaccgacctggccgaaatcgtgtcgagaatcgagccagccaagcctgctatggtcgatgacgaatccgattatcagacagagtacgaagaagagctcctggatgtccccagggacgcttatgccgattttcagtccacctctgcccagcaaggctcagatctggaagacgagtcctccctcagacaccgccacccatcgttggcctttccaaagctgagcgaaggcagtagtgatcaggatgggtag

SEQ ID NO: 234148 - DNA, 2178 bp, synthetic construct
  misc_feature 1..2178: note = Description of Artificial Sequence: Synthetic coding sequence
  source 1..2178: mol_type = other DNA
atggtgagactccagagagtaacttttcttgcccttcacaactacctgggcctgactacagaactttttaacgctgagtcacaagccatacctctggtctcggtggcgtccgtggccgctggaaaggccaagaaacaggttttctacggcgaggaggaaaggctgaagaagccaccacgcttacaggaaagttgcgattctgccgaccatggcggtggcaggcccgctgcagctggcccactgctgaaaaggtcacacagcgtaccggcaccatcgattcgcaaacagatactcgaagagctggagaaacccggtgccggagacccagatccgagcgcacctcagggccatcaattggggctgcctaccgaaggaagtaagtgggacctggggaatcccgctgttaacctgtccacagttgccgtgatgccagtgagcgaagaggtaccactaacggcatttgcactggaacttgagcacgccctctcagctatcggccctaccttgctgctgacatcagacaacatcaagcgcaggctcggatcagcagctttggactctgttcacgaatataggctaagcagttggttgggacagcaggaggacactcatcgtattgtgctgtatcaggtcgatggaactctcacaccctggacccagcgatgcgtgaggcaggcagactgcatcctcattgtgggcctgggcgaccaggaacccaccgtcggcgagctggaacgaatgctggaatcaactgccgtccgggcacaaaaacaattgatcctccttcaccgagaagaaggcccagcacccgcacggactgtggaatggctcaatatgaggagttggtgtagtggccacctgcatctatgttgccccaggagggtgttttcccgcaggagtctgccgaagctcgttgagatgtacaaacatgtgttccagcgaccacctgacaggcactccgacttcagcaggttagcccgtgttctgaccggtaatgcaatagctttagtcttgggcggaggcggagcgcgagggtgtgcccaagtgggtgttctgaaggctctcgcggagtgtggcatcccagtagatatggtgggcggaacctcaattggcgcatttgtgggagcactgtattctgaggagaggaattacagtcagatgagaatcagggctaagcagtgggccgaaggtatgacttcgctgatgaaagctgctttggatctgacgtatccgattacatccatgttctctggagcaggcttcaacagctccatattctctgtgtttaaggaccagcaaatcgaggacctgtggatcccctacttcgctattacgacggacatcactgcaagcgctatgcgggtgcatacggatggatccttatggtggtacgtgagggcaagcatgagtctgtcgggatatatgccaccgctctgtgacccaaaggatggccatctcctgatggatggaggttatatcaataacctccccgctgatgtagcgagatctatgggggctaaagttgtaatagctattgatgtggggtcccgtgacgaaaccgacctgacgaactacggcgatgccctcagtgggtggtggctcctatggaagaggtggaatcccttagcaacgaaggtcaaagtgctgaatatggcggagatccagaccaggctggcttacgtctgttgtgtcagacagttggaagtggtcaagtcgagcgattattgcgagtatttgagaccccctatcgactcctacagcacgctggacttcggaaaatttaatgagatctgcgaggtcggctaccagcatggtaggaccgtgtttgacatctggggcaggagcggtgttctcgaaaagatgctacgcgaccagcaaggcccatccaagaaacccgcatccgccgtgctcacttgtcctaacgccagctttactgacctggctgaaattgtttcgcgaatcgaaccagctaaacccgcaatggtggatgatgagagcgactaccagactgaatatgaggaagaactgctggatgttcctagggatgcttacgcagacttccagtctacttccgctcagcaggggtcagaccttgaggacgagtcgagcttacgtcaccggcatcccagtctggccttccccaaactctcggagggctcctcggatcaggatggatag

SEQ ID NO: 234149 - DNA, 1377 bp, synthetic construct
  misc_feature 1..1377: note = Description of Artificial Sequence: Synthetic coding sequence
  source 1..1377: mol_type = other DNA
atggaggaagagaaggacgacagcccccaggcggatttctgtctggggactgctctgcattcctggggactctggtttacagaggagggttcaccttccactatgctgactggaattgcggttggggctctcctggccctagcactggtgggggtcctgatcctgttcatgtttcgaaggctgagacaattccggcaggcacagcctacaccacagtatagattcaggaaaagggataaggtgatgttttacgggagaaaaatcatgagaaaggtgaccaccctgcccaatactctggtcgaaaacaccgctctgcccaggcagcgggctagaaaacgcacaaaggtgctatctctggccaaacgtattcttcgctttaagaaagagtacccagccctccagccgaaagagccacctccaagtctgctcgaagccgacctgacagaattcgacgtgaaaaactcccatctcccgagcgaggtgctgtacatgctgaaaaacgtaagagttctgggccactttgaaaaacccctttttctggagttgtgcaagcatatcgtgttcgtgcaactgcaggagggagagcatgtcttccaaccacgcgagcccgatccaagtatatgcgttgttcaagatggccgtcttgaggtatgcatacaagatactgacggcacagaggtcgtcgtgaaggaggtcctcgctggagatagcgtacattcactactttcgattttggacataatcaccggacacgccgctccctacaaaacggtctctgtgcgtgccgctattccaagcaccattcttaggctccccgcagccgcattccacggagtatttgagaaatatccagaaaccttagtgagagtggttcaaattattatggtaagactgcagcgggtcacattcctcgccctccacaattacctgggactcaccacagagctgtttaatgcagaaagtcaagctataccccttgtcagcgtcgcaagcgtagctgcgggtaaagccaaaaagcaggtgttttacggcgaagaggagcggttgaaaaagcctcctcgtttgcaggagtcgtgtgattctgaccacggcggaggccgacctgcggcagctggacctctgttaaaacgatcacactctgtccctgcaccctcaatacggaaacagatcctggaagagcttgagaagcctggagcaggagatcctgatccctcagcccctcaggcaagagtcttgtgtcttctcccccagtgtcttgggggactcccgccaaccgacacctctgtgtactcatcagcatccagcgactgctgtggatgttcaatgccagtgttgtgtattatgggacataaaccacacgtgaccgtggacacatag

SEQ ID NO: 234150 - DNA, 3765 bp, synthetic construct
  misc_feature 1..3765: note = Description of Artificial Sequence: Synthetic coding sequence
  source 1..3765: mol_type = other DNA
atggaggaagaaaaagatgatagcccacagttgacaggcatcgccgtgggtgcactactcgcactggccctggtgggggtactgatactattcatgtttagaagactgcgccagttccgccaggcccagccaactccacaataccggttccggaaacgcgacaaggtaatgttttatggaaggaagattatgcgcaaagtaactactctgccaaatactcttgttgagaatacggctttgccaagacagagggcacgaaaacggactaaagttttgagcctcgccaagcgcatactccggttcaagaaggagtaccctgctctccagccaaaggaaccgcctccgtctttgctagaagccgatctaaccgagttcgacgtcaaaaactcccacctcccaagtgaggtgttgtatatgctgaagaacgtccgcgtgctgggacacttcgagaaaccactcttcctcgaactatgtaagcacatcgtcttcgtccagctccaggagggcgagcatgtgttccagccacgagagccagatccaagcatttgcgtagtgcaggatgggcgattagaggtatgtatccaggacaccgatgggactgaagtagtggtgaaggaagtcctggctggggactcagtccattccctgctgagcattctggatatcatcacaggacacgccgctccctataaaacggtcagtgttcgcgcagccatcccctcgacgatcctgcgtttacccgcagcagcgtttcatggcgttttcgaaaaatatcctgagaccctggttagggtggtgcaaatcatcatggttcgtctacagagggttacctttctggccctgcacaactatttaggcctgaccacagaactgttcaacgcggaaagtcaggccatccctcttgtcagcgtcgccagcgtggccgcagggaaggccaagaaacaggtgttctatggcgaggaggaacggctgaagaagcctccacggttacaggaaagttgcgacagtgaccatgggggaggcagacccgctgcggctggccctttactgaaacggagccacagcgttcctgcgccatccatcagaaagcagattttggaggaactggaaaaacctggagccggagaccctgacccatctgctccgcaggggggtccaggttccgcaacatctgacttagggatggcctgtgacagagccagagtgttcctgcactccgacgaacatcccggatcatctgtggcatctaaatcacggaaaagcgtgatggtcgcagagatcccaagtactgtgtcccagcatagcgaaagtcataccgatgagaccctggcgtcccgtaagtccgacgcaatcttcagggccgctaagaaagatttactaactctcatgaagctcgaggatagttccttgctcgatgggcgagtcgcccttttgcatgtcccggctgggacagtcgtcagcaggcagggtgatcaggacgcgtcaattttgtttgtggtgagcggtttattacacgtctatcaacgcaaaattgggtcccaggaggatacatgcctgtttctgaccagacccggagaaatggtcggacaattagcagtgctcaccggcgagccactgatctttactgtgaaggcgaatagggattgcagcttcttgtcaattagcaaggctcacttttacgaaattatgcgcaagcagcccactgtggtgctgggagtggctcatactgtcgtcaagagaatgagctcatttgttcgacagattgattttgccctggattgggtggaagtggaggctggacgtgccatctaccgtcagggtgacaagtcagactgtacgtacatcatgctctctggcagactgcggtcagtaattcggaaagacgatggcaaaaaacggctcgccggagagtacggcaggggcgatctcgtcggcgttgtggagaccctgactcaccaggctagagccactacagtgcatgcagtgcgtgatagtgagctcgctaagcttcccgctggggcacttacgagcattaagcggcgatacccccaagttgtgacccgcttaattcatctgctgggagaaaagattttgggctccctgcagcagggcccagtgaccggacaccaattaggtctccccacagaggggtcaaagtgggatctagggaaccctgctgtcaacctatctacagtggccgtcatgcctgtctctgaggaagtacctctcactgccttcgccctcgaactggagcatgctcttagcgcaatcgggcctactcttttattgacgtcagacaatatcaaacgaagattgggctcagctgctctggattctgtccacgagtatcgcctaagctcttggctgggccagcaagaggacacacacagaatcgtgctctaccaagttgatggcactctcactccatggactcagcggtgtgtgcgtcaggcagattgtatcttaattgtgggcttaggcgaccaggaaccgactgtgggagagttagagaggatgttagaatcaacagctgtgagagcacagaaacagcttatactgcttcatcgtgaagaggggcctgccccagcgcgaaccgtggagtggttaaatatgagatcctggtgttcaggacacctccacctttgctgtcctagacgcgtattttctcgtcggtcccttccaaagctggttgagatgtataagcatgttttccaaaggccacctgatcggcatagtgacttcagcaggctagcccgtgtactgaccgggaacgcgatcgccctcgtgctgggtggaggcggagcacgcggatgcgctcaggtcggggtgctaaaggccttggcagagtgtgggataccagtggatatggtgggcggtacctccataggggctttcgttggcgctctgtactctgaagagcgcaattactcccaaatgagaatccgtgcaaaacaatgggcagaggggatgaccagcctgatgaaggctgccctggacttgacgtatcccattactagcatgttctcaggagccggatttaattcatctatctttagcgttttcaaggatcaacagattgaggatctctggattccttatttcgctattaccactgacatcactgctagtgccatgagggtccatactgacggatcactctggtggtacgtccgggcaagcatgagtctaagtgggtatatgcctccactgtgcgaccccaaggatggccacctcctcatggacggcggatatataaacaacctgcctgctgacgtggccaggtcgatgggggctaaagttgtgattgctattgatgttggttccagggatgaaactgatttgacaaattatggagacgctctttcagggtggtggctgctttggaagcgctggaaccccctggctaccaaggtgaaagtgctgaacatggccgagatacagacgcgactggcctatgtgtgctgtgtgaggcagctagaagtagtcaagagctcggactattgtgaataccttcgaccaccaatcgatagctatagtacccttgacttcggcaaatttaatgaaatttgcgtgcctgacgaatccgattaccagaccgagtacgaagaggaactacttgacgtgcccagagacgcctatgccgactttcagagcactagtgcacagcagggaagtgacttggaggacgagagctctctaagacatcgccatccaagtctggccttccccaagctatccgaaggatcctctgaccaagacggctag

SEQ ID NO: 234151 - DNA, 2772 bp, synthetic construct
  misc_feature 1..2772: note = Description of Artificial Sequence: Synthetic coding sequence
  source 1..2772: mol_type = other DNA
atggcatgcgatcgcgctagagtctttttgcactcagatgagcatcccggatcctctgtggcctccaagtccaggaagtctgtgatggtcgccgagattccaagcaccgtgagtcagcattcggaaagtcatacagacgaaacactagccagcaggaagagcgatgccatcttcagagccgcaaaaaaggaccttttaacgctgatgaaacttgaagactcgtccctgttggacggtagggtggccttactgcacgtaccagcaggcaccgtcgtgtcgagacagggggaccaggacgcatcaattctcttcgtggtgagcggactgctacacgtgtaccagcgcaagattggcagccaggaagacacttgcctctttctaacacgaccaggggagatggtggggcagctggccgtccttaccggcgaacctcttatattcaccgtgaaggccaacagagattgcagctttctgagtatcagtaaggcacatttctatgaaatcatgcggaaacaacctaccgtagtcctaggggttgcccatactgtggtgaaacggatgtcctccttcgtccgccagattgattttgcccttgattgggtggaggtcgaggccggaagggcaatttacagacagggagacaaaagtgattgcacatacataatgctgtctgggaggcttcgctctgtgattaggaaggatgacggaaaaaagaggcttgccggagaatatggaagaggagacctggtgggtgtagtcgagactctcacacaccaggcaagggctacgactgtgcacgctgtccgcgacagcgagctggccaagcttccagcaggcgctcttacatccatcaagagacgatacccacaggtggtcacaagactgatccacctgctcggagaaaaaatccttggatctctccagcaaggccctgttaccggtcatcagctcgggcttccaactgagggctccaaatgggacttgggcaaccccgcagtgaatctgtccacggtggccgttatgccggtaagcgaggaagttcccctaaccgctttcgctctggaactggaacacgccctaagtgctatcgggccaacattacttctgacttccgacaacattaagcgaaggttgggaagcgctgcgctcgactcagtccacgagtatcgactcagctcgtggctaggacagcaggaggatacacacaggatcgtgctctaccaggtggacgggacgctgacaccatggacgcaaagatgcgtaaggcaagcggattgtatccttattgtgggcctaggggaccaagaaccaacagtcggggaactggagagaatgttggaatctactgcagtgagggctcagaaacaactgatactcctccatcgagaggagggacctgcccctgctagaaccgtggagtggttgaatatgcgttcctggtgctcaggccatctccacttgtgttgtccgagaagagttttttctcggagatcacttccgaagctggttgagatgtataagcacgtttttcagaggcctccggaccggcattcggatttcagtagactggccagagttcttaccggtaacgctatcgcattagtactgggaggcggaggcgctaggggctgtgcacaggtgggtgtgctcaaggcacttgctgagtgtggcattccggtcgatatggtgggtggtacttctataggagcgttcgtgggcgctttgtacagcgaggagcggaattattctcagatgcgaatcagagctaagcagtgggccgaaggtatgacttctctaatgaaggccgcacttgacctcacatacccaattaccagcatgttttctggcgctggtttcaacagttctatcttcagtgtctttaaagatcagcagatagaggacctgtggatcccctatttcgctatcacgaccgacatcacggcaagtgctatgagagttcacacggacggttccttgtggtggtacgttagggcctccatgtctctcagcggatatatgccaccactgtgcgaccctaaagatgggcacctactgatggacggtggatacattaataatttgccagcagatgtggcccgtagcatgggggcaaaagtcgtgatcgccatcgacgtggggtcacgggacgaaaccgacctcactaattacggcgacgctctgtccggctggtggttgctgtggaagcgctggaacccactcgcgactaaagtcaaggtcctgaacatggcggaaattcaaactcgcttagcctatgtgtgttgcgtgagacaactggaagttgtgaaaagttcagactattgtgaatacctccgtccccctatagatagctattcaactctcgacttcgggaagtttaacgaaatttgcgaggtgggatatcagcacggcagaactgtgtttgacatttgggggaggtccggagtgcttgagaagatgctgagagatcaacaggggccttccaagaagcccgcaagtgccgttctcacctgtcctaatgcaagcttcacagatctcgcggaaatcgtaagtaggattgagcccgctaagccagctatggttgacgacgaatccgattatcagacggagtatgaagaggagctgctagacgtgcctcgggacgcctacgccgacttccagtcaacatcagcccaacagggatcagatctggaggacgaaagtagcctccggcaccggcacccttccttggcatttcctaagctgagcgaaggtagctccgaccaagatgggtag

SEQ ID NO: 234152 - DNA, 4029 bp, synthetic construct
  misc_feature 1..4029: note = Description of Artificial Sequence: Synthetic coding sequence
  source 1..4029: mol_type = other DNA
atggaagaagagaaagacgactcaccccaggctgatttctgtctggggaccgcactgcactcatggggactgtggtttacagaggaaggatctccatctactatgctcaccggtatcgccgtgggtgctctcctcgccctcgcgctcgttggggtgctgatcttgttcatgttcagacggcttcgccagttcagacaggcacaaccaactcctcagtataggttcaggaagcgagataaagtcatgttctatggcaggaagatcatgcgcaaggtgaccacactgccaaacaccctagtcgaaaatactgcgctgccaagacagcgggctcgaaagcggaccaaagtactgagcctcgcgaaaaggatcctgagattcaagaaagagtaccccgcactccagcccaaggagcctccaccaagcctgcttgaggctgatttaacagaattcgatgtgaagaacagtcatctcccatccgaagtgctgtacatgctcaaaaatgtccgggtgttggggcactttgagaagcccctcttcttagaactgtgtaaacacatcgtgtttgttcagctgcaggaaggggagcacgtgttccaacccagagaacctgatccaagcatttgtgtggtgcaggacgggcgacttgaggtgtgtatacaggacactgatggaaccgaggttgtggtgaaggaagtgctggctggcgactccgtgcacagcttattaagtattctcgacatcataacaggacacgcagcaccgtacaaaaccgtttcagttcgtgccgcaattccttctacaattttgaggctgcccgcagccgcattccatggagtctttgagaaataccctgaaaccctcgtgagagtggtgcagataatcatggtccggctgcagagggtgacatttctggccctgcataactatctgggtctcactactgagttgtttaatgctgagtcccaagcaatccccctggtttcagtagctagcgtggccgcaggtaaagcaaaaaaacaggtgttctatggagaggaagaacggctcaaaaagcctccacgccttcaggaaagctgcgactccgatcacgggggaggccgaccagcagcagcaggacctctgttgaagagatctcactcggtaccagccccatccatccgcaagcagattctcgaagaacttgagaaacctggcgcaggcgatcctgaccccagtgcgcctcaagggggtccgggtagtgccacatccgacctgggaatggcatgcgatagggcccgtgtgttcctgcactccgatgagcaccctggtagctcagtggctagcaagtctcggaaaagtgtgatggttgctgagatcccaagcacagttagccaacatagtgaatcccacacggacgagaccctcgcaagtcgcaagagcgatgccattttccgagctgccaaaaaggatctgctgactctcatgaagctcgaagactcatctttgctggatggccgtgtcgccctccttcacgtcccagccggaacagtggtgtctcgccagggggatcaggatgccagcatactttttgttgtgtcagggctgctgcacgtgtatcagagaaagattgggagccaggaggatacctgtcttttcctgacaaggcccggagaaatggtggggcagctggctgttctaacgggtgagccactcatctttaccgtcaaggctaacagggactgttcgttcctaagtattagcaaggctcatttttacgagattatgagaaaacagccaaccgtcgtcctgggtgtggcccatacagtagtgaagagaatgtcctcattcgtgcgccagattgattttgcactggactgggtggaagtcgaggctggcagagccatctaccggcagggggataagtcagactgcacctacataatgctgagtggcagattacggagcgtgatccgcaaagacgacggaaaaaaacgattggcgggtgagtacggtcgaggcgatctggtgggagtggtcgaaacgctgactcaccaagctagggcgactacagtgcacgccgtgcgggactctgaacttgccaaactcccagcaggagcattgaccagtatcaaacggaggtatcctcaagttgttacccgattgatacacttactgggagagaagatcctcggctcgctccagcaagggcctgtcactgggcatcaactagggctccccactgagggaagtaagtgggatctgggtaaccctgctgttaatctgagcacggttgccgttatgccggtatcggaagaggtccccctgacggcttttgcactcgaactggagcatgctctttctgccattgggccaaccttacttctgacatccgacaatattaagcgtcgcttgggatccgcagctctcgattccgttcacgagtaccgattgtctagctggctagggcagcaggaggacactcatagaattgtcctttaccaggtagacggaaccttgaccccatggacccaacgctgcgtgaggcaggccgattgtatcctgattgtgggactgggcgatcaggaaccaactgtgggcgaactcgagcgaatgttagaatctacagcggttagggcacagaaacagctgattctcttgcaccgagaggagggtccagctccggctcggacagtggagtggctaaacatgaggagctggtgttccggtcatcttcacctatgttgtcctcggcgagttttctctcggagaagccttcccaagctcgtagagatgtataagcatgtctttcaacgcccaccagaccgacatagtgacttctcccgcctggctcgggtgcttaccggcaatgccatagccctggtcctgggcggtggcggagcacgcggttgcgcacaggttggagtgctcaaggccctggccgagtgcgggattccagttgacatggttggcggaaccagtataggggcatttgtaggagctctctatagtgaggagcgtaattacagccaaatgagaatcagggcaaagcagtgggctgaaggaatgacatcactgatgaaagccgcactcgacctcacttatccaatcacctccatgtttagcggcgctggttttaactcttcaattttcagcgtattcaaggatcagcagatcgaagatttatggattccatatttcgctatcactaccgatattacagcttccgccatgcgggtacatactgatggcagtctgtggtggtatgtcagagctagcatgtctctgtcaggctacatgcctcctttgtgcgaccccaaggatggacacctgttaatggacggcggatatattaacaacttgccagctgacgtagccagaagtatgggggcaaaggttgtcatcgcaattgacgtcggatccagagatgagacggaccttactaattatggcgacgccctgtccggatggtggctactgtggaaacggtggaacccgttagccacaaaagtgaaggtgctgaatatggctgaaatacagacaagactggcatatgtgtgttgcgtgcggcagctggaggttgtgaagtccagtgattattgtgagtatctgcgcccaccaattgatagctacagcactttagatttcgggaaattcaatgaaatctgcgaggtgggatatcagcatggcagaacagtttttgacatttgggggagatccggagtcttagaaaagatgctgcgtgaccagcaaggaccctccaagaagcctgcctcagcagtgcttacctgtcccaacgcttcttttaccgatttggccgagatagtctcccgtatcgagcctgctaagcccgctatggttgacgatgagtctgactaccagacagagtacgaggaggagctgctcgacgtgcccagagatgcgtatgcagatttccagagcactagcgcacagcagggaagtgatttagaggatgagtccagcctacggcacaggcacccctcattggcgttccccaagctctccgagggatcttccgatcaggatggttag

SEQ ID NO: 234153 - DNA, 3846 bp, synthetic construct
  misc_feature 1..3846: note = Description of Artificial Sequence: Synthetic coding sequence
  source 1..3846: mol_type = other DNA
atgctgaccggcatagccgtgggggctctccttgctctggccctcgttggcgttcttatcctttttatgttccgcagactccggcagttccgccaggcccagcccacaccacagtaccggttcagaaaaagagacaaagtgatgttctacggtaggaaaatcatgaggaaagtcactacactgccgaacaccctggtcgagaatacggctttgccacgtcaaagggcccgaaaaagaacaaaggtgctgtctctggccaagcgaatccttcgcttcaagaaagagtatcctgctctgcagcctaaagagccaccaccctctctgttagaagccgacctaactgagtttgacgtgaaaaactcacacctgccgagtgaggtgctatatatgttaaagaacgtgagggtcctggggcattttgagaaacctctctttctggagctctgcaagcacattgtcttcgtccaactgcaggaaggcgaacatgtgtttcaaccaagagaacctgacccctccatatgtgtggtccaggatggtcgcttggaagtatgtatccaagatacggacggcaccgaagttgtcgttaaagaggtccttgccggtgactccgttcattctctcctgtcaattctggacatcatcaccggccacgcggctccctataagacggtctctgtccgagccgcaattcccagcacaattttacgactccctgcagctgccttccatggagtcttcgaaaagtaccctgagaccctcgttcgagtcgttcagatcatcatggtccgtctgcagcgcgtgacctttttggctctgcacaactatctgggtttaactacggaactgtttaacgcagagagtcaagccatccccctcgtatccgtggcttcggtagcagcaggcaaagccaagaagcaagtattttacggtgaggaagaaaggctgaaaaaaccacccagacttcaggaatcgtgcgatagcgatcacggcggtggtcgtccagctgcagccggaccattgctgaagagatcccacagcgtcccagccccatcaattagaaaacagatactggaggagttagaaaaaccaggggcaggtgacccagatccttccgccccacaggggggtcccggaagcgccactagcgatttagggatggcttgtgaccgcgcacgcgttttccttcattccgatgagcatccaggttcctcggttgcttctaaaagccgtaaatccgtgatggtggccgagatcccaagcaccgtctcccagcattccgaatctcataccgatgaaacgctggcaagcagaaaatctgatgccattttccgggctgcgaaaaaagatctgctaactctaatgaagctcgaggatagttccctgctggatggcagagtggcactcctgcacgtccctgccggaacagtagtctcacgacagggcgatcaggacgctagcattctgtttgtggtgagcgggctgctacacgtataccaacgtaaaattggatctcaggaagatacgtgccttttccttaccagaccaggggaaatggtgggccagctggcggtcctgactggagagcctctgatatttacagtcaaggccaatcgcgactgctcatttctcagtattagcaaggcccacttctatgaaatcatgcgtaaacaacctaccgtggtgctgggcgtggcccacacggtagtgaaacgcatgagctccttcgtgaggcagatcgacttcgctctggattgggtggaagtggaggccggacgagctatttacaggcagggcgacaagtctgattgcacatacattatgctctcaggacggcttcgtagtgtcatcagaaaagacgacggcaagaagcgcctggcgggagagtatggaaggggcgacctcgtaggagtcgtcgaaacgctgacccatcaggcaagagccacgacggtacatgccgtccgcgattcagaattggcaaaattacctgctggagcactcactagcatcaaaagacggtatccccaagtggtaacaaggctcatacatttattgggggaaaagattctggggagtctacagcagggtccagtcactggacatcagctcgggctacccactgagggctccaagtgggaccttggcaaccccgctgttaatctcagtacagtggcagttatgcccgtttccgaggaagtgcccctgaccgcttttgcgctggagctagaacacgccctgtccgctatcggcccaacactgctgctaacatctgacaatataaagagacggttgggaagcgccgcattagactctgtgcatgagtatagactgagctcatggttaggccagcaagaagatacccacaggatcgtattgtatcaggtggacggcacgctgaccccgtggacccagcggtgtgtccggcaggctgattgcatcctgattgtcggattaggcgatcaggagccaactgtgggcgaactcgagagaatgctcgagtctaccgccgttcgagcccagaagcaattgattctgctgcaccgcgaggaggggcctgcaccagcacggactgtcgagtggttaaatatgcgatcatggtgctctggtcatttgcatctttgttgtcctcgacgcgtgtttagcaggagaagcctgccaaagctggtagagatgtacaagcacgttttccagaggccccctgaccggcatagtgacttcagtcggttggcccgagtgctcacagggaacgcaattgcgttggtcctgggcggaggaggagcgagggggtgcgcccaggttggcgtgctgaaagcactcgccgaatgcgggatcccagtcgacatggtcggaggaacctctatcggagcttttgtgggggctctctatagtgaggagcgcaactacagccagatgagaattcgcgctaagcaatgggcagaaggcatgacctcgttgatgaaggcagcgctcgacctgacatacccaattacatccatgttctcgggcgctggctttaattcttcaattttcagcgtttttaaggatcagcagatcgaggatttatggatcccctacttcgccatcaccactgatatcacagcaagcgctatgcgcgtccacaccgatggttcactttggtggtacgtgagagcctctatgagcctgagtgggtatatgcctcctctgtgtgaccctaaagacggccacctcctcatggatgggggttacattaacaaccttcccgctgacgtggcacgttcaatgggggctaaggtggtcattgcaattgacgtcggaagcagggacgagacagatctgacaaactacggtgatgcactctcggggtggtggctattatggaagcggtggaacccattggcgaccaaagtcaaggtgctgaacatggccgagattcaaactaggctcgcctacgtgtgttgtgtgcgacagctagaggtagtgaagagctcagactattgtgaatacctgcgaccccctattgacagctacagtaccctggactttggaaagttcaacgaaatctgcgaagtcggctaccagcatggacggactgttttcgacatctggggccgttctggggtgctggaaaagatgctcagagaccagcagggcccttcaaaaaagcctgcttcagcggttcttacgtgtcccaacgcctctttcacggatctcgccgagatcgtctctagaatcgagcccgctaaacctgccatggtggatgatgagtcagattatcaaactgagtatgaggaggagctgctggatgttcctagggacgcatacgctgacttccaatccacttccgctcaacagggcagtgacctttag

SEQ ID NO: 234154 - DNA, 2349 bp, synthetic construct
  misc_feature 1..2349: note = Description of Artificial Sequence: Synthetic coding sequence
  source 1..2349: mol_type = other DNA
atgagcatcaaccttactgtggacatttatatttacctgctgtctaacgccagaagcgtgtgcgggaagcagcggtcgaagcagctgtattttctatttagtcccaaacattactggcgcattagccatataagcttgcaacggggtttccatacgaacatcattaggtgcaaatggaccaagtccgaggcccatagctgttctaaacactgttattcaccaagcaatcatggtctccatatagggatcctcaagctttctacctccgccccaaaggggctgactaaagtcaacatttgcatgtctaggatcaagagcaccctgaactccgttagtaaggctgtatttggaaatcaaaacgaaatgatatcgcgactggcccagttcaagccaagttcccagattttacgtaaagtctccgattccggctggctgaagcaaaagaacatcaaacaagcaataaagtccctgaaaaaatacagcgataagagcgccgagaaatctcccttcccagaggaaaagtcacatatcatcgataaagaggaagacatcggaaagcgcagcctgtttcattatactagttcaataacaacaaaatttggggactccttctacttcctctctaatcatattaacagctattttaagcgtaaggaaaagatgtcccagcagaaggagaacgaacactttagagataaatccgaactggaggacaaaaaggtggaggagggaaagctccgttccccagacccaggaattctggcatacaaaccgggtagtgaatccgtgcataccgtggacaagcccaccagcccttctgcaatacccgacgtccttcaggtatctaccaagcagagtattgctaacttcctcagtaggcctacagaaggagttcaggccttggttgggggatatattggagggctggtgccaaagctgaagtacgactccaaatctcaatcagaagaacaggaggagcctgccaagacagaccaagcagtgtccaaagacaggaatgccgaagaaaaaaagcggctgagtctccaacgcgagaaaattatcgccagagtttctatcgataatagaacccgagcattggtccaggccctgcggagaactactgaccctaagctgtgtattacaagggtcgaagaactgactttccacctcctcgagtttccagaaggaaagggtgtcgcggttaaagaaagaataataccttacttgcttcgcttgcgacagataaaagacgagaccttgcaggccgcagttcgggaaatattggcacttattggttatgttgatccagtgaagggacgcggtatccggattttgtcaatagacggcggagggaccagaggggttgtggccctacagacactacggaagctggttgagctcactcagaagcctgtgcaccagttgtttgactatatttgtggcgtgtcaaccggcgctatcttggcttttatgttaggacttttccatatgcctttggacgagtgtgaggagttatataggaagttaggcagtgacgtcttttcacagaacgtaatcgtggggaccgtgaagatgtcatggagccacgctttctatgattcccagacctgggagaatatcctcaaggatcgcatgggctccgctctcatgatcgaaacagcacgaaatcctacgtgtcctaaagtggcagccgttagcaccatcgtgaatagggggataacccccaaggctttcgtgttccgcaactatggtcactttcctggcattaactcacactacctgggcggatgccagtacaaaatgtggcaggccattagggcatctagcgcagctcccggttatttcgctgaatatgccctggggaacgatttgcatcaggacggaggtctgttgctcaacaaccctagtgccctagccatgcacgagtgtaagtgcctgtggcccgacgtaccgcttgaatgcattgtgtcactcggcacggggaggtacgaaagtgacgttagaaataccgtcacttatacctctctcaagaccaaactcagcaatgtcataaatagtgcaactgacaccgaagaagtgcacatcatgctcgatggactcctgccccctgatacatatttccgctttaacccagtgatgtgcgagaatatcccactggacgaatcccgtaatgaaaagctggatcagctgcaactagaaggcctgaagtatatagaacgcaacgaacagaagatgaagaaagtggccaagatattatcccaggagaagaccacactccagaaaatcaacgactggatcaaactgaaaacagatatgtacgaggggctgccgtttttttcaaagctgtag

SEQ ID NO: 234155 - DNA, 2163 bp, synthetic construct
  misc_feature 1..2163: note = Description of Artificial Sequence: Synthetic coding sequence
  source 1..2163: mol_type = other DNA
atgtccataaatctgacggtggatatctacatctatctgctaagtaatgcgagatcagtgtgtggcaagcagcggagcaaacagctctactttctcttttccccgaaacactattggaggatcagccacatctccctgcaaagaggatttcatactaatattatccggtgtaagtggactaaatccgaagcgcatagctgcagtaagcattgttactcaccctctaaccacggcttgcatatcggtatcctgaagctgtccacctctgcgcctaaaggtcttaccaaagtcaacatctgcatgagcagaataaagtctacgcttaactcggtgtcaaaggccgtcttcggaaaccagaacgagatgatctctagactcgcgcaatttaagccaagcagccagattctccgcaaagtgagtgactcaggctggctcaagcagaaaaatattaagcaggccattaaatcactgaagaagtacagcgataagtcagcagagaagtccccatttcccgaggagaaaagccacattatagataaggaagaggatataggtaagagaagtctctttcactatactagtagtattaccaccaaatttggcgactcattctacttcctttctaatcacatcaactcatattttaaacggaaggaaaaaatgagccagcaaaaagagaacgaacatttcagggacaaatccgaactagaagacaagaaggtggaggaaggaaagctgcgctcccctgatcccggaatactggcctacaaacccggttcagagtcggttcatactgtggataagccgacctccccttctgcaatacccgacgtgctgcaggtgagcactaagcagagcattgctaatttcttgagcaggcccacggaaggtgtacaggcactagtcgggggatacattggcggacttgtacccaagctaaagtacgactcaaaaagtcagagtgaggaacaggaagagcccgctaaaactgatcaagctgtatcaaaagaccgcaatgcagaggagaagaaaaggctgtccctacagcgcgagaaaatcatcgctagggtttcaatcgataacaggacacgcgctctcgtgcaggctctccgacggaccaccgatcctaagctgtgtataactcgcgtcgaggagctgacatttcacctgctcgaatttccggaggggaagggagtcgctgtgaaagagaggatcatcccgtacctgctgagactcagacagataaaggacgaaacattacaggcagcggtgcgtgaaatcctggctctgattggatacgtggacccggtgaaggggagaggcattcgcatcctgtctatcgacggaggcggtacacgtggcgttgtcgcccttcagacactcaggaaacttgtggagctgacgcagaaacctgtccatcagttgtttgactacatctgtggtgtttcgaccggggctatcctcgcctttatgttaggcctcttccacatgccgcttgatgagtgtgaggaactttataggaaactgggaagtgacgttttttcccagaatgtgatcgtggggactgtgaagatgagctggagtcacgcgttctatgactctcaaacctgggagaatattctcaaggaccgaatgggctccgcactgatgatcgagacagcccgtaatccgacgtgtccaaaggtgcgaaaggacggcggactcctgttaaacaaccccagtgctctggccatgcatgagtgtaagtgtctgtggccagatgtcccactcgagtgcatcgttagcttaggcactggcaggtacgagtcagatgtgcggaacacagtgacttacacctcgctgaaaaccaagctgtctaatgtgatcaactcagccaccgacactgaggaagtgcatataatgcttgacggcctgctcccacccgatacttattttcgattcaatccagtgatgtgcgagaacattcccctggacgagagcaggaacgagaagttggatcagctccagctcgaagggctgaagtacatcgaacgtaacgagcagaaaatgaaaaaggtggccaagatcctgtctcaagagaaaaccactttacagaagatcaacgactggattaaactaaagaccgacatgtacgaaggcctaccgtttttctctaaactatag

SEQ ID NO: 234156 - DNA, 168 bp, synthetic construct
  misc_feature 1..168: note = Description of Artificial Sequence: Synthetic coding sequence
  source 1..168: mol_type = other DNA
atgtccattaacttgaccgtcgacatatatatatatcttctgagcaatgcccgatccgtgtgtggtaaacaaaggtctaagcagctctatttcctgttttctcccaaacactactggcggatctcacatattagtctgcagcgaggcttccatacaaacataatatag

SEQ ID NO: 234157 - DNA, 2349 bp, synthetic construct
  misc_feature 1..2349: note = Description of Artificial Sequence: Synthetic coding sequence
  source 1..2349: mol_type = other DNA
atgtcaatcaatctcacagtcgacatctacatctacctcctgagcaacgctagaagtgtgtgcggaaaacagcgctctaaacagctgtatttcctattctcgccaaaacactattggcgaattagccatattagcctccagcggggtttccacacgaacattatcagatgtaaatggacaaaatctgaagcacactcttgtagtaagcactgttatagcccttcaaaccatgggttgcacattggcattcttaagctctctaccagcgctcctaaggggctcaccaaggtcaacatctgtatgtcccggatcaagtctactcttaattccgtctccaaggccgtatttgggaaccagaacgagatgatttccaggctcgcccagtttaagccatcctcacagatactgcgtaaggtaagtgacagcggatggctgaaacagaaaaatatcaaacaggcaattaagagtctgaagaagtactccgacaaaagtgctgagaaaagtccttttcccgaggaaaaatcgcacattattgacaaggaagaggatattggaaagcgatcactctttcattatacttcaagtattaccaccaagtttggagactccttttactttctgagcaaccacatcaattcttactttaaacggaaggagaagatgtcacagcagaaagaaaatgagcatttccgtgataaatctgaactcgaggacaagaaggtagaggaaggaaagctacgctcccccgaccccggaattctggcttataagccaggtagcgagagcgtacacacagttgataagcctacctcgcctagcgcaattcccgacgtgctgcaagtctccacaaaacaatccatcgcaaatttcctgagccgacctacggagggagtgcaggctttggtgggtggttacatcggcggactggttccaaaactgaagtacgatagcaagtctcagtcggaagaacaggaggaaccagctaaaacagatcaggcagtatctaaggatcggaacgccgaggagaagaagaggctcagtctgcagcgagagaagatcatcgccagggtaagcatcgacaatagaactcgggctttagtgcaagcactgagacggaccaccgaccctaagctgtgcataaccagagtcgaggaattgacattccatctcctggagttccccgaaggcaaaggggtcgcagtgaaagaacgaattataccctacctgcttcgactaagacagatcaaggatgaaactcttcaggcagcagttcgagagatcctggcactgatcgggtacgttgacccagtcaagggaaggggtatacgcatattgagcattgacggcggaggaaccagaggtgtggtggctttgcagacactgagaaagttggtcgagcttactcagaaacctgtccaccagttgtttgactacatttgtggagtgtcaaccggcgctattcttgcatttatgctcggtttatttcacatgccactcgatgagtgtgaagaactttaccgtaagctagggagtgacgtctttagccaaaatgtgatagtggggaccgtcaagatgtcctggtcacacgcattttacgactcccagacttgggaaaatattcttaaggaccgcatgggatccgccttgatgattgagacggctcgcaaccccacctgtcccaaggtggctgctgtatcaacaattgtgaacagaggcataacacccaaagctttcgtgttccggaactacggtcacttcccgggaattaattcccattacctgggcggatgccagtacaagatgtggcaagcgatcagggccagcagtgctgccccagggtacttcgccgaatacgccctgggcaacgatcttcatcaggatgggggacttctcttgaacaacccctccgccctcgcgatgcatgagtgcaagtgtttatggccagatgtgcctctggaatgcattgtttcacttggtaccggtaggtacgaatccgacgtgcggaatacagtcacctacacatccctgaaaacgaaactgtcaaatgttatcaattccgcaaccgacactgaagaagtgcatattatgttggacgggctactgccaccggatacttatttccgattcaaccccgtaatgtgtgagaatatccccctcgacgagtccagaaatgaaaagctggaccagttgcaattagaaggactgaaatatatcgagagaaacgaacaaaaaatgaaaaaggtggccaaaattttgtcccaggaaaaaaccaccctgcagaagattaacgattggattaaactcaagacagatatgtacgagggcctgccgttctttagcaaactgtag

SEQ ID NO: 234158 - DNA, 582 bp, synthetic construct
  misc_feature 1..582: note = Description of Artificial Sequence: Synthetic coding sequence
  source 1..582: mol_type = other DNA
atgagcatcaatctgaccgtggacatttatatttacctgctatcgaacgcccgatccgtctgcgggaaacagcgaagtaagcagctttacttcctctttagtccgaagcattactggcggatctcccatatctcattacagaggggcttccacacaaacataatcaggtgcaaatggactaaaagcgaagcgcattcttgctccaagcactgttactctccatcgaaccatggcttgcacataggcattctgaagttaagtacatcggcacctaaaggtcttactaaggtaaatatctgtatgagtcggattaagagtacgcttaacagtgtttccaaggcagtctttgggaatcagaacgagatgatcagcagactggcccagttcaaaccttcatcacagattctgcgaaaggtatcagattcaggctggctgaagcagaaaaacatcaaacaggctatcaaatctttgaagaagtattccgacaagtccgctgaaaagagcccattcccagaggagaagtcccacattatcgataaagaggaagatatcggcaagaggtcactgtttcactatacctag
